United States Patent Application Publication US 2005/0208558 A1 - sequence listing, part 14

SEQ ID NO: 13285 - DNA, 9862 bp, DROSOPHILA
gaggacaagcacaagctgctcgaattcacgacgggatcggcgcgtgttccggttggcggcctgaaatgcctgcgtctgctaatcacgcgtcacggtccggatagcgatcggttgcctacctcgcacacctgcttcaacgttctcctcctgcccgagtacagcagccgcgagaagctggaggagcgcctgatgaaggccatcaactactcgaagggcttcggcatgctgtagactatggtccaaactgcaagtgcaagtctgtcatctggaactgataccaccacctctctgggaagaagatttcgaagactttgatcggtttgagttcgttttgggttctgccatttatttttgatacgacctgttcaatgagacaatatatacatacccaatatatgtgctcaatttatatggtgcgacggcgaagcgagcagaccgaacggacacgcgattttgtttcccttctttagcccagttaattgtacataaacacacacataaacacgccacatactacattatgtgaacttaccctaggaacaacacccacatttaaaaacagtacgcgctgaatattttcctaaataaatttaaagtagttcggcgaagaaacagatgtattttccatttagattggttttcgcaagtatggaatattttttaatattagatatttttaatttaaactaagattactaacaaattaaaattgtggaaaaagattcatttaaattatatttacatatttaatttagtatagaaacatcaaatacaaaacattttgtaagcaatatttcacactagctgacatttaaatttcggtgtgaagtactttttattttttaacttaaaaaataacttgttaactttattttttatttagtctagacacatttaaaaaaaaaagaggtgtgaaagccttatttcacaacagctgacttgggactagtggattttttaggccctttttttcaggcgatattttctaacggcttagccgcagccacacatttgttattcgcgtttctgagtttcttgcgggtgggactcccgatattttgtggagcggaaggtgttttgatttccttagcatttagcacaaaaaaatgcaactagtataaagtactgttcactataacaatttttaaccaccgatagcgagtgcttcactgtgtgtgcgagtaagagagagagagagcaactagctccagcatcatgagaatacaacaaagcgccttgttgttgttgctgctggccgtgacgtcgcaaggagatgccgagtccaattggaatggtttgttcttaatttctaactagaatgagttcatcagcagccatagaaaattatattgcattcatgttttcatatttttcgatcttaagtgcattccactgccgtacttattacacaaatgcacagagataaaaagggatgtgatgcggttggttttttcttatcattcttgataagaaactagaacatccttttctcgttcaaaacataaaaagtccgaaatgtagtttccccttacttttttctgtgtatgtgcagtacatatctcagagaatttgtttatgatccatataccacccgaccacatctctccttgccttttaatttgcttttgttttcgtttcgctttgatgctgcggtcgtttactctggaattgctcggaaaacggagcagatgcagattcaagtgttcagatgcatctgcatctgagatgaaagatacaaaatggttctcaaacagcaaattcgtttacacattcagaaattaaactgctttaaacaagccgaacttgttgtctaacatgtattcgttataatttaatgacttcagacaatacaatatcattttgttgtattctaattagaacccaaaactagaatacagtagagcttacgcaagttcaacgagcaatataagaaactattaaatttatgttaaattacattaattaaaaataatccaaaagtaatgacttactttctattaatctttactattgattcatatatatgttaatttacagacaaaatcaaagtgttcactgtggccactgaacccaccgatggctatactagatatattcgatctgcacgagtctacgatattgaggtgaggattcgtattaattagagcattttaaagtcgagacaagaaattgtttcacactgtctatctaatatctatgagctgctatagttaggtattatggttagcggaaaaagaattataaagcggttggaactttgaaacttgacagttcatcaagaaagacattctaccatctgggataaaaattagagaacattaaatacagttatgcatatacttctgcctgaacaaaattggccaacttttatgtttaatagaacatctgcgaacaactcttcatatgcaaatgagttttgattgtttttattgatgaatttctaatttgacgacactctcagacaatagaattttcataaaaactggtatataagctagaacatagcatttatgacagattagaactggacgatgtgagtatgtattgtattgtcttaaatgaatcaagacttgcccggcggcttggcacacttaggcaacattgtattattaaaatgtctggttagcatataatatagtagctatatatatctgtgcctattcgccgctacccgagcatccggcgttggcgtccgattttctgatgtggaacaccgagattggctgctggacattgtgggggcaacgacaacatgtagtcaacatatagtgcacacatgttgaaatcacgtacgccaaggagattcggtgcagtcgccgggggtaattagcacaatacattgggattgggttcccgattcattgatagcttagaactttctacaccaagtcgatgggagatttcgcttatcggtgacactttttgtattgtcggccggcttagaaattttgttgttcaaaaatatatatgcacgacaataaaatgtgctgataagctcgcttagccggctttttttcatggattgaacctgatctctccccctttgctttgaatttctatatatgtacattttttttttgtatttaaagaactgtgcgacccaagatatttaataccgcagcgttgctaaatgaatgaaatttgtgatttggtttcctttaatggaaaagatatgatttcttttaaattttgtgtcatatttttggttgctttgtatatgttttatataatatgagcttgtagattaaacaaatatatagatttaggtagcttgttagtccagtttgttgtcagtgataaagatatacgcatcagatcactggttagcatttaaaataatatttaatctttaaaggtaaccacccttggcttgggagaggaatggaaaggaggagatatgcaaaagcctggcggcggatttaagctcaaccttctgcgcgaagctattgctccgtataaaaatgaacccgaaacaatcatactcttcacagacaggtttgaaattcaatgaaaaatccaaaggagttgttaataattaaggtgtactttttagctacgatgtgattatcaccaccacgctggatgagatctttgagaaattcaaggagtctggtgccaagatactcttctccgccgagaaatactgctggcccgacaaaagtctggccaatgactatcccgaagtggagggcaaggcctccagattcctcaactcgggcgcgttcattggttatgcaccacaagttttcgctctgctggtggatccaattgaagacactgccgacgatcagctatattttacaaagatcttccttgacgagaccaaacgcgccaagctgggcttaaagctggacgtacaatcgcgcctattccaaaacctacatggtgccaagaacgatgtgaagcttaaagtggatctcgagagcaatcagggcgttctacagaacgtggatttcatgacaacgccttccatcatccatggcaatggacttagcaaagtggatctgaatgcatatggcaactatttggccaggacttttaatggcgtctgccttttgtgtcaggaaaatcttttagacttggaagtaagcgattttgaatatgcctataaacatgcttatattatattataatatacaatatattttctaggagacaaacctacctgtgatttccctagccctgatggtcacgcaacccgtacccttcttcgaccagtttctggagggcatcgagagtctgaactatcctaaggaaaaacttcacttgctcatctacagcaatgttgcatttcacgacgatgacatcaagtcgtttgtaaacaaacatgccaaagagtatgctactgccaaatttgctctttccactgacgagttggatgaacgccagggcaggcagttggccctgtaagttgtataattaattatttttgaattaattgaaatgggtgtacgaaccactttatttcataccatatcatatcgaagtttgtattgaagaccttttatttgttccattttttccagtgacaaggctcgtctccaccagagtgattatatattctttgtggatgcagatgcgcacatcgacgatggcgaggttctccgggagctgctcaggctgaacaagtaggtcaaggccactgcaatccctttccctcaaataaccataattgatatccttgcaggcaattcgtggctccgattttctccaagcacaaggagctgtggagcaacttctggggcgctctttccgagggaggctactatgccaggtcgcacgattacgtggacattgtaaagcgggaacttatgtaagtgcaagctttatactctgttaactaaagggtagagaaactttctttagtttgggtatacactattttattccattttttaaacgagattttcttcataaaagattcttttttgtcatgtactctgatatatttcagatttattttttatgttttgccaagtgcaacaaatttgaaataataagaatgataatggctttgttgcgatcagtcgaaggcaatggagaaatccgtcttaaaactgcgccgatcgatggagtacatgttgtcggcggtgcattcgtagagtccagcgtccatctgtgtggcagggtcaatttcgatcttcgacttgaccttgtcgtcgccgatgcgccattcgtgtacgtgcatatagaggtgctgatagatctccgctccgtccttgtaccaggtgatatggggtcggggattgcccttggccacgcacaaaaaggcgatcttgtggcccagaacgtactcaagatcgaagtgcgaggcttgtaggattttggcgccctaaaacaggcaatagttaatagggaacttcagcaaatttcaccttcacttacattattattattgtagtactgatcggactccggatcgcgatattttccggtaattggcaatccgatctgcaccctggacttggttcgtccacgtccacgccctcggcgcgcttcgcaaacgggcgtggccagcattaatagccccaaagcgagacagacgatcaggcacttaacctgcatgactctccggataatggataatgctgctgacggagatgatcactgtcgctatattttcctgctgctgctgctgctgctggcgttgctgtgcgaatctcgtttgatcggtgactgatccactcggccagagtctgcaccactctgctcggctcatctaatttgccacaattgtccggcggatttaaaccgtttggtgtgctctcgaaattcgccgccgctcgcggcttttttattctggattcacatttctcatcgccgcatttccacatttcactcaattccctagctagatttgatttggtagcttgctgatatcgctcgccatcgtaggccatggcacccctttccatgtgtcttgctgggattcggtctagtttacagtggcaatggcacgatagtacgctttcagggaaagtagttaaaggaactggattgttgtattcaaatattttcccgaatatgcagataatagtttatacattttggttcgtcaaaacaatttgtagatacaatgagatggatttagattttattactacttagtgctagaagaacatcgatttgtaaacttgttattctattttaaaaaacatgtttgtgtttctttgttccactgtgcctttttgaaggctatagagcactcaacactttagaaccaaaaagcctcggtttgtttggtttgctttcacacattttaataaaataaatgcaaaaaaatcacttgaattgggtaattgagtcaatttgtcggctttgtgcgcacacacacctatgtactttgccactcacagatactcacataaatgcacacgaggaagcagaaaggtcggattgaaatagactttaaatttccataatccgaaacgcaaaaatgtatttttaaatatttttatttaattgtatcgaaagcattgtagtttatagttacatctcagctttactgtgtcaaaggattttgtaatggctgaaaagtgggcttttctcaaaagttaaccataacgtagtccgtgcgaaaacctcgacgatcgatggcatagatattgtccgcttgacactcgtagaaacctgaaaagattggtaataatatatacatataatctaagtatacatttaatgatcatttgtcgaacttaccagcatccatttgagtggttggatcgatttccattttagatttaacaatattcgcttctatgtgagattcgtgtacctgtaaatgtaaaaattttatatatatatttaaagtattaatttcgtaagttacctgaaagaatcggtgttggtagagctctgcgccatccttaaaccaggtaatggtcggtcggggattgcctaatatccaaaaatgtcagtatgtcaatgtttggtgacttggtaacttcatctaactaactctcaccttgagccatgcaaaagaaagtgatcttgcgtcccagggtgtagtccaattcaaaatgcgaagactttatgatcttggcgccctgaaaaatgttaccacatgtattaatgttgaaaacaatgttgacccactcacattttcatgatcataatagttgactgcatcctgtgatcggtgttggatgaccacgggttttttgcccgtgtagttgcgacgctccgtctttcccgcagtgcttcctgtgacaaaatcagatatttaatttatgcttaattaatatagtttagatcgctcactttgggcggctatgtagatgagatcgccgaaaatcaaaaagcatagacagaggagcacgatccgatgaagattacagatgccacgaggcattattgtcgagccgagattccgattccgatcgcctgcggtgaatgttgttttcaaactgcactgtcgacatccgaacagaacgccatccacatcgctctaatgtgagcgtttttattgaattaagtgaatttagttgggggctttcgacggtgcgacgtcactttccattttcgcaacattgttgcaaatccgctggacatcgagatcattccgctctcgactttatcgttcgccctgttttgactaactcattcgtcacttgcgtttcgttcgcccatttccagtggaatgttcaatgtgccccatgtaacgagcatatatctggtgaagaaaaccgccttcgatgccatctccttcaagcacaaggaattcgatcccgacatggccatgtgcgagtcactccgaaatgcggtaagtgtttgacagaacatcgtgttcaattggttactaatgtgtccactcttctgtccagggtatcttcatgtacgccagcaatctgcgcatattcggtcacttggtcaacgccgatgacttcaacactacggtgacacgtccggacttttatacgttgtttagcaacgagatcgactggacggagaagtacatacatccgaactactcactgcagctgaacgagagcaacaagatacagcagccgtgcccggatgtctattggttccagatcgtgtcggacgcgttctgcgacgatttggtggccatcatggaggcgcacaacggttggtcggacggcagcaacaacgacaatcggctggagggcggatatgaggcggtgcccaccagggatatccacatgaagcaggtgggcctggagcggctctatcttaaatttcttcaaatgttcgttcgtccgctgcaggagcgcgcctttacgggttacttccacaatgtgagtcaaagaattatcattttgaagattttgttttaatattctcactaattttgtagcctccacgcgcgctgatgaacttcatggtgcgttatcggccggatgaacagccttctctgcgaccccaccacgactcctccacgtacaccatcaacattgcgatgaaccgggcgggtattgactatcagggcggtggctgtcgtttcattcgttacaactgctccgtgaccgatacgaagaagggatggatgctgatgcacccgggtcgactgactcactaccacgagggattgctagtgaccaatggcacgcgttacatcatgatttccttcatcgatccgtagggtagctaatttaagtcgtactctttatatcaaactgccatatcggccactccaaagaactgcatactaagcccaatgaacaatttatgttgatggaattgcggcatcggccttctatttctgatgattttacatactactttgagatcgatagctttaggatactctgatgaatctgttgcagccttaagttaattataagcttttttaccaagtgcaaagtgttcaatttttgaataaattaattcaattattaaatgaaatacatttggttttgtttttgtctggagaaattcttatcttttataatttcaaatcaaatatttaatttacgtggttcaatttaattcgctttcgaaagaatattgttctctaacgtgaaatgctgaaccaacacagctgttttgcgaaagcgggatagcaccttcaacagtgctgccccccacgcaactaacagcagcggttgtgcagacttctgctgttagcaaacatttacagcagacacttgacagaatgcacaccaaaatttctctagtgagttttaaaataaataaatctatatgaactttaaagttttttaatcaaagataaatatatttctaaaaaaaagcaggatgtgcatacataacattttattttgactaaataaagatttacacgctgccataatttaaaattcaacaaaaaacatattctattttaatgtatatttttttatattttaacatatgagaggctaacagagtagcttgattacagaacccgtaagaatgttaggaagtcgaaccactgcgtactgttgttgcatcgagcacaaggcttcgaacttgcgcgagttcgaacgactccaaaagaaaagtgtatttaagcgcttggcgaagcacgctctatgttattgctcgattttcgtccgcgtagctggttggttcgtcacaattttttataaattaggaagaactaaataaactaagcggacattggcttaaaggccagcaaacaatatacggaaataaacaagtttgttgggtaaatgcaactgaaattgacgaatactttcgagaaatttagaagactccagtgtttgcagacttcgtgtgcgggtggtgtgcggtacatttacagttagttgcgcaaagtgcgtgtttaaaaataacaaaaatcgacgctggatataaaaaccgaaataagtagggagagcaataaatgagtggcgaagagaaatgcaaatttatcgagtcggtcaatttaaaaaagccgcat

SEQ ID NO: 13286 - DNA, 2641 bp, DROSOPHILA
cagccacacatttgttattcgcgtttctgagtttcttgcgggtgggactcccgatattttgtggagcggaaggtgttttgatttccttagcatttagcacaaaaaaatgcaactagtataaagtactgttcactataacaatttttaaccaccgatagcgagtgcttcactgtgtgtgcgagtaagagagagagagagcaactagctccagcatcatgagaatacaacaaagcgccttgttgttgttgctgctggccgtgacgtcgcaaggagatgccgagtccaattggaatgacaaaatcaaagtgttcactgtggccactgaacccaccgatggctatactagatatattcgatctgcacgagtctacgatattgaggtaaccacccttggcttgggagaggaatggaaaggaggagatatgcaaaagcctggcggcggatttaagctcaaccttctgcgcgaagctattgctccgtataaaaatgaacccgaaacaatcatactcttcacagacagctacgatgtgattatcaccaccacgctggatgagatctttgagaaattcaaggagtctggtgccaagatactcttctccgccgagaaatactgctggcccgacaaaagtctggccaatgactatcccgaagtggagggcaaggcctccagattcctcaactcgggcgcgttcattggttatgcaccacaagttttcgctctgctggtggatccaattgaagacactgccgacgatcagctatattttacaaagatcttccttgacgagaccaaacgcgccaagctgggcttaaagctggacgtacaatcgcgcctattccaaaacctacatggtgccaagaacgatgtgaagcttaaagtggatctcgagagcaatcagggcgttctacagaacgtggatttcatgacaacgccttccatcatccatggcaatggacttagcaaagtggatctgaatgcatatggcaactatttggccaggacttttaatggcgtctgccttttgtgtcaggaaaatcttttagacttggaagagacaaacctacctgtgatttccctagccctgatggtcacgcaacccgtacccttcttcgaccagtttctggagggcatcgagagtctgaactatcctaaggaaaaacttcacttgctcatctacagcaatgttgcatttcacgacgatgacatcaagtcgtttgtaaacaaacatgccaaagagtatgctactgccaaatttgctctttccactgacgagttggatgaacgccagggcaggcagttggcccttgacaaggctcgtctccaccagagtgattatatattctttgtggatgcagatgcgcacatcgacgatggcgaggttctccgggagctgctcaggctgaacaagcaattcgtggctccgattttctccaagcacaaggagctgtggagcaacttctggggcgctctttccgagggaggctactatgccaggtcgcacgattacgtggacattgtaaagcgggaacttattggaatgttcaatgtgccccatgtaacgagcatatatctggtgaagaaaaccgccttcgatgccatctccttcaagcacaaggaattcgatcccgacatggccatgtgcgagtcactccgaaatgcgggtatcttcatgtacgccagcaatctgcgcatattcggtcacttggtcaacgccgatgacttcaacactacggtgacacgtccggacttttatacgttgtttagcaacgagatcgactggacggagaagtacatacatccgaactactcactgcagctgaacgagagcaacaagatacagcagccgtgcccggatgtctattggttccagatcgtgtcggacgcgttctgcgacgatttggtggccatcatggaggcgcacaacggttggtcggacggcagcaacaacgacaatcggctggagggcggatatgaggcggtgcccaccagggatatccacatgaagcaggtgggcctggagcggctctatcttaaatttcttcaaatgttcgttcgtccgctgcaggagcgcgcctttacgggttacttccacaatcctccacgcgcgctgatgaacttcatggtgcgttatcggccggatgaacagccttctctgcgaccccaccacgactcctccacgtacaccatcaacattgcgatgaaccgggcgggtattgactatcagggcggtggctgtcgtttcattcgttacaactgctccgtgaccgatacgaagaagggatggatgctgatgcacccgggtcgactgactcactaccacgagggattgctagtgaccaatggcacgcgttacatcatgatttccttcatcgatccgtagggtagctaatttaagtcgtactctttatatcaaactgccatatcggccactccaaagaactgcatactaagcccaatgaacaatttatgttgatggaattgcggcatcggccttctatttctgatgattttacatactactttgagatcgatagctttaggatactctgatgaatctgttgcagccttaagttaattataagcttttttaccaagtgcaaagtgttcaatttttgaataaattaattcaattattaaatg

SEQ ID NO: 13287 - protein, 721 aa, DROSOPHILA
MRIQQSALLLLLLAVTSQGDAESNWNDKIKVFTVATEPTDGYTRYIRSARVYDIEVTTLGLGEEWKGGDMQKPGGGFKLNLLREAIAPYKNEPETIILFTDSYDVIITTTLDEIFEKFKESGAKILFSAEKYCWPDKSLANDYPEVEGKASRFLNSGAFIGYAPQVFALLVDPIEDTADDQLYFTKIFLDETKRAKLGLKLDVQSRLFQNLHGAKNDVKLKVDLESNQGVLQNVDFMTTPSIIHGNGLSKVDLNAYGNYLARTFNGVCLLCQENLLDLEETNLPVISLALMVTQPVPFFDQFLEGIESLNYPKEKLHLLIYSNVAFHDDDIKSFVNKHAKEYATAKFALSTDELDERQGRQLALDKARLHQSDYIFFVDADAHIDDGEVLRELLRLNKQFVAPIFSKHKELWSNFWGALSEGGYYARSHDYVDIVKRELIGMFNVPHVTSIYLVKKTAFDAISFKHKEFDPDMAMCESLRNAGIFMYASNLRIFGHLVNADDFNTTVTRPDFYTLFSNEIDWTEKYIHPNYSLQLNESNKIQQPCPDVYWFQIVSDAFCDDLVAIMEAHNGWSDGSNNDNRLEGGYEAVPTRDIHMKQVGLERLYLKFLQMFVRPLQERAFTGYFHNPPRALMNFMVRYRPDEQPSLRPHHDSSTYTINIAMNRAGIDYQGGGCRFIRYNCSVTDTKKGWMLMHPGRLTHYHEGLLVTNGTRYIMISFIDP

SEQ ID NO: 13288 - DNA, 4827 bp, DROSOPHILA
ttttacctaggatccagtctaattggatttacctggaccaattggagtgcggcggcacacacaagtttgagcctgtgcgaaaaatataaaatcaatgcaggaacaagtgtgtgcgaaaatatttatgacacccacccactcacacgctcgcacacacacacttgcaagcacacgcacacgtgtgacgtgttttttcgtgttttcccctcgtcttttacttaccactgtgcttggtttttccacggtcgttgggtattacttaaaacttaattcgattgatagtcgttctatgctgagaaatgtttcaagcgcgtcattttgatctatttttatagtgtttttttcgatagactttgattttttgcctttggctgccaactcgcctgcgctcctcactctctttggctctcttttgcacggctgtgtgtgtgtgtgtgtgtgttggtgcactcacgcagttgccttcgttgcgtaaattatgcaaaatgcaggccaattgcaatgtgtttacaaaaacagaacaaacgatcgcgttaagtgtgttttttgcgattttacgagcgcgttaactggtctctgcgaaatacgcaaacggtatgaacgtcaaaatattggcagcagcgacgaaaacatctgcagatgggcttacgaaaaattcacaaactgaggccagtgttgggcagcggacgaagggcgaaataccaattcaaagggaggcaaaatataccgcaatggtactctagaaaattcacgattgttttggtttgtccataacttcaacgtttaaataaggtgcacttagaaaattctagatgttcacaatttgtaaaaaaaatgtacacaagccaaagttatcttagttttatgaacaatttttctgtattcttaaaatattgtttacatgttaattaggatttaattactttggtattagctgcggtatcttaataccactacttttcaaaccttctggcaacgccatttcgatcagctgttttcgtgggacgcgcatgagaaaattattgtttgcggcatttcatgaaaatcgcgaaaaatggtgacaaaaacgataaaatctctgaatttagagatcaatttcgtaagtaccatgaaatatatgtaaatcacaactaacctatcaagtttttcacacacaggaagtggaggatgtgccgtatgaggaggaaatccttcgaaacgcctactccgtaaaacattggctgcgctacattgatcacaaagcgaaggcgccgaataatggtgttaacatggtctatgagcgtgctctgaaagagcttcctggcagctataagatctggcacaattacctgagaactcgcaggaagcaggtgcgcggcaagatacccacggatcccatgtacgaggaggtcaacagtgccttcgaacgtgcactggtgtttatgcacaaaatgccacgtatctggatggactacggtgccttcatgacctcgcaatgcaagattacccgcacccggcacgttttcgatcgggctctaagggctctgcccatcacgcagcacggcaggatttggccactgtatttgcagtttgtacgccgctttgaaatgccggaaacagcactgcgagtctaccgtcgatatctgaaactctttcccgaggacacagaggaatatgtggactacctacaggaagcagatcggctggacgaagctgcccagcagctggcgcacatcgtcgacaacgagcacttcgtttccaaacacggcaagtccaatcatcagctgtggaacgaattgtgcgacctcatctcgaagaatccacacaaggtgcactccttgaacgtggacgccatcattcgcggtgggctgcgtcgctacaccgatcagctgggccacctgtggaactctctggcggattactatgtgcgttccggcttatttgatcgggcaagagatatatacgaggaagccattcaaactgtgaccaccgtaagagacttcacccaagtctttgatgaatacgcacagttcgaggaactctcgctgaacagacgtatggagcaggtagctgccaatgaggcggccaccgaggaggacgacattgacgttgaactgcggctctcacgcttcgaatacctcatggagcgccgtttgctgctgttgaatagtgtgcttctgcgccagaatccgcacaacgtgcacgagtggcacaagcgggtgacactgtacgaggacaagcccgccgagatcatcagtacgtacaccgaggccgtgcaaacagtgcagccgaagcaggcggtcggcaaactacacactctctgggtggagttcgccaagttctacgaggccaacggacaggtggaggatgctcgtgtggtcttcgaacgcggcactgaggttgagtatgttaaagtagaggatctggcggcggtgtggtgcgaatgggcagagatggagttacggcaacagcagttcgaggcggcactcaagctgatgcaaagggcgacggccatgccaaagcgaaagattgcctattatgatgatacggaaacggtgcaggcgcgccttcatcgctcgctaaaagtgtggtccatgtacgcggatttggaggagtcattcggcacattcaagacgtgcaaagccgtctacgagcggattattgatctgaaaatctgtacgccacagatcattatcaattacggaatgttcctcgaggagcacaactactttgaggaagcctaccgagcctatgagaagggcatctctctgttcaagtggcccaatgtctacgacatttggaactcttatctaaccaaatttttggagcgctatggcggcacaaaactggagcgagccagagatctcttcgaacagtgcctggatcagtgtcctcccgagcatgctaagtacttttatttactgtatgctaagttggaagaggagcacggtctcgcccggcatgccatgtcggtctatgatcgtgccacgtctgctgtcaaagaagatgagatgttcgacatgtacaacatatttataaagaaggcagccgagatctatggcctgccacgtacccgcgagatctatgagaaggccatcgaatcgctgcccgagcagaatatgcgccacatgtgcgttaagtttgctgagttggaaacgaagttgggcgaagtggatcgagctagagccatctatgctcattgctcacaggtatgataatatatatagatttctaatgcatcacttaatctaattattgtttgcattcttcaggtttgtgatccccgcatcactgcagacttttggcaaacttggaaggagttcgaagtgcgtcacggcaacgaagacacaatgcgcgaaatgctgcgcatcaagcgctctgtgcaggccacttacaatacgcaggtgaacatgatggccgcccaattcctgagcacaaacaacggagcggctgcggatgctggagcaggagctggaccggatgccatgcgattgctggaggagaaagctcgccaggcggcagccgagtccaaacagaagcccatcgagaaggcggcctcgaatattatgtttgtgcgcggtgagactcagggtggtgctaaggataaaaaggatacggtcgtcaatcctgatgagatcgacattggagacagcgacgaggacgatgaggaggaggacgacgatgaggagaacgagatgacgaacgagaatcaggccagtgcagcggtcacgaaaaccgacgaggaaggcctggtcatgaagaaactgcgcttcgaacaaaaggccattccagccaaggtcttcggcagcctcaagccctcaaatcaaggcgactctgatggagagtaaatgtttatacatatatatgacttttttcggggtaaatacatgtatgtcgaaagttttacaattgtaattgatcggtttttatgttctggcctcaattagattcttaaatggtactttgatattaattgttgtcaaacgaagggggcctgttagatattgtctccgttttggatgatctagttagtatagccttaggccaaacagaggaacacactttcaactgtcattccaaaattgttaggcacttcgtgatctaaaaaagctaaccagacgtgcgcaagggcggactaaccaggactaaccacacaccgtgtatctcgaagatggcatccacacgcatgatcagtgcttttacgcgcaatccaagattatatcaacaggtcacggcaccctggaaatcgtacaatctgtttggaacaccactttttaaccacagacttcagccagcggattctcaaatctggaggggattagcagacaagtgtgacaacaagactgttatcaagggcgtggtggtgggcgtctactccaaggagggcgacggtaaggaggtcaagatgacgtccagcggcgagaagttcgacgaccgaactcagggcaaggtctcggagctgttgcgcgaaactggaatcaagggggaactgggcaagggtaaggtcttcatgaacgtggatgccgaattccgggcagtggctgtggtgggtttgggccaagaaggtgccggcttcaatgacctggagaatatcgacgagggtatggagaatgcccgcgttgccgctggcgtcggagctcgggcattgcaactgcagggttgcacggaagtctttgtggactccatggaatatccggagcaggcggcggagggcagtgctctggccatctggcgttacaatagcaacaagcgcaagcaggatcgcactcaggtacccaaactggatctgtacgactcaccggatgtggatgcctggacgaggggtctcttcaaggcggaatctcagaa

SEQ ID NO: 13289 - DNA, 2706 bp, DROSOPHILA
tgggacgcgcatgagaaaattattgtttgcggcatttcatgaaaatcgcgaaaaatggtgacaaaaacgataaaatctctgaatttagagatcaatttcgaagtggaggatgtgccgtatgaggaggaaatccttcgaaacgcctactccgtaaaacattggctgcgctacattgatcacaaagcgaaggcgccgaataatggtgttaacatggtctatgagcgtgctctgaaagagcttcctggcagctataagatctggcacaattacctgagaactcgcaggaagcaggtgcgcggcaagatacccacggatcccatgtacgaggaggtcaacagtgccttcgaacgtgcactggtgtttatgcacaaaatgccacgtatctggatggactacggtgccttcatgacctcgcaatgcaagattacccgcacccggcacgttttcgatcgggctctaagggctctgcccatcacgcagcacggcaggatttggccactgtatttgcagtttgtacgccgctttgaaatgccggaaacagcactgcgagtctaccgtcgatatctgaaactctttcccgaggacacagaggaatatgtggactacctacaggaagcagatcggctggacgaagctgcccagcagctggcgcacatcgtcgacaacgagcacttcgtttccaaacacggcaagtccaatcatcagctgtggaacgaattgtgcgacctcatctcgaagaatccacacaaggtgcactccttgaacgtggacgccatcattcgcggtgggctgcgtcgctacaccgatcagctgggccacctgtggaactctctggcggattactatgtgcgttccggcttatttgatcgggcaagagatatatacgaggaagccattcaaactgtgaccaccgtaagagacttcacccaagtctttgatgaatacgcacagttcgaggaactctcgctgaacagacgtatggagcaggtagctgccaatgaggcggccaccgaggaggacgacattgacgttgaactgcggctctcacgcttcgaatacctcatggagcgccgtttgctgctgttgaatagtgtgcttctgcgccagaatccgcacaacgtgcacgagtggcacaagcgggtgacactgtacgaggacaagcccgccgagatcatcagtacgtacaccgaggccgtgcaaacagtgcagccgaagcaggcggtcggcaaactacacactctctgggtggagttcgccaagttctacgaggccaacggacaggtggaggatgctcgtgtggtcttcgaacgcggcactgaggttgagtatgttaaagtagaggatctggcggcggtgtggtgcgaatgggcagagatggagttacggcaacagcagttcgaggcggcactcaagctgatgcaaagggcgacggccatgccaaagcgaaagattgcctattatgatgatacggaaacggtgcaggcgcgccttcatcgctcgctaaaagtgtggtccatgtacgcggatttggaggagtcattcggcacattcaagacgtgcaaagccgtctacgagcggattattgatctgaaaatctgtacgccacagatcattatcaattacggaatgttcctcgaggagcacaactactttgaggaagcctaccgagcctatgagaagggcatctctctgttcaagtggcccaatgtctacgacatttggaactcttatctaaccaaatttttggagcgctatggcggcacaaaactggagcgagccagagatctcttcgaacagtgcctggatcagtgtcctcccgagcatgctaagtacttttatttactgtatgctaagttggaagaggagcacggtctcgcccggcatgccatgtcggtctatgatcgtgccacgtctgctgtcaaagaagatgagatgttcgacatgtacaacatatttataaagaaggcagccgagatctatggcctgccacgtacccgcgagatctatgagaaggccatcgaatcgctgcccgagcagaatatgcgccacatgtgcgttaagtttgctgagttggaaacgaagttgggcgaagtggatcgagctagagccatctatgctcattgctcacaggtttgtgatccccgcatcactgcagacttttggcaaacttggaaggagttcgaagtgcgtcacggcaacgaagacacaatgcgcgaaatgctgcgcatcaagcgctctgtgcaggccacttacaatacgcaggtgaacatgatggccgcccaattcctgagcacaaacaacggagcggctgcggatgctggagcaggagctggaccggatgccatgcgattgctggaggagaaagctcgccaggcggcagccgagtccaaacagaagcccatcgagaaggcggcctcgaatattatgtttgtgcgcggtgagactcagggtggtgctaaggataaaaaggatacggtcgtcaatcctgatgagatcgacattggagacagcgacgaggacgatgaggaggaggacgacgatgaggagaacgagatgacgaacgagaatcaggccagtgcagcggtcacgaaaaccgacgaggaaggcctggtcatgaagaaactgcgcttcgaacaaaaggccattccagccaaggtcttcggcagcctcaagccctcaaatcaaggcgactctgatggagagtaa

SEQ ID NO: 13290 - protein, 883 aa, DROSOPHILA
MVTKTIKSLNLEINFEVEDVPYEEEILRNAYSVKHWLRYIDHKAKAPNNGVNMVYERALKELPGSYKIWHNYLRTRRKQVRGKIPTDPMYEEVNSAFERALVFMHKMPRIWMDYGAFMTSQCKITRTRHVFDRALRALPITQHGRIWPLYLQFVRRFEMPETALRVYRRYLKLFPEDTEEYVDYLQEADRLDEAAQQLAHIVDNEHFVSKHGKSNHQLWNELCDLISKNPHKVHSLNVDAIIRGGLRRYTDQLGHLWNSLADYYVRSGLFDRARDIYEEAIQTVTTVRDFTQVFDEYAQFEELSLNRRMEQVAANEAATEEDDIDVELRLSRFEYLMERRLLLLNSVLLRQNPHNVHEWHKRVTLYEDKPAEIISTYTEAVQTVQPKQAVGKLHTLWVEFAKFYEANGQVEDARVVFERGTEVEYVKVEDLAAVWCEWAEMELRQQQFEAALKLMQRATAMPKRKIAYYDDTETVQARLHRSLKVWSMYADLEESFGTFKTCKAVYERIIDLKICTPQIIINYGMFLEEHNYFEEAYRAYEKGISLFKWPNVYDIWNSYLTKFLERYGGTKLERARDLFEQCLDQCPPEHAKYFYLLYAKLEEEHGLARHAMSVYDRATSAVKEDEMFDMYNIFIKKAAEIYGLPRTREIYEKAIESLPEQNMRHMCVKFAELETKLGEVDRARAIYAHCSQVCDPRITADFWQTWKEFEVRHGNEDTMREMLRIKRSVQATYNTQVNMMAAQFLSTNNGAAADAGAGAGPDAMRLLEEKARQAAAESKQKPIEKAASNIMFVRGETQGGAKDKKDTVVNPDEIDIGDSDEDDEEEDDDEENEMTNENQASAAVTKTDEEGLVMKKLRFEQKAIPAKVFGSLKPSNQGDSDGE

SEQ ID NO: 13291 - DNA, 3411 bp, DROSOPHILA
cacaggaacagagccaggctaacgtgttgataaccttgttgaccacaagaatttccagcgaaacgacagtttcaacgactgcactgagaaaaaattatatcgatttcaaaacgagaggttaatgcttcaaaatatttgaaatattccttgttactattgaaataaaatgtaaaatttattagattgatgaatttgaatacacttttcgttcgaagtgagagaaatttttgtagtcaatggggcagttcattttttcttcttgtgcgcaaatatattttatgccctgacaccgcgggcaataaatgaaaatgaaaccgcgaaaacgtgtgtctatgactgagtgcgacaaataaacaatcatgcaaggcggagacattacccgaggcctccgggaaccagttagaagccgccagagaccagcactccagtatcccgcccattctttgatctaatttgaaaatgtcgcttggcagttccgttcgaatatcacgtagcccaaacacagtcggttgctgaccttcaggtgatttgcaaataatggttttcagttcaattccgtcttgcaattagcaaattctataaagaccgcattgaccggccaaacagtggcagcaattaacataattccaaatttactatcacttttaattgctctccattcgcgactgttggcctttccaaagccaccagcgatgatcggtgggcaaaaaagcagccatttgtcacatgtttcaaggtatttaaatcactggttacgtttatactataagaagtgcactcatttttcaacgaacacatatttaaccaggaaaaagttcgaagagttacaaatgcaaataagttcaattggaatagtatactaatactattattacgcacaatttaaaatgaaaataaggttaacaatcattttgaattttcgcgctagcccccgcagtgtgaccatcactcactaacgccatgatatcggtgcccctgctgatggtaaaaacgtatggaacacatctgcttatagaggaatattctcgattttaagcgaaatttgtacacatttagttaaaccaaaacatacataattagttcaaccgaaacttaataatcatggaacaatgctataacagaggctgtggccaactcttcgatccgcagaccaacaatgatggtaagcagccggcaatgcacattcctgctgagtgcttaaccccccgtaatcccgcccagaatcttgtcggcaccatccgggtgaacctttcttccacgacgcctataagggttggtcctgctgcaacaagaagtcggtcgacttcaccgagttcctcaacatcaagggctgcaccttggcaaagcactcgaatgtgaagccaccagagccggagaaacctgttaaagatgagtccgacaaggatgaggtaattgaggtgcgggcacccatccgggaagccctgccgcgtccgcccattgattcgccgctaaccgttatacagcccaccgtggctcctgccctgaaagacatggtttttgcagtcaaaacgccggctgctcaaaagtccagcgacgccattgaggtgggaaccacttgcaagaataacggctgcacctactcctttacgggtaacagcagcgactttggcgagtgcacctaccatccgggcgtgccaatctttcacgagggcatgaaattctggtcctgctgccagaaacgaacctcggacttttcccagtttatggcgcaaaagggctgtacctacggtgagcacaaatgggtcaaggaggtgagtgccctaaaaagcaaagagacttggaacacacaagaagaatttttaaaaactcccctattatagaacgacgacaaaaaggttgtgcaatgtcgctacgactggcaccagacggccaccaatgtggtgatggccatttatgctaaaaaatacgattacagtcagagcgtgatagagctgaaccccatcaggctgcacgtcaacctggtatttcccgagcaggacaacgccaggtttgacctggacctggaattgcgcggagtaagtcccaagtccaactgaatttcatggtaaacagactaatcgtatccccttgcagattgtgaatgtgagcaatgcaagcgcgcatatgtatggcaccaaagtggagattaaactgcccaagctggagcccggctcttggtccaacctaaattttcccaacaagaaactgccagtggttaagaaaagccaggtggaagagaagaaaaagcaggaggagagcgatgaggagttcttcgacctggatgacattaaagcggagaccagtttccgtctttccgaaatgagcatgcaaagcccaaacaacttagattaataaagaagttggcatttaatgttatataaaatacacgaatttgcctttgagtagtttgacacagtttgtagcttaatcgtcgtcgtcgtccgccccgggcacccaatcctcatcatcatcgtcatccaaatccaattcgccaatatcctggaacagcgtctcatcgattttgacattttcaatgttttcacccgcctccaggaggaacttgatatccgaatcgttgagcgtgttgtcgcacataaagagttcgcgtccggtctgcttcttggacacattgttcttctcccgcttggcggcaatgccggtgctctcctcgaattcgagcttccatttgaggaaggactccaccgtcacacgggtgccctcaaacttcttgcgttcctcctcttcgatttcccgcagcttctgctctcgcagttcctcctggtggaacttgtgttcatcccaccgctcgttcagccactcctgggcgctgcttaccagcgaaaagatcatctccatgcccaggttctcctcaattgtcttttgcaggtgttccaggaggcgcgtttcaaacatgtcctcaaagttttctggctcctcgatttccaccacgggtgctccatccggataggtagctgtgaatgtgaagaccagtttgcaggcaagacctttctcgggctcctccgaactgtactcctccgtggcaattggaatctggaatttgtggtgcggctccgtggcgagaactgaacagaagcaattattggatatggatttcaaggaagtgccgtggtacttactctccatatcgccacagtatatggagtccaacgcctcgacctcgttggtctgatcttccttgtagttgcggctcattttgcaaatttaatagctttaacaatttcaacaaacaaataagacaaatccggtcgccgccgcgttgaggttacttacagctgagaggcgctgcacggtcagactgcttgatgagttcagttcaatagagaaatatatctttaaccaagtctgtcagacttaaaacctgaataaaaatgggtttcaaaaacattggga

SEQ ID NO: 13292 - DNA, 1225 bp, DROSOPHILA
cacatctgcttatagaggaatattctcgattttaagcgaaatttgtacacatttagttaaaccaaaacatacataattagttcaaccgaaacttaataatcatggaacaatgctataacagaggctgtggccaactcttcgatccgcagaccaacaatgatgaatcttgtcggcaccatccgggtgaacctttcttccacgacgcctataagggttggtcctgctgcaacaagaagtcggtcgacttcaccgagttcctcaacatcaagggctgcaccttggcaaagcactcgaatgtgaagccaccagagccggagaaacctgttaaagatgagtccgacaaggatgaggtaattgaggtgcgggcacccatccgggaagccctgccgcgtccgcccattgattcgccgctaaccgttatacagcccaccgtggctcctgccctgaaagacatggtttttgcagtcaaaacgccggctgctcaaaagtccagcgacgccattgaggtgggaaccacttgcaagaataacggctgcacctactcctttacgggtaacagcagcgactttggcgagtgcacctaccatccgggcgtgccaatctttcacgagggcatgaaattctggtcctgctgccagaaacgaacctcggacttttcccagtttatggcgcaaaagggctgtacctacggtgagcacaaatgggtcaaggagaacgacgacaaaaaggttgtgcaatgtcgctacgactggcaccagacggccaccaatgtggtgatggccatttatgctaaaaaatacgattacagtcagagcgtgatagagctgaaccccatcaggctgcacgtcaacctggtatttcccgagcaggacaacgccaggtttgacctggacctggaattgcgcggaattgtgaatgtgagcaatgcaagcgcgcatatgtatggcaccaaagtggagattaaactgcccaagctggagcccggctcttggtccaacctaaattttcccaacaagaaactgccagtggttaagaaaagccaggtggaagagaagaaaaagcaggaggagagcgatgaggagttcttcgacctggatgacattaaagcggagaccagtttccgtctttccgaaatgagcatgcaaagcccaaacaacttagattaataaagaagttggcatttaatgttatataaaatacacgaatttgcctttgagtagtttga

SEQ ID NO: 13293 - protein, 354 aa, DROSOPHILA
MEQCYNRGCGQLFDPQTNNDESCRHHPGEPFFHDAYKGWSCCNKKSVDFTEFLNIKGCTLAKHSNVKPPEPEKPVKDESDKDEVIEVRAPIREALPRPPIDSPLTVIQPTVAPALKDMVFAVKTPAAQKSSDAIEVGTTCKNNGCTYSFTGNSSDFGECTYHPGVPIFHEGMKFWSCCQKRTSDFSQFMAQKGCTYGEHKWVKENDDKKVVQCRYDWHQTATNVVMAIYAKKYDYSQSVIELNPIRLHVNLVFPEQDNARFDLDLELRGIVNVSNASAHMYGTKVEIKLPKLEPGSWSNLNFPNKKLPVVKKSQVEEKKKQEESDEEFFDLDDIKAETSFRLSEMSMQSPNNLD

SEQ ID NO: 13294 - DNA, 2527 bp, DROSOPHILA
catgattagaccgccagtctgtggaccaagtcttccggtattggccacggtcagcagaagacacaacaagtgaatcatgccgaacatgagctcggcccttccaaccacaccagaaaccgcctctgtgtgaattggatgggcggcaaatagagcagcggagaggatggcccatcttgccgtgctgacctccggaacatagagagagcgaatcaatcgccacatgagcagcgtgttgacgcagtgtagcaggaggtttaggaacttcatgtgggcggcacttagccccagaagggcatactcgcaatggaacatcagggtggtcagtggccgaaatgatttgtgggaatcggaactgagcaaggaagcaccccagaagtcgtgcgtgaagatcgccgtccagttggtgggcagtgagttgacatcccggttcttgacgatggccaccgtatcatcgaagacaaacttcgctccactgaggccaccgcatccgtagcatagcaaacagattaacactaggattgcctgacagaccatgctatgcagcgtggctttgtgaacgaggtctagcatactggattatttactaattgtcaattgttcaagtttaattcacttattctgcgaattttaatcggaattgttttgtatacattttttgttgtgtttttgtccaaacaccccctcactgaatagtgatgccagatcagcgatagaaatgtgtgcagcttagctaaatatatgcatcgaaaaatatatggttataaaatgatttgaaattacgctaaatagatctatcaaatctgctcattttagagtattcatattaaaataattatacatactcttgatattaaagtataaataatagtaataacaataaaccactaaaagcaaacaagacattcgcccgttaacgcttgcaacagctgtttaaatctagatcaaaacaaatccgaggaaaaatttgttgaactcacaaagaaaaattaaatcctcgaaaatgtctgaagaaatccttttcgattgcctccatgcagagatagtcaattattgtctggatagcaataaggtaggaacacgagggacgcaaaaaaaaatcagtcatacaaccgattttgatttggttccgcctattaggagcacgacctggccactttggagtatataggcttcaccaccggctaccgcctgattgagcggctcacccgtgaagtttcgcgttttaaggacgagttggagactatgaagtttatatgcaccgacttctggatgcttatatacaagaagcaagtggacaacctgaggacgaacaaccacggaatgtacgttgtgcaggacaaggctttccgctttctgactcgcatctcgccgggcaccaagcagctggagcacgcgcccaagttcgtggccttcacgtgcgggctggtgcgaggagctctcagcaatctaggcattaacagcaccgtgacggccgaagtgcaaagcatacccgcctgcaagtttcacatagaagtgaacaggaactaattaggatgtaaggcaatggtttattactacaattatagagatactacagactagactaggctatcttttcgtagaatgccacaatgttgtggtcagtccagttaaggcgttctcgcaggatccactggtcgatgggcagttggggctgggcgggattgggatctgtgtggattcccagggcgggcaatggtccaatcaatataagccactttccttgatacacatttagatagtccagaaaagctcctcgattgttgaagtagcagaagagcaaggcacacggatgaacgtcactgcagcatttggtcaataaatccgtatccagttggctggcatcctctaaatagttaagcggtataaaacttcgaacggagtacttgctctgccaccagttgcgatcgacctccaagccaaacatggggactttccgacctccagacactgtcataagccattccaaaagcccactgccgcagccgatgctcaaaactcgctggatgtcgtgcatggctagcagctgattaaagtagtccaagtccaccgatgtcggccacatccagagcagcttgcgcttgagctgttggtccaggcagtcgcccaggacaagcaacttgcgccagttgcacgacgcatcatcagttaggtaataaatttcacgcagtgtctcgagttccgattgctcgtccatcatattgaatactgttagttgcaaattaagcggtcttgctgcttccgatggccggtgaacttggcagtgacgccggcacgcggaaatatggctagcggccaacaagattgctgcggttcgcttcggttcgcagcacctgactgatctctaataaattagaggacccctttgaaaaagggccaactcattagagatcatatcgtcactttgtgttttcttctttttggtaccaatatttgaaattcttgcgccagtgcatctcgctaaatttggagctaccttgccccgggacacgcggctggtgatgttgca

SEQ ID NO: 13295 - DNA, 459 bp, DROSOPHILA
atgtctgaagaaatccttttcgattgcctccatgcagagatagtcaattattgtctggatagcaataaggagcacgacctggccactttggagtatataggcttcaccaccggctaccgcctgattgagcggctcacccgtgaagtttcgcgttttaaggacgagttggagactatgaagtttatatgcaccgacttctggatgcttatatacaagaagcaagtggacaacctgaggacgaacaaccacggaatgtacgttgtgcaggacaaggctttccgctttctgactcgcatctcgccgggcaccaagcagctggagcacgcgcccaagttcgtggccttcacgtgcgggctggtgcgaggagctctcagcaatctaggcattaacagcaccgtgacggccgaagtgcaaagcatacccgcctgcaagtttcacatagaagtgaacaggaactaa

SEQ ID NO: 13296 - protein, 152 aa, DROSOPHILA
MSEEILFDCLHAEIVNYCLDSNKEHDLATLEYIGFTTGYRLIERLTREVSRFKDELETMKFICTDFWMLIYKKQVDNLRTNNHGMYVVQDKAFRFLTRISPGTKQLEHAPKFVAFTCGLVRGALSNLGINSTVTAEVQSIPACKFHIEVNRN

SEQ ID NO: 13297 - DNA, 4216 bp, DROSOPHILA
gtaattgcttggcattgtgaattattgaatattgccaatggagaggaaatcaattattccatggatgaattttgatgaatttatagaaagagttatttattttcttaatatttacaattcataagtatttatattgcttaatagttttatttcacataatgcaaaagattctaggaaatgtctgctcaattcctattcattttcgttgcggcgacattggggtttttccatataaggattcccctaagtcctgcgttaatccccgcaaaacaaatcccataaatataaaattgaatggcgaaccaattggaggaccagttcaccctccaatgtaacatgtaacatgagcgtgttatgggtgtattatcactgggatgcgtgaaatgttatctttgtcacaccttttccgcttttccgcccccatagcacccacacaaggacaaactccatttcgcacacacacatccacgtatttttccacccccaatgagggattgcaattcaatgcggctcgtgctgttgcttttcttttttgtgtcattcccagctttacttcctttaccttttggggagagagactcgtgacgagagagtgctaaacgggcacgctgttgctttcggcacacgcctcactgtgggtcgaggaaggaaatcgttcgcaggaagcttaggagacagacttgacacgaattcttcagtcaaaaatgatttttttaatggtataatgatatactggctataagctttactgtcataaagtttagttagttgtcagcttaaatcagtgtattttaaaataattttaacatgttttattagttaaactattaaaggttttaatggataattggaaacattttcatttcatctcttgggttaagcatgactttgtgttccaactgaacccactgtgacgcactgcctgtgacgtcacggacacggctttagcttttggtttagctcactccgacagatacagacacaccgagagataggagggaaggtgagagagccactcttatcagcagcggcatcgacaaatcgaagacaaaacaaaacccgtcattaatcccgcagagaaagtcgagcgaatcgctcatcgcacggaatgctgtcgctactcctggttctgacgacgcttgccaggatccacgcccactacacgagcggagatgtggtctatcacacaatgccgcacttttggacgggcgtgggcttctgtcccgccggacgcattgatcacgaggggattagcgccgccctgggcgatccagcccttcgacttaatcttcgcctgattgcagcattgcccgtgggcgcggtgacccacattcgcatccactggctgctggagctgatacaattctggcagtacgaccccagcggaataccgatttatgatttttccaagttcgatgacttcattgatttcctacacgaggaactgcgcttgtcccccgttctggagtggatgggcaatctgggtggggttttttcggaaaaccccatgcagcaatccttctactgggagcacttggttaagaccacgattaaccaccagataggtaagcatggcctacgcactctcttcaaatgcgtacctacagattcctgtctgttcatcagcacgacacggttcctccagattggtcaactggcgctatgagacatggaatgaaccggaccttcgtgggtataacaagcaaaactttacggcacacacctttctggattacgttcaagctgtgcggcggggtttgagtaaagctggaaacctggacaaccaggacggaaaggttccactgcccatgtatcgctccctgcgcggccctgcaggactctttaaggactcgaatcatccgctctgctggaatctattggagctatgcagtcaaagagtggtttactgtcccatcgacatactgactttccaccgaaagggaatcgaaggcactgccacggaaatcgtaaatggttcgctttccttgatggccaaaatctatgaggagtatcccaatctcaagcagctgccggtggccaatgagtaagaactaaattatcaaaaaatatgctagaaatacatggtagtccttattgaaatccttacttttcaatctctcagtgaagccgatcctgtggccggttggagcacctcccgggattttcaggcggatgtgcggtatggaatcacactgatatctacggtaatgcagttctggcatgccaagctggccggtggtccactgagtcgcttggagtcgattagtcatgacaacgccttcctgagctaccatccccacgagttcacacagcgcacccttctagcccacttcaggatgaacgaaaccaaaccaccgcactcgcagctcgttcagaaacccgtatacgctgctctgggaatgctggcgaagctgggcacccgggctgcggacgtggaaatggttaatatggatactaaacatagcgtccaggtcctgcgtacagtatccggtggattaggcggtcctggtcagtatatggccacaatatttctgagtcccgaggaggcgggtccaaagatgacagcctttcatcacaagtacacgctaaacatgtcgatagcgaatgagtcggccttcgtcaccgagctcctggtgccaaaggaaacggatccgtactacatatggcagcaagctggaagtccggcttatcccaacgccactctaagggaagcgatgcgaagagcccaagcacctagactctacaagacgggacccatctggcagtacaacagcgagctagttatcaactccgccagcatcccactgccctgggcgatgctgctccgggtgtgttccgcatcttggcccaaactgcgacgaccgcagcaactttccatcgcagaggtgactcagcgtgaggtgttcattagctggatggaacaccccaaatccacgcagtgccttctcagctacgaggtgtggtttaaggaacgcgataatctgggtcgctccgccgactggatgctcatctcacagggctggcatctgccatatccgtcgtttcagtatgcgcccggcgataagggatccgtcaatggtgagcataacctgcaaaatttccatctttcataaccgaaatctttttttgtcggcaggtttctataaagttcgcggtgtggatgtgtttaatgaaaccagtccctactcacaaatagtcgaatatctggagttgtagttcaacaaacagtttataaatcaaaagaaaatatttatgcaatgtgaaagctaacataatcaggtttcggctaggcgctagtggaccgatcctactctcaatctgtctctcttggaatggactgacttcaccggcacaatcttctggacttgcgccttcgccttaacgccggcaatatcatatatacatatattatttatatataaagatatttatagtacattatatgtgttgtgttcgtaatatataaatgccttcttcctgcgaaggaatcggcaaaagcgtacatacttagataaattgaattttctgtgagggatatttacaaacaaataacttagtgacttaatcgagaacaatcgcaaggggacgcgttcctattttatttaaattttcttgtttagccctaggcatccaagaccaaccacttttcggtgatgtgctccatttgcttggtgagaataggattgcgaacgcgtatcttgacttccaattttccacctacttgcttgcgaccatccattagctgttttaaggaatacataggttaaatttaagtttatattattttattatagtagttatcacttacatcatatgtgtcgtgtatctcgcacttggtctccaatggctgcagcttgacatttacggttccgatcaacgtatccgatcgcagaaaacctctgaaacaacacaggggcagtttacgacttagtccacaacaatctatactgcagctatttatattaaatgcgtagcattggatgacatttattttttgtttgaattgttgggaattgaggcgtaaaaatttgtaaaaatatttcattaaaatgttccttgtgagaatcaatcaagaagatcaatgggtagacacatacggtgaaatatatgtgtgcttgaagccgtgactcgtacgatactgttttacgggaccaaaggaacatgcttactacgggaaaaatttaataattcaaattaagagctgaaacttaatatt

SEQ ID NO: 13298 - DNA, 1968 bp, DROSOPHILA
aaggtgagagagccactcttatcagcagcggcatcgacaaatcgaagacaaaacaaaacccgtcattaatcccgcagagaaagtcgagcgaatcgctcatcgcacggaatgctgtcgctactcctggttctgacgacgcttgccaggatccacgcccactacacgagcggagatgtggtctatcacacaatgccgcacttttggacgggcgtgggcttctgtcccgccggacgcattgatcacgaggggattagcgccgccctgggcgatccagcccttcgacttaatcttcgcctgattgcagcattgcccgtgggcgcggtgacccacattcgcatccactggctgctggagctgatacaattctggcagtacgaccccagcggaataccgatttatgatttttccaagttcgatgacttcattgatttcctacacgaggaactgcgcttgtcccccgttctggagtggatgggcaatctgggtggggttttttcggaaaaccccatgcagcaatccttctactgggagcacttggttaagaccacgattaaccaccagatagcacgacacggttcctccagattggtcaactggcgctatgagacatggaatgaaccggaccttcgtgggtataacaagcaaaactttacggcacacacctttctggattacgttcaagctgtgcggcggggtttgagtaaagctggaaacctggacaaccaggacggaaaggttccactgcccatgtatcgctccctgcgcggccctgcaggactctttaaggactcgaatcatccgctctgctggaatctattggagctatgcagtcaaagagtggtttactgtcccatcgacatactgactttccaccgaaagggaatcgaaggcactgccacggaaatcgtaaatggttcgctttccttgatggccaaaatctatgaggagtatcccaatctcaagcagctgccggtggccaatgatgaagccgatcctgtggccggttggagcacctcccgggattttcaggcggatgtgcggtatggaatcacactgatatctacggtaatgcagttctggcatgccaagctggccggtggtccactgagtcgcttggagtcgattagtcatgacaacgccttcctgagctaccatccccacgagttcacacagcgcacccttctagcccacttcaggatgaacgaaaccaaaccaccgcactcgcagctcgttcagaaacccgtatacgctgctctgggaatgctggcgaagctgggcacccgggctgcggacgtggaaatggttaatatggatactaaacatagcgtccaggtcctgcgtacagtatccggtggattaggcggtcctggtcagtatatggccacaatatttctgagtcccgaggaggcggcgaatgagtcggccttcgtcaccgagctcctggtgccaaaggaaacggatccgtactacatatggcagcaagctggaagtccggcttatcccaacgccactctaagggaagcgatgcgaagagcccaagcacctagactctacaagacgggacccatctggcagtacaacagcgagctagttatcaactccgccagcatcccactgccctgggcgatgctgctccgggtgtgttccgcatcttggcccaaactgcgacgaccgcagcaactttccatcgcagaggtgactcagcgtgaggtgttcattagctggatggaacaccccaaatccacgcagtgccttctcagctacgaggtgtggtttaaggaacgcgataatctgggtcgctccgccgactggatgctcatctcacagggctggcatctgccatatccgtcgtttcagtatgcgcccggcgataagggatccgtcaatggtttctataaagttcgcggtgtggatgtgtttaatgaaaccagtccctactcacaaatagtcgaatatctggagttgtag

SEQ ID NO: 13299 - protein, 619 aa, DROSOPHILA
MLSLLLVLTTLARIHAHYTSGDVVYHTMPHFWTGVGFCPAGRIDHEGISAALGDPALRLNLRLIAALPVGAVTHIRIHWLLELIQFWQYDPSGIPIYDFSKFDDFIDFLHEELRLSPVLEWMGNLGGVFSENPMQQSFYWEHLVKTTINHQIARHGSSRLVNWRYETWNEPDLRGYNKQNFTAHTFLDYVQAVRRGLSKAGNLDNQDGKVPLPMYRSLRGPAGLFKDSNHPLCWNLLELCSQRVVYCPIDILTFHRKGIEGTATEIVNGSLSLMAKIYEEYPNLKQLPVANDEADPVAGWSTSRDFQADVRYGITLISTVMQFWHAKLAGGPLSRLESISHDNAFLSYHPHEFTQRTLLAHFRMNETKPPHSQLVQKPVYAALGMLAKLGTRAADVEMVNMDTKHSVQVLRTVSGGLGGPGQYMATIFLSPEEAANESAFVTELLVPKETDPYYIWQQAGSPAYPNATLREAMRRAQAPRLYKTGPIWQYNSELVINSASIPLPWAMLLRVCSASWPKLRRPQQLSIAEVTQREVFISWMEHPKSTQCLLSYEVWFKERDNLGRSADWMLISQGWHLPYPSFQYAPGDKGSVNGFYKVRGVDVFNETSPYSQIVEYLEL

SEQ ID NO: 13300 - DNA, 3891 bp, DROSOPHILA
accttaatactatagcaataggactggatcgtcaaatgcgcctgcttataggcagctttcttggccgccttaaggctctccccctgtcctgtcgctattacctcatcatttactaataattcggcgtattttgtattatcgcttaatggctgatctcggctgacacgctcttcgtacttgacattcgcaatgttgcaggagttttgcaggcaggctcgtcccccagccaagtacacaatgagccgaccgaaacgcagatcttgatagagatcgactggatctccgccgccaaaacactggcgttttatgtgtgagctatcctctggggagctcgtcgagggaaggggtggagcccggcgccctagtagttggaattaggcattaggctttggtctctctggctcgtatagttactagtgataaaaagaatcttctctcgcctatgggcccactaattgttcagtcgtctacctttggcgcgctgctccgccgcatccgacgccgagacaaatgttctcttcaggcgctgttcccgtttctgacggaaatccgctgcgatttccttggacaactcggccaccaaaagcatcgtcgcgcttggatacttgcagcccatgaactccatgttgacgaacgtttgggccaggcacaccagccggtcctcctcaaaacgatccttgtgggccagcatgaagctgcgtcgcagatcccagtgctcatcactttcgtattccgtcttgtagctgtctacatcccagtccaaggaaaattccccggatccatagccggcatcatcctgttttttaactttgactttcttctgctttggcttggattgttgaacggacatctttacagggaaaataaatagcgttcaacttgtcaaataaaatgagcacaggcacgcttgttttttgattgctgctttcccattcacagcgaattatcaattcgattggccatgtgttgcccattggctatcgataacgcagcgataacgataggccccatcacggctatactttgtcgtgcgtgtgtgtttttaagttcctgccttttaattcatgattttttggtaacttaacaacaatttggagagcgacgcgacgcccaagaagtcagaaacgaattgccaaagtgtctccacagacgattgccccaaagtgagagatcggatcagcccaaagcagccaacatgagcatacccaacgagtacatagcgaaaacggaggatgtggcggaacaggtaagatatattaggttccactgccaaaaagaagtccaccaggactccatatccaccgcaggaagcgtcttcccgatgcgccccaaatggcgtttgcggggaagccctggcagctgcaaactgggaaaactgccaacgtcacccaaacgcggcaaagttcgagggtcttggctgcatataatcacgatccgctgacatgggggcaacgtgctgggcatttgcttccaataagaatctgggtgcaacccagatgatgggtttgccttgtactccagtaccgcaattgacagttgttgcgtctgccgcagggaaaactctctctctcgctgcttattttctacctgtgtgctgatgcgtatgtgtctgtgtgtgtgtgcgagagagctgtctccgcaagtgaaagtgttgaaaaagaaatagcgggcagctggacgccagcggccaggtcgagttccgtaatagttgggctagaaagccaggtgaacttgctcgcgatttacatacatacatgtatgaagttacattgacagccgggccaaaacccgttagctggcagatagcaatcgagagatactagcgtttagagacacgtcacagccagcgggcgatttctagcgactacgcgcaagccacgctcaacggcattgtatatttaaatcccttatcaccttgtcagtagtccccttatcaccatatcagcacccatcccaattgctctcaactcaaccagaaccaatcgaacactcatttttgcaggtcatcaagcgcggcaaaaatgtgctgcccacagtggcccgtttgtgcctcatcgccacgttcttcgaggacggcctgcgcatgtacatccaatggaacgagcagcgggagtacatggacatgagctggggctgcggcaagttcctggccaccgtctttgtgctcgtcaacctgttgggccaactgggcggctgcggcatggtgatggccagatttaaggtcgacatagcggtgggactgcttttcttcattgtggtgttgcaggtgagtctgcatttatatcagccagaagcaaaagccttgacgttaacccgatcctctgtttgcagaccgttgcctactccattctgtgggacttccagttcttactgcgaaactttgcactcatcggagccctactgctcgtcctggcggaagccaggatagaggggcgcagcctgtttgccggcgtgccatcgatgggcgaaaacaagcccaagaacttcatgcagctggcgggccgcatcctgctggccttcatgttcatcactttgatccgctttgagctgagcgtatggcaagttatacaggacatcatcggctccattctgatggtgctggtcgtgctgggatacaagacgaagctgtccgccctgattctggtggctctgcttacgatcctgaacctgtaccacaatgcctggtggaccattccgtcctacaagccactcagggatttcttgaaatacgactttttccaggttagcaggtttacaatatctttcgcacgaatttgtgttatttttacgcattcccttcgcagactctctcggtgatcggtggcctcctcatgatcgtgtccttgggccctggcggcgtttccatggacgagcacaagaagaagtggtagaggccaggcaacggtcgctccttgaacgaaacactttcaacatttgacttttaccgtgttttactccttctgagaaatgttagttaggaattaccataaaatgggacaacaacaggagcagcatcagcagcacaacaccggcacgtataagaacttgacaattttcaataaagggacttccgcaatacccctctccaatggctcacttattgggatcgccccaacccaactccaaatccattcgcgcacattcaacgacaaacttcgacattttaaacatttaggacattttatttttgtacataaagaacaggcaagaaaaaagtttggtcactttcgagcccaccccaaatgagagacataactgattttatatctatgcttgtcaatatccatgttttttgccgatttttttatatgatttgtacactcttataaataagttgtaaccttggtgtttgccttttgttgattgctagaagtttgaatatgaaaacgatgtataaaatatgatgtaccaattgacaatgatttgtttctttcgtttataagcaaaagtgtaatagaattaaattgtaacgttttaataaacataaagatgaaaaaccgagacttgtgcattttaaacttggcgccaattggccgataaatggttaatgcttttgtttgtttaccagcactaaggcacagctgactcgcaacgtcaacaaagagggaaatgcccattcttcgactactgggtaccccgtactaagttagctgctagtgaatcctgcataactaacaataaataactttattgcaaaaataagagcataaaccttatacaagtagtacgattaaattttgtaaatagacacaaaatataatgataaaaaaaatgattaggcaccgttttgaatggtaatgttagtgaattaactaaatataaaacaatatattgaaaagccctgacctctccaacaaggcagtgaaatgtcaacggcctcactttttttta

SEQ ID NO: 13301 - DNA, 1008 bp, DROSOPHILA
ataggccccatcacggctatactttgtcgtgcgtgtgtgtttttaagttcctgccttttaattcatgattttttggtaacttaacaacaatttggagagcgacgcgacgcccaagaagtcagaaacgaattgccaaagtgtctccacagacgattgccccaaagtgagagatcggatcagcccaaagcagccaacatgagcatacccaacgagtacatagcgaaaacggaggatgtggcggaacaggtcatcaagcgcggcaaaaatgtgctgcccacagtggcccgtttgtgcctcatcgccacgttcttcgaggacggcctgcgcatgtacatccaatggaacgagcagcgggagtacatggacatgagctggggctgcggcaagttcctggccaccgtctttgtgctcgtcaacctgttgggccaactgggcggctgcggcatggtgatggccagatttaaggtcgacatagcggtgggactgcttttcttcattgtggtgttgcagaccgttgcctactccattctgtgggacttccagttcttactgcgaaactttgcactcatcggagccctactgctcgtcctggcggaagccaggatagaggggcgcagcctgtttgccggcgtgccatcgatgggcgaaaacaagcccaagaacttcatgcagctggcgggccgcatcctgctggccttcatgttcatcactttgatccgctttgagctgagcgtatggcaagttatacaggacatcatcggctccattctgatggtgctggtcgtgctgggatacaagacgaagctgtccgccctgattctggtggctctgcttacgatcctgaacctgtaccacaatgcctggtggaccattccgtcctacaagccactcagggatttcttgaaatacgactttttccagactctctcggtgatcggtggcctcctcatgatcgtgtccttgggccctggcggcgtttccatggacgagcacaagaagaagtggtag

SEQ ID NO: 13302 - protein, 270 aa, DROSOPHILA
MSIPNEYIAKTEDVAEQVIKRGKNVLPTVARLCLIATFFEDGLRMYIQWNEQREYMDMSWGCGKFLATVFVLVNLLGQLGGCGMVMARFKVDIAVGLLFFIVVLQTVAYSILWDFQFLLRNFALIGALLLVLAEARIEGRSLFAGVPSMGENKPKNFMQLAGRILLAFMFITLIRFELSVWQVIQDIIGSILMVLVVLGYKTKLSALILVALLTILNLYHNAWWTIPSYKPLRDFLKYDFFQTLSVIGGLLMIVSLGPGGVSMDEHKKKW

SEQ ID NO: 13303 - DNA, 4986 bp, DROSOPHILA
agacgcatggaaattactttgccgcagcgatcgaaggcgttcggtatcgatagctctgactatggataatatgggttagataaactgggtctaaatggtttatctctcagtgctaccgtcagattaaagttcacggagcgctgggacatgtttaaagttgtttggcgcgcctgcttgttccgagaccttgccgtctgcgaagtagacgcgttcgcatatttctctgtctcttcttcgacaaaatccggctccgcctccgccacgaactgctgtttgctcctcttgcgagtgggttctgccgttgagccatcgctttcagatccgggcgaaggcatccgccgaatccttcctctgcgactccgctccatttggttttgttctacgcgaggcaaaaagcgcgggctgatataaatgtaaacaacttggtttggactgactgaacttactctgcttactagcctagatatgtgcctgtactattgtaattgttgttgattgcaataataagagtgcaaaagaaatctcaagcgcgctatcgtaaacaattttgcgaaataacaccacagccattccattccgttccaggcgcagtgtgaccaggtcggatgcgatttgaagcgtcacagaacaatcacagatttctgccaatgcagtagaaattcattggcatgtaccaccttatatttaaaaatacttaactaattacagtttatagatgcgagtaaactgcaattgtatattgctcaatatttaaagacatatttaaatataaggtgcatatttgtgttttgcatttatgctaaggctaattaattatttttaaataccttaggtccacataagaaatgttcactgtaaattgcgcactttaatttttgaaatttcattttagaggtggagaaacgtcgatgattccttgaaaaacatcgatgtttgtgatatttcgatccatctatgtttctccacctctatttcatttgctatttccacgaaatcaaatatttatttatttccaagaaatcaaaacgaagccccatgtcaagttcagatgacgattggtttgaccaggatgagaacaaactgttgcagggcctggagaagtccttgaagtccctggagctgcagaagaatgaggagtacatcgaatgccccccatctgagcgtaaatgccccccatctgagggtaaataccaccttatggttaagcagccataatattggtactatcaagctttttgatttcagtgggggagtacgtgatgcaacatacacggttctccctgaccgagttaacaaatgccttaaaaatgccagccatcgacatgttcttatactttttgtccgataagcgagatctcttcgagaatcaagtgttggccactgacaatgtgaaacgagttggcctgttcgtggatgtcctgtggtcgctctgtgaactcgaattgggcggattcgatgaagtctttctgtccgcattcagccggcagacggcgcttctggacaagatcaagaatcttttgcaggccaaagccgctgtggcaaaatgcgatgcggagtcggcactgatattaagccatagtaagtggatgcttctacgagcccataagcatggcctccttagtcaccagggctacgaattggtggaactttataagaaattggcaccttcctttaaaagcgacatgattgatggtcttgaagcattcaccggtaacttttcacataacgtcaagggcctaatttatccaacgctggagacgttactgggcaaagatgcaactaaggctcccaatgaagaagaggatgagggcttggtgtccgacaaagtagtcaaatatgtgaatgcactgcgaaatttactaagggaagattttttagcaccactagttgagtttgtgcaacagctgcgcagcggaacggatgtcgatgagttgaagcaacagggccttctgtggtccgatgtgcatctgactttaaatccacagtttgccaacgctcagcgtcatagccttgtttttttgaaggttcaatttactaaagaatccaagaatgcctataagacttggctgaattctatcaaatctgggactctgctctgtcttaccacgagtctggcctttgatgatttaattctggcttccgttggctacactgagccagaaaaactaaaggaggattgcgtaagatatgtgttaatcattataaagattaatgttcataatatttccatacatccgcagctaagtgtgcagattgtcaagcagtataatattggaaacgcctacaaccgaccactgatcatgttccaggcgcccgtgtttttcgagccttatctcagagttcacaattacctgagcacctgcagcacagagaagtttcccatgggtcgctatattgtagacggccaggtaagttaatgtgtaagagaacaactaaaatagattatacattctcaactatgtagatggagataccgccgccagcttacatgaaaccaggagttaagcttagtttcaatatgaagcccttcacgctggacaaactaccggaagatctgcacttaaatgagagtcagaaaactgcattcaaggaagctttatgcagggagtttagcatcattcaaggacctccaggcaccggaaaaacacacctttcagtgcagttggttaacagtttgatacagaatgctaaagccctgggcacgggacccatcattgtgctgacctataccaacaattcgctggacaaattcctggtaaaaatttcgcggtacacccaagaaattcttcgctttggtaatcagtcgcgagatccgcaaatatcaaagtttaatttgagtaccacgatcaagccagaattggttccaccgcgcctgaagcgaatttggtggctagtcaattgtgagtacaaggaaaaattccggaacctacaaggcctgtacgcaaactttgatggcagcgaggaaagctaccaggacactctggcggctcaggagaagctaaatcaggttgccgagcgtatcgaaacactgcgcatggttttccagttctttctagcaagggagaaggacctgttggccatgaccaccacgtgcgcggctcgccataactttctgttcaggttgctacaatcaaagtgcgtcctctttgaggaggcagccgagatccaggaggcacacatcgtggcatgcctaacgccgcacacagagcacgtgatcctcgtcggcgatcacaagcagctgcaacctttcagtggcagcaggaaggtaccacagatctcgctctttgaacgactcattgtggcggggctgccattttcacggctcaatctgcagtaccgcatgcgatcctgtatttctgaactccttgtgcccagcatttatgacgagctgctctgttcggagtcagtgaaggaatacgaggacatccgcctgatgtctaagaacttgtacttcgttcagcacaaccaacctgagcactgcatgtctgatatgtccattgggaatctttatgaagctggagtgttggctaaattaactgagttcctaatccagaaggcccaatataagcacagcgatattgtgatattatccccttacaatggccaaatagagtgtatcaagaacgcggtatgtaagcaatacccaattgtatattatttgatttttttaattctctctcctgctgcagcttccccaaaactatcgctcgactgtgcaagtggccagtgtggatagtttccaaggccttgaggccaatatagtgctgctctcgctggtgcgcagcaatatatccggccgaattggcttccttcgccaagcaaatcgagtgtgcgtggctctttctcgagcccgctgggccctgtacatcgtcggtaatgtgacgattttgaaggataccttcccaaagatttggaatccaattgtcaagcgcttgaaagagaataatgccatcggagaggcatttccgaccataaccagtacctgattacaactaattaaaaaatgtatatatgtacatttgattttctgttgattttatttattttgatgaggggtttcggtgattgaagatcgcttgccgatttgcgcctcgtttatgccatcagtttacaaactttattatcctgatacactcaacctttttttgagttttcaatgagggcagccggacatgaagattttctgtgtgctgaaacgtttccatagatgacggatcttcgttcaatacttaaaaatacttctccttcgacatttactttgtatttttgctgcacgcatgtatgtacacatagtttatttttgtaagatctttttaggtctaaatatgcacaatagggtgggtgtatttcttatccttcagaatcggagtagcggaaatgaatacattgacagttttcttcactttgcatgattgttaagaagaatcttattgtaaaaagttccgccaccataatatttgaccgattccaatccacacaaaacgacctatcccaatgcactcaaattatagtcagacgaccattttttttttttttttaagctttctaatgttatacattacatgaatctgcggctgcattatcaactagatctattttactttgcacatatggagcatttacttgcctggccaaaatagtttttttacacattagttgtatgtggtaactctgtagttttttttaaccctgacagactcaatttggaaaacgggttgatcagataaatttgcatatgttctttttacttagatatcttttttcttttactttttacacaatgtaatttacttttcacttaatgcataattggtttcggggaactttttacgaacggctgctaaaaatgtggctaaacgaaatcggcttagatttacaatgtggatagatgaatttaagaatttaactgctgacatgtgcatattgtatataatggatttattcgatggtgaaaacgtgcagttcataaatcaaaacgagaagcgc

SEQ ID NO: 13304 - DNA, 2747 bp, DROSOPHILA
atttatttatttccaagaaatcaaaacgaagccccatgtcaagttcagatgacgattggtttgaccaggatgagaacaaactgttgcagggcctggagaagtccttgaagtccctggagctgcagaagaatgaggagtacatcgaatgccccccatctgagcgtaaatgccccccatctgaggtgggggagtacgtgatgcaacatacacggttctccctgaccgagttaacaaatgccttaaaaatgccagccatcgacatgttcttatactttttgtccgataagcgagatctcttcgagaatcaagtgttggccactgacaatgtgaaacgagttggcctgttcgtggatgtcctgtggtcgctctgtgaactcgaattgggcggattcgatgaagtctttctgtccgcattcagccggcagacggcgcttctggacaagatcaagaatcttttgcaggccaaagccgctgtggcaaaatgcgatgcggagtcggcactgatattaagccatagtaagtggatgcttctacgagcccataagcatggcctccttagtcaccagggctacgaattggtggaactttataagaaattggcaccttcctttaaaagcgacatgattgatggtcttgaagcattcaccggtaacttttcacataacgtcaagggcctaatttatccaacgctggagacgttactgggcaaagatgcaactaaggctcccaatgaagaagaggatgagggcttggtgtccgacaaagtagtcaaatatgtgaatgcactgcgaaatttactaagggaagattttttagcaccactagttgagtttgtgcaacagctgcgcagcggaacggatgtcgatgagttgaagcaacagggccttctgtggtccgatgtgcatctgactttaaatccacagtttgccaacgctcagcgtcatagccttgtttttttgaaggttcaatttactaaagaatccaagaatgcctataagacttggctgaattctatcaaatctgggactctgctctgtcttaccacgagtctggcctttgatgatttaattctggcttccgttggctacactgagccagaaaaactaaaggaggattgcctaagtgtgcagattgtcaagcagtataatattggaaacgcctacaaccgaccactgatcatgttccaggcgcccgtgtttttcgagccttatctcagagttcacaattacctgagcacctgcagcacagagaagtttcccatgggtcgctatattgtagacggccagatggagataccgccgccagcttacatgaaaccaggagttaagcttagtttcaatatgaagcccttcacgctggacaaactaccggaagatctgcacttaaatgagagtcagaaaactgcattcaaggaagctttatgcagggagtttagcatcattcaaggacctccaggcaccggaaaaacacacctttcagtgcagttggttaacagtttgatacagaatgctaaagccctgggcacgggacccatcattgtgctgacctataccaacaattcgctggacaaattcctggtaaaaatttcgcggtacacccaagaaattcttcgctttggtaatcagtcgcgagatccgcaaatatcaaagtttaatttgagtaccacgatcaagccagaattggttccaccgcgcctgaagcgaatttggtggctagtcaattgtgagtacaaggaaaaattccggaacctacaaggcctgtacgcaaactttgatggcagcgaggaaagctaccaggacactctggcggctcaggagaagctaaatcaggttgccgagcgtatcgaaacactgcgcatggttttccagttctttctagcaagggagaaggacctgttggccatgaccaccacgtgcgcggctcgccataactttctgttcaggttgctacaatcaaagtgcgtcctctttgaggaggcagccgagatccaggaggcacacatcgtggcatgcctaacgccgcacacagagcacgtgatcctcgtcggcgatcacaagcagctgcaacctttcagtggcagcaggaaggtaccacagatctcgctctttgaacgactcattgtggcggggctgccattttcacggctcaatctgcagtaccgcatgcgatcctgtatttctgaactccttgtgcccagcatttatgacgagctgctctgttcggagtcagtgaaggaatacgaggacatccgcctgatgtctaagaacttgtacttcgttcagcacaaccaacctgagcactgcatgtctgatatgtccattgggaatctttatgaagctggagtgttggctaaattaactgagttcctaatccagaaggcccaatataagcacagcgatattgtgatattatccccttacaatggccaaatagagtgtatcaagaacgcgcttccccaaaactatcgctcgactgtgcaagtggccagtgtggatagtttccaaggccttgaggccaatatagtgctgctctcgctggtgcgcagcaatatatccggccgaattggcttccttcgccaagcaaatcgagtgtgcgtggctctttctcgagcccgctgggccctgtacatcgtcggtaatgtgacgattttgaaggataccttcccaaagatttggaatccaattgtcaagcgcttgaaagagaataatgccatcggagaggcatttccgaccataaccagtacctga

SEQ ID NO: 13305 - protein, 903 aa, DROSOPHILA
MSSSDDDWFDQDENKLLQGLEKSLKSLELQKNEEYIECPPSERKCPPSEVGEYVMQHTRFSLTELTNALKMPAIDMFLYFLSDKRDLFENQVLATDNVKRVGLFVDVLWSLCELELGGFDEVFLSAFSRQTALLDKIKNLLQAKAAVAKCDAESALILSHSKWMLLRAHKHGLLSHQGYELVELYKKLAPSFKSDMIDGLEAFTGNFSHNVKGLIYPTLETLLGKDATKAPNEEEDEGLVSDKVVKYVNALRNLLREDFLAPLVEFVQQLRSGTDVDELKQQGLLWSDVHLTLNPQFANAQRHSLVFLKVQFTKESKNAYKTWLNSIKSGTLLCLTTSLAFDDLILASVGYTEPEKLKEDCLSVQIVKQYNIGNAYNRPLIMFQAPVFFEPYLRVHNYLSTCSTEKFPMGRYIVDGQMEIPPPAYMKPGVKLSFNMKPFTLDKLPEDLHLNESQKTAFKEALCREFSIIQGPPGTGKTHLSVQLVNSLIQNAKALGTGPIIVLTYTNNSLDKFLVKISRYTQEILRFGNQSRDPQISKFNLSTTIKPELVPPRLKRIWWLVNCEYKEKFRNLQGLYANFDGSEESYQDTLAAQEKLNQVAERIETLRMVFQFFLAREKDLLAMTTTCAARHNFLFRLLQSKCVLFEEAAEIQEAHIVACLTPHTEHVILVGDHKQLQPFSGSRKVPQISLFERLIVAGLPFSRLNLQYRMRSCISELLVPSIYDELLCSESVKEYEDIRLMSKNLYFVQHNQPEHCMSDMSIGNLYEAGVLAKLTEFLIQKAQYKHSDIVILSPYNGQIECIKNALPQNYRSTVQVASVDSFQGLEANIVLLSLVRSNISGRIGFLRQANRVCVALSRARWALYIVGNVTILKDTFPKIWNPIVKRLKENNAIGEAFPTITST

SEQ ID NO: 13306 - DNA, 7951 bp, DROSOPHILA
tattttgtttttcaaccgcacagcaatgaaatgatagcacaacatcagtgactcagataaatgcttttcgccttatctcttctgaaattaattttttttgtacgaatttttctcttgcgaaaaacgaagagctgataatgatggatatgttggacatgtttattaaaaaaaaaaaacaatcaaagttgagtggctttttcatgtttcgggttattgataaactttaataggggtattatgtgtgttcgtaaatatataaaacgaaattatttagccttttaaatatattttttatgtcatcttggttttaagaaaacttttgctgatagtttcgtatttacatttttaattacctttgtcataagttcttatttaacaacactaacttccctttaattttctacatttttttcagctttccaatgcgacgaatagttctatgaaatgtaagttttagcttcgccattcagctaagttggagtacgatagtaaaaccattaacaaaaaccgatatcgctgcctagtacttatatacatatatatgtacatatatagatgcccatatggatacatggagaggcaattgcgataaagccagtataaacataataaccatacaatttcagaattcattgcgtaccgaccagcacgccccatatcgtcgaccgtcccgcccccttacgacgctccctccccccctcgggccacgcctccgccaccgtcacgcccccttccgctcgacacagcgttgaaggcagatagtcagtaaatggaatggaataaaataaatcaaaaccgcaaaggcagcgaaacggcggagttgacaaacaaaaatattatacaaaattcgaatgcgaacgaatgctatcgaaaaaccaacgcagcgtaacgcggccaacacgaaagaaatcaaaacaccacttgcaacacaggctgcaactgcaacacaggctgcaagcgcaacaggacgagaattcctcgaacagatccagcgactaggatgaagggcggcaactacaccagcctcggcacgtgcagtggcatcaatgtcagtggcaacgtggccggcacccgcaagatgtcactgggcaaatccattaaaatgtacctgaccattttcatcctgaccacctgcatttatatggcgctctatcagtaccacatatcccgtgaacccttcgccgccagcgaggttgtcaaggtgagttcatatctgcactgcgagaaaattcaaaattaaatgagaaatttgaacgggagcatggcatcaatatgttgacatgatccacatatttagttgattgtaaaatgtacatcatattatttatattttggaacaaaaaatctagcactttaaaaaagagtttgtagaagaaatccaaataagatttaagatatgtttcccctttttctctgcgtgacttggataatgtttgtttacttaaaagttgccagttttctattgcaccatattcctctacaaatttcttcatcacatatatttcgtaataccagtttcacctaacatgattttggcctttgaacgatatcgttagcagatatcattctctggttgcgaaagtttgattaaactaatctaaaatatggaacactcattgcttgccttggcccaataacaaatgaaatcaaaagtaagtttataccttttaattggcatctatttaagataatgcctcctaattggttaaaacgctgggcagcagtgaaataaatcgtgggaacatgtactgtttactttgtttaaaaataacaatagaacgtgaacgatataagcaacaaaaccataaagataactaaaaatctcatgaagagaaataaggcaataataaaagaagaacatgtgtagctacagattgtgtatttatacttataatttactcgtttgaagtgcaataaaaaatggatagcaacataaacaggtagaagcacgaaataaaaagtcaggtgctaaatagagtaaagcagaattaagattagagtaaaacgtgcttttaaaatgaactttatatgggttaaactttgtgttgagaaaggtggctcttttgttttttacgatcccaaactcaccgaaacaataactagagtaaatactattgaaatattttctctgtgttcttttctccatttccctcgatcttcacttacccaattattgtgaaccaaactgtagcatcaggagaaatcatcttcatacatcgcttcatatttgtggtcacccatttccctgctaatggccaatagttcctccaataccaataacaattccacaacaacaagcaccacaacaacaacagctccaacgacaccaacaaccacaacaaccacgacagtgggcagtgtgggccaaaaactgggcgcatcctccatctcctccattcgcatggtatcattagcggccacaataccgtcatttaaatcgaccttatcggaatcgcgatcggtatcgttgggtggccatcaaaagactgcaacagtgaaaacaagcaccacaatcacaacaagaacaacagccagtggcttggccacaaccaaattgtcagcaacaacaagaacaacagccaaaacaagcgccaaactgtccgcggcaaccacgcccactgcctcccacatggaaaacggctataagactcgaccaacatttgttgccgcatccctgcccgtaaatatattgacacaatcaaagtcctagtcgagcacgtaaaaaatgcacagagaaaaaattcgagccaatagcaaatattaaatatcaaaattttgaaaaatatgaatatatattgaaatcattctgtaatatgaatttattgaaatttataaatgatatttaaattgatttctttacccacataattggagaaacaaatagataaatttagataaatttcaaaaagtataaaaattgtacagtgctgaacaaaaaaaaagtttaaataatgtaactaagtaatccacagtagtggcagtatttcaacttaaagatacatttatctcacaacacccacaaatagtcaaatttagcatatttatcgcttttttctcccgcatttcactttttccgttttaatctttgaaagtgcatttcgatcttatctgcatattattttcacttgacgcgtgcatgtctggctgcctttcattattcgataactgaacgttgcacttgttgccccattcaatagcaactgcaatgttttacccttagctcactctcttatcgcttttcctcagcccgttttttccaatttcctaattgccccattggttgctggtcataaataaattgaaatgggctagttataatcatttatatataatataaagagaagaattagatttcatagactaaaaaaaagcgaattaatgcttgagcatcttaactaagatcgtatatttagtatctatgcaaatatagcgacaaaatgtgctgctccccacattttgcgaaccaagtttgctgctcgtacgttaattatggtctcattaaagtccaaaatggatctatattaccaaccgacttggccatgctaataaacacaaagggacgctgtggcgtacaaattacgctgtttatctaaccgacttttgttggccagcatgtgcaaattggttgccagctatacgtatcacgatttctgggttaatcacatgcattatattaaccaacaagcggtgccagctgcgggtgtgccactgcaactggtggcaaacaaaaagatactcatttaccatttggcatgagcctaatttgaaaattgctctacagcattacatagaacccaaaaaaaccaaaaccgcatacagctgcagttgaatgcaatggaaaaatatagaaaagtgagtagcattgaatgcggctgttgggttggctgttgatctagattccagatttatgcaaaattcaagccaattgaaaatattcacgcgccagttgcatccactaactgcgattccccagtgccctgcactcaatgtcaacggtcaagcccatcagcaaagagataaagttgttcaggtggcaatataatataccttgtatataatacaattgcagtttaaactttctgtttgtccacgtttttattaatttcaaaaggttctcaagcgaagttttgaaattgattgatataatctcgcaactatttttaattcacaagtggattcaaaagtctaaagatataatgatatgtctgcttaatttgatatgaccttccatataagcaatcaaatgggtatctattacttgaaataagctaatattgtgatagaccagctactttgcatgccatcctaccccttgatcctcactatctttttccatttcatttgaatatccgagtttattttgcaaaatgaatgcatttatatttgccaccgccttgcatgtgagtgggtgggtgttatggggtggtattgttctgtgggtgcatgtgtgtcaacaatggacaatttgcgaagtgagtgcgccagtttatttattttcaacgtcagtcgttcaatgggccactggttcacaggcaccacatcatatctggcacgatgggaattacactcgaaacaaaagggggggtgtaaccaattaatatacaacccaaaacgtcatgcaacatgcttaactttttcagtttaataaggttcgagagctgtctttaagaacttttcgttaaataaggtcgtatttacttgcttagtttttaatttgttaactttcttatatgttatacttaacctttattttttcgagtgcctttgactagcgaaaggcgacctatattgcttaaccagagcctgggcaatccgagttggggcaatgatgggcggatgtggctcgctagctttcgcctagtcaagtcattgggctgtaaattaatttgcataattgctcataaaaagtagctgctcacgccgcattacgcaccacccaatggcacctaacaaggcactcagccaagctggcaccccaatcacccagccacctagtcatctaactaccatctagacctaaccagtccaagtgcagtgcacacacacatacgccccgtagtcagttcgcagcgttagataacctaatgacactcaactcaaaatgaactcgacccacagccgcccctgtacataatcacgcccacctaccgacgacccgagcagctggcggagctcacccggctgggatatacgctgaaacatgtggtgaatctactctggctggtcatcgaggatgccaacaagacgaatccgctggtgggccacactttggaccgcatcggagtgccctacgagtacatggtgggtgagtattggtttcctgcccacatcgccgcccagccgctgtgtcatgtccgggacacattcaagtgatatttacgagtcactacatcgcacccatttccacttccccgtccacttccacttccattgcgccacatcggtaaccgtagcgcccatgccggagaagtacaagcagacgaagaaggccaagccgcgtggcgtctccaatcggaatcggggcctcgagtatctgcgcgagcatgccaccgagggagtgctctactttgccgacgacgacaacacctacgacattagcatattcgagcaggtaagccattggcaaggagcagcaggtggcagcgggtggtatggcatggtctccgacccacctgctggataaaacacaatttacacgaattgggggtcaaaggatgtccatttcggatcaatggggaatagaggcgagctactgttttcacttttgtatagcaaattaaagaaattaaatgagtgtgctaaagtgaaatatgtatgttgatgcaaaatcatttacaaaataataattaaacaggcttaactcaaaaaaaaaaaaaaaactacctattccgttcagatgcgctacatcagcaaggtggccatgtggccagtgggcctggtcacaaagaccggagtgagcagtcccattattcaggcgggcaagctggttggctactacgatggctggatcggaggacgcaagtatccagtggacatggctggatttgcagtgagcgtcaagttcttgaaggagcgtcccaatgcccagatgcccttcaagccgggatacgaggaggatgggtttctccgcagtttggcaccacttgacgatgcggaaatcgagttgctggcggacgagtgcagagatgtgagtagttttattaaaactaaatattttattaaagaaggccagtgtcatttcaatttatcacataatgaaatagcattcgatataatataatggcttatccatttcatttccagattctcacgtggcacacgcagacgaagaagaacgcacccgctcaggcgctgaacaggacgcgctacaagaacacgaacctggagcacatagataggctactggtgcggccatagggatatttactgtagttagctagttaggattagcaaggagctcgccgtatccaggttggctcgctagcatattgaccgtggctcagacggattgtacaggtacaatccggcgcacggagataccaatcagaattgatcagatcattagtcggtgtacattattatcataatcatatgattagttaggctctaagcgcacacatacctatgataattctttgcaccgtagtctttgtttgttcgcacacctaatcgaaacttgagtaagctattgtatcatatctcagcgtccatgactactttgtaaataatttaagattaaagttgttttacgctctaagttgaaacggaattctcagccataaaagcaaaaatcagcaacgaattgtataagatgttcctagaccaaagaaaaagcccctcaagttttgcattcagcaatgcccctgggaaaatgcaatcacctgcgacagccaggacctccaactgccgtctgcaggattcgtgcgaggtcagggtctgaaccacatcaacaatcaattagggcaaggtgtcaacaaaaaatggttgttcttcgaattgttctgaaaccggggcaagcgttcaaataatttatgccgacatatggatgaatgttcgaggcggcacagataagtcgtgcacggatgagcctcctgccccggcgaaaccaaacggaatcgcgtgcttcgtttaaattgcacgaaataaaaattggatacgaacaggacgaaggagacatacctagtttaaacaatgtaaggggttttgggccctgctctaatgggactgaatggcttgaaagtttggcataatcaatttcatcctaaacgctgcacgattttttgtcgaatgagaactactttttgtatacctaagatatgcgttttgttcttcgtccgaaacgggtttccaaagcaaaactttttcactactcataagtatgctaagttaagtttatatagaaatttatattcaagttatgaactgcactgaaatcgcctacatgtaaatactaatcaccaaatattgtaaccaaatttttacaagtcccgctaaagcagggagatgcgcagggattggaaaaaactctgacaaatggtattacgagatttatacaatttatacaattgaatatggaatgcgatgtgccgcaaagacattagttaggtacttacaaaatcttacagaaataaaataacaaccgagtcttgatgcaaactcgagttaagcaacttaaacattttccaaaaatatcttacaatgtttcaatgattaactacacagataccgaaatacgtctaaaactattctcttattcaagtaaactacaacataaaatgtttaaacctgacagggctaatagcaaggaacttcaatcatttttaaacaaaatacaaatacctttcaataaattgataaacttttcttaaaaattttcaaagcaatcgcacaatggttttattccttcatataaagaaatgttaccagtttttggtttttttttaggggttta

SEQ ID NO: 13307 - DNA, 1974 bp, DROSOPHILA
atgaagggcggcaactacaccagcctcggcacgtgcagtggcatcaatgtcagtggcaacgtggccggcacccgcaagatgtcactgggcaaatccattaaaatgtacctgaccattttcatcctgaccacctgcatttatatggcgctctatcagtaccacatatcccgtgaacccttcgccgccagcgaggttgtcaagcatcaggagaaatcatcttcatacatcgcttcatatttgtggtcacccatttccctgctaatggccaatagttcctccaataccaataacaattccacaacaacaagcaccacaacaacaacagctccaacgacaccaacaaccacaacaaccacgacagtgggcagtgtgggccaaaaactgggcgcatcctccatctcctccattcgcatggtatcattagcggccacaataccgtcatttaaatcgaccttatcggaatcgcgatcggtatcgttgggtggccatcaaaagactgcaacagtgaaaacaagcaccacaatcacaacaagaacaacagccagtggcttggccacaaccaaattgtcagcaacaacaagaacaacagccaaaacaagcgccaaactgtccgcggcaaccacgcccactgcctcccacatggaaaacggctataagactcgaccaacatttgttgccgcatccctgcccccgcccctgtacataatcacgcccacctaccgacgacccgagcagctggcggagctcacccggctgggatatacgctgaaacatgtggtgaatctactctggctggtcatcgaggatgccaacaagacgaatccgctggtgggccacactttggaccgcatcggagtgccctacgagtacatggtggcgcccatgccggagaagtacaagcagacgaagaaggccaagccgcgtggcgtctccaatcggaatcggggcctcgagtatctgcgcgagcatgccaccgagggagtgctctactttgccgacgacgacaacacctacgacattagcatattcgagcagatgcgctacatcagcaaggtggccatgtggccagtgggcctggtcacaaagaccggagtgagcagtcccattattcaggcgggcaagctggttggctactacgatggctggatcggaggacgcaagtatccagtggacatggctggatttgcagtgagcgtcaagttcttgaaggagcgtcccaatgcccagatgcccttcaagccgggatacgaggaggatgggtttctccgcagtttggcaccacttgacgatgcggaaatcgagttgctggcggacgagtgcagagatattctcacgtggcacacgcagacgaagaagaacgcacccgctcaggcgctgaacaggacgcgctacaagaacacgaacctggagcacatagataggctactggtgcggccatagggatatttactgtagttagctagttaggattagcaaggagctcgccgtatccaggttggctcgctagcatattgaccgtggctcagacggattgtacaggtacaatccggcgcacggagataccaatcagaattgatcagatcattagtcggtgtacattattatcataatcatatgattagttaggctctaagcgcacacatacctatgataattctttgcaccgtagtctttgtttgttcgcacacctaatcgaaacttgagtaagctattgtatcatatctcagcgtccatgactactttgtaaataatttaagattaaagttgttttacgctctaagttgaaacggaattctcagccataaaagcaaaaatcagcaacgaattgtataagatgttcctagaccaaagaaaaagcccctcaagttttgcattcagcaatgcccctgggaaaatgcaatcacctgcgacagccaggacctccaactgccgtctgcaggattcgtgcgaggtcagggtctgaaccacatcaac

SEQ ID NO: 13308 - protein, 479 aa, DROSOPHILA
MKGGNYTSLGTCSGINVSGNVAGTRKMSLGKSIKMYLTIFILTTCIYMALYQYHISREPFAASEVVKHQEKSSSYIASYLWSPISLLMANSSSNTNNNSTTTSTTTTTAPTTPTTTTTTTVGSVGQKLGASSISSIRMVSLAATIPSFKSTLSESRSVSLGGHQKTATVKTSTTITTRTTASGLATTKLSATTRTTAKTSAKLSAATTPTASHMENGYKTRPTFVAASLPPPLYIITPTYRRPEQLAELTRLGYTLKHVVNLLWLVIEDANKTNPLVGHTLDRIGVPYEYMVAPMPEKYKQTKKAKPRGVSNRNRGLEYLREHATEGVLYFADDDNTYDISIFEQMRYISKVAMWPVGLVTKTGVSSPIIQAGKLVGYYDGWIGGRKYPVDMAGFAVSVKFLKERPNAQMPFKPGYEEDGFLRSLAPLDDAEIELLADECRDILTWHTQTKKNAPAQALNRTRYKNTNLEHIDRLLVRP

SEQ ID NO: 13309 - DNA, 3995 bp, DROSOPHILA
gcagataaagcgaaactgcttttatgcaggctgcactgaaagcaaatagaggaagaactctagattttattggaagaaaagctgtagagaccctattcatagaaaaccatattcttagtccgcttttccctatttcaaattgggtaaatgtgttttgctgccagcatccctacttaaattctcagtgcaatgtcctgggaaaatccaaggccgcacggactgcacattcccatgcggaaaatcgataaccattgcacagggaaacacgtgtgaaaggacctccacaccgaccgaatgcctttcagcggggccaggacaaaaactgtcgctacataatcataatcgtaaccatgatgaagcagcgtcggtgacgacaactacgacaatgtcgactggctgccctcgagtgttttatccttgacaaatccttgtgcaacaatcagcagcaacagcaacagctacggctacagaaacaactacagcagcatcgaaaaaaaagagccttgtggaaatgttacaagagcaacgcaaacgggtggcagaatcgttgacagtggcaaatgcgcagcaaaacggctaaatgaggccgagcctggttgaggagaagactcgactgaatgagtaaactccactcgttaggctcccgttcgcccactttccacctccgccggatggtagccacaaatcgttgcttgaagacgatctccccgaccaccaggggccttggcatgatggatgacaataaacaagacaagcgggcacaattgtttgtcggcctcctcggccttctcggcccactcttcatcatcattgtccttcagcaagcctgtacttagcgggtctgttggcatttccccaaccgaacaatagtggtttagccgtccgatgataaagccagtcttaaatagctttaatgctttagtgctgaaagtaactttaatctgtcaatgcaaagatacgtactacatctggaattttgactttaatcgctcacaaatttaaattaagatacaactccaaatttattaggaaaagatagatcattacttaacttaagtattgaaattacagctgaaatgtataataggtaggggacttcatctcccacgcctccgataagcttttcttttttttattaatggcccactacttgcctttcttttcttcgcaatttgcctctgcaatctttttcttcagctcattgcatcgttttttgaattcggctagatcacagtctttcttccgttcggattctgctgtctttttctttttctcggcttcacgtgccttgttcttcttggcctcggcacatttcttttgaagcgcggcctgttcgcttttcgtctttttctcggcctcttgagatttcttctttttgtcttcctcacactttttcatagctgcatcgtttgcactatttttcttacggtctgattctacgcatttttttatctccgccttttcttcgcatttctttttagcagcaccttcctcgcatttcttttttgctgctgcttcttcgcatttctttttggccgctgcctcttcgcatttctttttcgccgctgcctcttcgcatttctttttggccgctgcctcttcacatttctttttcgcttcggcttccgcgcaattctttttagctgctgcttctttacatttgtttttggccgctgattcttggcatttattttttggtgctgatttttcgcatttctttttggccgctgcctcttcgcatttcttcttggctgctgcttcttcacatttcttcttggctgctgcttcctcacatttcttcttggctgctgcttcctcgcatttcttcttggccgctgcctcttcacatttcttcttggctgctgcttcttcgcatttcttcttggctgctgcttcttcgcatttctttttagcagccgcttcttcacatttctttttagcctccaattcctcacatttctttttagcagctgcttctttacattttttattgagctctgcctcctctttcttcttgcgttcagcttcctcacgctgcttcttgcacttgccctttatttccttgagcaatcgttttatctcagctttctctttggcctttttcttctcagctttgttctttgcgccagtttcgtcgtcctcactcggcttagtgcagtctagaggctttccctctttcttttctctttcctttcttttagcctcctcaatcgcgatttgttcagcgaacttcttctggtagacaatcttctcggcgtgaacaatacacgccttctgtatgccagaaagcatgcactttacaagagaatctacagacttgggatcaccctgaggctttgactttctcaattcttcgcagagggccttgtactgcttgcgctcgcagtctttcttctcggaagctagcatgcaactgaacttcagctcatcgacggcttcgtctagatttggttcactttgcgattctggaggggcttcagattttgccgctttcttcttttgctcaagtaaatgctttctctttctggatatccgtgagcatttctttttgggttccggttttggtaacggctgcagtgcgcagttttcatcctccaattttttgcaatagcaactatctttatcggcctctttgcaaaacgatcgttgttggttcaggcatatttgatcgatgtttcttttaaaaacacggtccttcagttgggatgctttgtagatccgatggtggtagtagaatttttgcggttctgattgatcaattgcttgattgatcatgcaattagttttcattcgatatttcgagcttaaatcatcatatgcatcggatttgtggctaagtatccttggttgtcccaagtaaacggatacatggtgcaaattagtgcggggctttaggaacaatcggttccaactgggctgctttagatggtacgcgagagatcgtgagagatggcgtcccaaaaacaccatgacttaaaacggaattgcggaaacttataacatccaattttgaacagtaaggcttagtaaggctaaaactgaaaagtgcaagagcttacatattagcctgagactacttgagtcaatttaaaaagagatttcttcggaacatagaagagaaccctgtgccatctttatttcggggtgttctagcccttggggcgattcaagtgccttggcccaattcttcgcgaatgtgggctgagcgattctgtgattctccgaggatgtttcccacctgcctgctggccgacataataaagcaattaaagttttacactccgcagacccatttcacattcggcgcccgctcacatcaacaatgaaatgcgcacttcccaccgtgcacatgtgcgcaattaaaatgtaaacgtgtcaaacacatggcagactgctcgggcagagctttcgtttaaaaattaacagcgacactgccgaacaagttgcagaaattaatgacaacataaaggaatttaaatacgcaatgagctcactgggtgggttggtcctgaattgggctgagtgggtggcactcgtaattgcggtgcaagttcgtaatgccgccgtgagtgtgcgtgtgtgagtgcgtgtggcagaaagttaaagcacacttatgtgcgacagtgctgccaaggtaggccaactcgaactcacctgtctgctgttgtctgcttggcggcgcatgaagtgaaaattaatttctaaatgcgggaaattaacaaattacaaacaacgcaatgggggactgtgggttggcaggtggcggaagtagacatgccataattcaccgcgcatacccacacagagagagacacacacacacacacatggccatggaggcctcttctgtatagactgcaaagttcgcagagcaacttccttatcgagcgatggagtagcgtggggggggggggactgaggaactcctgcaaggtgttgaagcacaggtgaggcacattgtcttgcttttcgcctggagccgtgccccacacctc

SEQ ID NO: 13310 - DNA, 1995 bp, DROSOPHILA
agtttccgcaattccgttttaagtcatggtgtttttgggacgccatctctcacgatctctcgcgtaccatctaaagcagcccagttggaaccgattgttcctaaagccccgcactaatttgcaccatgtatccgtttacttgggacaaccaaggatacttagccacaaatccgatgcatatgatgatttaagctcgaaatatcgaatgaaaactaattgcatgatcaatcaagcaattgatcaatcagaaccgcaaaaattctactaccaccatcggatctacaaagcatcccaactgaaggaccgtgtttttaaaagaaacatcgatcaaatatgcctgaaccaacaacgatcgttttgcaaagaggccgataaagatagttgctattgcaaaaaattggaggatgaaaactgcgcactgcagccgttaccaaaaccggaacccaaaaagaaatgctcacggatatccagaaagagaaagcatttacttgagcaaaagaagaaagcggcaaaatctgaagcccctccagaatcgcaaagtgaaccaaatctagacgaagccgtcgatgagctgaagttcagttgcatgctagcttccgagaagaaagactgcgagcgcaagcagtacaaggccctctgcgaagaattgagaaagtcaaagcctcagggtgatcccaagtctgtagattctcttgtaaagtgcatgctttctggcatacagaaggcgtgtattgttcacgccgagaagattgtctaccagaagaagttcgctgaacaaatcgcgattgaggaggctaaaagaaaggaaagagaaaagaaagagggaaagcctctagactgcactaagccgagtgaggacgacgaaactggcgcaaagaacaaagctgagaagaaaaaggccaaagagaaagctgagataaaacgattgctcaaggaaataaagggcaagtgcaagaagcagcgtgaggaagctgaacgcaagaagaaagaggaggcagagctcaataaaaaatgtaaagaagcagctgctaaaaagaaatgtgaggaattggaggctaaaaagaaatgtgaagaagcggctgctaaaaagaaatgcgaagaagcagcagccaagaagaaatgcgaagaagcagcagccaagaagaaatgtgaagaggcagcggccaagaagaaatgcgaggaagcagcagccaagaagaaatgtgaggaagcagcagccaagaagaaatgtgaagaagcagcagccaagaagaaatgcgaagaggcagcggccaaaaagaaatgcgaaaaatcagcaccaaaaaataaatgccaagaatcagcggccaaaaacaaatgtaaagaagcagcagctaaaaagaattgcgcggaagccgaagcgaaaaagaaatgtgaagaggcagcggccaaaaagaaatgcgaagaggcagcggcgaaaaagaaatgcgaagaggcagcggccaaaaagaaatgcgaagaagcagcagcaaaaaagaaatgcgaggaaggtgctgctaaaaagaaatgcgaagaaaaggcggagataaaaaaatgcgtagaatcagaccgtaagaaaaatagtgcaaacgatgcagctatgaaaaagtgtgaggaagacaaaaagaagaaatctcaagaggccgagaaaaagacgaaaagcgaacaggccgcgcttcaaaagaaatgtgccgaggccaagaagaacaaggcacgtgaagccgagaaaaagaaaaagacagcagaatccgaacggaagaaagactgtgatctagccgaattcaaaaaacgatgcaatgagctgaagaaaaagattgcagaggcaaattgcgaagaaaagaaaggcaagtagtgggccattaataaaaaaaagaaaagcttatcggaggcgtgggagatgaagtcccctacctattatacatttcagctgtaatttcaatacttaagttaagtaatgatctatcttttcctaataaatttggagttgtatcttaattt

SEQ ID NO: 13311 - protein, 607 aa, DROSOPHILA
MVFLGRHLSRSLAYHLKQPSWNRLFLKPRTNLHHVSVYLGQPRILSHKSDAYDDLSSKYRMKTNCMINQAIDQSEPQKFYYHHRIYKASQLKDRVFKRNIDQICLNQQRSFCKEADKDSCYCKKLEDENCALQPLPKPEPKKKCSRISRKRKHLLEQKKKAAKSEAPPESQSEPNLDEAVDELKFSCMLASEKKDCERKQYKALCEELRKSKPQGDPKSVDSLVKCMLSGIQKACIVHAEKIVYQKKFAEQIAIEEAKRKEREKKEGKPLDCTKPSEDDETGAKNKAEKKKAKEKAEIKRLLKEIKGKCKKQREEAERKKKEEAELNKKCKEAAAKKKCEELEAKKKCEEAAAKKKCEEAAAKKKCEEAAAKKKCEEAAAKKKCEEAAAKKKCEEAAAKKKCEEAAAKKKCEEAAAKKKCEKSAPKNKCQESAAKNKCKEAAAKKNCAEAEAKKKCEEAAAKKKCEEAAAKKKCEEAAAKKKCEEAAAKKKCEEGAAKKKCEEKAEIKKCVESDRKKNSANDAAMKKCEEDKKKKSQEAEKKTKSEQAALQKKCAEAKKNKAREAEKKKKTAESERKKDCDLAEFKKRCNELKKKIAEANCEEKKGK

SEQ ID NO: 13312 - DNA, 6659 bp, DROSOPHILA
gtaactatctttacagcttttgtcgcatttttaagaacgaagcccgcattgtgctggttaagaaagagaagggcttatggcctgagatgttccagaagctggacaaggaggcactcatgcagaagcgcctagagatcgccgacctcatcgtggagcgcaacaagaagcgggatgaaaaggcactggaacgttacgataacaagcggcgggcggagatccagaaggagatccagcgggagacagatatgcgcgagcgtgtgaagcagttccaggagaactcggtgcgcgaagctctggtagtggatgtacgcaaggaggcgaaagctacgcccaagccagatacactgcagtatccgccatcgtcgggaggcgccagtcgcctggccacgcccctcatgcgtccgcccatgagctccgttcgtggcagcggacggatcaacgtaaacttcaccacacagcacaagcgggtcacgccgaagcgggagtcgcaggccgctatggagaaggcatatgccgccgccggtggacccaatgcgaatgtccagtcgccgatggagagcgtcgatgaataagcgttacatgtcaattagcgcgtgcgtgcgagactgtgctaatattcctattttattattgcatcaaataaatctacaggtgtttgtttagttgaatcagcactttagatggttttaatttcatggttcgggaaagtaaaactttgcactacagtaagtattattaattaaaatttattaagctatacaaaattattttaaagacgatcctggtctaagtaaaacagaagctgtttcccaaaaatataatggttaataaaatatttacatactttgtacatatggtattaatatattatgctaaatttttgggggtttgtgtgaatttaatgtgctgacaacaaaatgaatttgaatttaaaaatccgataacatatcgctgacactggatttccaacactaagtcggcgctatcgatagcataagacaaacagctggtgcctgtcaacgttgcttgaattttcacaatttttttttgccgctatgacattacaactataaaaagtgctttagattttctaaaaacctcacacaggaaacgcgctgcagtaggagtacccacctgaaaccgatgaccgaggcagctggagcaaccaacccaggaggagccgccggagacgcggaatcgtacggcaaagaaatggctctgcagtccggtaggccgaaagagccaaccaagttggacgacctggtgcaatatgtgagcctccatgttcgcatacccacgccgttgaccggtgttgtgctgccctttgtgccactttacctgtcggcattctacctgtggatcaacgttacgggtggacaggagaatgataccaccaataacgatgtgataactgccgataaccaaacgaccacggataatataacaacttggaatgacgtgggattcatcggcgtactagccattgcctttctgcacattctgacgctgctcttctgctactggagcgttcacgtgctggccttcctcacttgccgtcgtgtaaagctccccggcgccaatgtgctggccaaagtcgtacccactcccaacaatggcaactcgaagatcgtccccattcggtcctccaagctggaggatggctcaacacagtattatttcgttttccaaaagaccaaatacgtttggaatgaggatcggaagacattccgcgccgtcgaattcccggtaaatggactactgagcacctattcctcatctagaggtttggaaactgaggaggacattaagcgggctactcaaacctacggaaataacgaaatggaaatggtggttcctgagttccacgaacttttcatagaacgcgccactgcgccgttcttcgtgttccaagtgttctccgtgggactgtggtgcatggacgactactggtactattccctgttcacgcttttcatgctaattgccttcgagtgcactattgttaagcagcagctgcggaacatgtccgagatccgaaaaatgggcaacaagccctacctgatatacgcctttcgtcaaaacaagtggcgtcaccttggatccgacgagctgctacccggggatttggtgtcgataacgcggtcccaaaacgacaacatagtgccctgcgatctggtcattcttcgaggctcttgcattgtggatgaatcaatgctcactggcgaatcagtgccactaatgaaggagtcattggaatccttagacaatttggacgttgaaatggacgccgaaggagatggaaagctgtttgtgctgtttggtggcaccaaagtagtccagcatactgccccgacgaaagaatcgcttcgagctcctgacggtggttgcatcggctatgttatccgtactggatttaacacatcccagggcaaactactgcggacaatcctgttcggcgcaaatcgcgcaacggagaacaatgtggagacctttgcttttatcgctttccttatggtatttgccgtagccgcagcatcttatgtgtgggttaagggcagcgaagacccggagcgcaatcgctacaaacttttcctggagtgtacgctcatcctcacgtccataattccgccggatttgcccatcgagctgaccttggcggtaaacacatcactgatccagctaacaaagttgttcgtgttctgtacagaaccctttcggattccattcgcgggaaaagtgcagatttgctgcttcgacaagacggggacactgaccacggataatctgatggtggaaggtattgcaggattggctcccaatggggcttgtgtccccattgagaaggcggagggaaatacggttcaagtgctcgcctgttgccattcattggctctgcttgatgacggattggtaggagatccacttgagaaagccactctagcagctgtagattggacgcttaccaagatggacagcgtcatcccaaagcgaccacagtttaagccattgaagatcattcagcgctatcacttttcatcggcacttaagagaatgtctgtgctagctggtcatctaattccgtactccaatgaggttaaacacataggagccgtaaagggagctcctgaggtcattcaaaagatgctgcgcgaggtgcccgcggactatgagaaggtatctaattcgaatcttattgttatataagtttatatcaattttcaacaaaattttattttaaggtgtatttggaatacgctcgtcgtggagcacgcgtactggctttgggaattaaggatcttgggaccctgggcgctcaaagagttagggaaatgaagcgtgaggaagtggagtgtgacctgacattcgccggattcttgattatttcatgtcccatgaagcccgattccaaatctgtgatcaaggagcttattcaatcctcacacaaggtggtcatgattacgggcgacagcccgctcaccgcctgtcatgtggcccgcgaactgcgcttcacccgtaaaaagctgatcattctcaccccgcccgaggaggatcgtaagaacaactggagctgggtatctattgacggggatcaaagctacgaactggacactaagcctggtagcaaaaagctttcccatttgctagccacacatgatctctgcattaccggagagggattgcagtatctgcaacagaatcagccgcaatatatgcgccaactactgccacagattacggtctgtgcgaggttcgcacccaagcaaaaggagctcgtaatcacacagttaaagcagctgggttactgcacgttgatgtgcggcgacggcaccaacgatgtgggtgcccttaagcacgccaacgtgggcgtctccctgctgaccagcgctccagtgaagcgcaaacgcaccgaggaggaacagcagcaggcggcggccaatgcagctgcaatagcagctcaggcacaagccaatgccaatcaacagttgacgaccagggagcgggcattgcgtcggcgccaggagcatctcaatcagacacaggctcgcctccaaaacgcactccgcgacatggaagagcaaactatggtcaagttgggtgatgcctctatagcggcgccattcaccagcaagtcttcgtcaattatgtgcggtgggtatcattgaattattgtttatgttcctttcgacttaatgtgttctaatttttagttaaccacatcattaagcagggtcgttgcacgctggtcaccacactccaaatgttcaagatccttgctctgaacgccctcattcaagcctactgtcagtccgtgctctatattgatggaataaaattcagcgatacccaagccaccatgcagggtattttcattgccgcctgcttcctctttatcacacgagctaaggtaagtaaaacagcgctttaattttattagaacaatttaaagtattgtatttgttttttatgtagccgctgaaaactctatccaaggtagctccactgccaaatatcttcaacttctacacgatatcgaccattctcagtcagtttgctgtgcatttcggaacgctctactacctgaccagccaagccaacattttggcaccgcctaggtgtgtttggctagaacattatgaaaagaaaagcatttgaattgataatttgttttgcagagagggcaaagtgaagttgtacattgatatggatgccgaggagaagaccaaatacgatccaaatattgttagcagcacggtgtacataatttgcctatcattacaagtcgctaccattgcggtgaattacaaggtacgctcccagacatatcgtgcaacgcagaatactaaacttaaacttacgtagggctatccgttcatggagagcttgcgctccaatcgcatgctgatgtatgccatcggagcctccgctgcactggtcattcttctgtccacgggactggcgcccgaactgacggaattctttgagataattgacttcccaacggatgtaagtacttgagtatattttattgttataatgtatataatgttatcattttcagttccgtaaaactttgctcggcgtcctggtcctagatattgtaggggcttttcttttggaccgtatttgctcattcctgttcggggaaacgcgtcgcaaatctaaagtgctgaactgttaggaccattttatactaaatactagaaaagtaatgtgaaagcaggcgcaagccgtacgttccactagagaaacccctttcgtttttatttgtacccccataatgatgaataacaaaacgtaatattatggcgtcggtttcataaatattgaaattcttcatctaagaatcaacataatgcatttaaggtgtattatcaggcaagtgtattatcgggcatcctatatcattttattttgacaaattgagatctttcgattttttcgactctcccgtatatgcgattagtgaaattgtcgtaatatttgtaatgctaataaaaatagagaaaagttcgaaagccgcgatgcatatttatcaaatacttttgatataggttacatttaagtttgttctggtacaggatcctctactttcgagtcttcgagctgtttgaactgaatcaagattaccaagtatgttgtgacggccgaaaatatctgaaaataaacagcaaatacacagaacttgcagtacatcccattaataaataagggatacgtggattatataccttgaatagtgtggagttatctatcgcaaaaaatccatatgccgtgaattgcacctcctgtttaatgctcttcgtaaggaacttatcaatctggtaatgaaacccttagctaatcactttgattcatttcgtttttcaataacttacgatattctgatactccttcgacttggcatacacccttgcaagaatttgggatgtggcattggccttgaaataaaaacactcatgaatattgagatcttatctccgatgtagttgctcacctccgtggtggtcagaccacagctgcgtgacagcaaagccagcagggaaacgtggagacataaccaggcgaagcaccactgcaatatgtttggtgaaaccatgcccttgccggtaatctggacaaagaggttgtagcagttggtggtgaccgtgtaaaaggagtagcccagaaacgagaccagaatcaagttgcagcaatcgttgatgcccttgtagatacgcagcagtttgttgtgcatgcggtatatgaatagcgagtcttccgggaaatgttccattagagcaggattgacattgggattgacgtcaccacgctgccgcctcgctcgtgctccaccttctttgcgcctatgctgctgcccataggtgtaaccatttagcagctggttgatgaaatgaaaccggatgtacacaatcctgagcaaagccgatgcgaatactatatatgtggcggtcagaccgttctggatgccatagaaggccaatagtatataggaggtgggtgtgatctcgccttgcacggcatatattttgagcacgattatataagcctggcaagcggtgattcctactaaaaactttaccaagaacccaaaattttggctcaaattggcaccaaactggcgacgcacttcctcgtcgagttgaaggatttcattcatt

SEQ ID NO: 13313 - DNA, 4301 bp, DROSOPHILA
aaacagctggtgcctgtcaacgttgcttgaattttcacaatttttttttgccgctatgacattacaactataaaaagtgctttagattttctaaaaacctcacacaggaaacgcgctgcagtaggagtacccacctgaaaccgatgaccgaggcagctggagcaaccaacccaggaggagccgccggagacgcggaatcgtacggcaaagaaatggctctgcagtccggtaggccgaaagagccaaccaagttggacgacctggtgcaatatgtgagcctccatgttcgcatacccacgccgttgaccggtgttgtgctgccctttgtgccactttacctgtcggcattctacctgtggatcaacgttacgggtggacaggagaatgataccaccaataacgatgtgataactgccgataaccaaacgaccacggataatataacaacttggaatgacgtgggattcatcggcgtactagccattgcctttctgcacattctgacgctgctcttctgctactggagcgttcacgtgctggccttcctcacttgccgtcgtgtaaagctccccggcgccaatgtgctggccaaagtcgtacccactcccaacaatggcaactcgaagatcgtccccattcggtcctccaagctggaggatggctcaacacagtattatttcgttttccaaaagaccaaatacgtttggaatgaggatcggaagacattccgcgccgtcgaattcccggtaaatggactactgagcacctattcctcatctagaggtttggaaactgaggaggacattaagcgggctactcaaacctacggaaataacgaaatggaaatggtggttcctgagttccacgaacttttcatagaacgcgccactgcgccgttcttcgtgttccaagtgttctccgtgggactgtggtgcatggacgactactggtactattccctgttcacgcttttcatgctaattgccttcgagtgcactattgttaagcagcagctgcggaacatgtccgagatccgaaaaatgggcaacaagccctacctgatatacgcctttcgtcaaaacaagtggcgtcaccttggatccgacgagctgctacccggggatttggtgtcgataacgcggtcccaaaacgacaacatagtgccctgcgatctggtcattcttcgaggctcttgcattgtggatgaatcaatgctcactggcgaatcagtgccactaatgaaggagtcattggaatccttagacaatttggacgttgaaatggacgccgaaggagatggaaagctgtttgtgctgtttggtggcaccaaagtagtccagcatactgccccgacgaaagaatcgcttcgagctcctgacggtggttgcatcggctatgttatccgtactggatttaacacatcccagggcaaactactgcggacaatcctgttcggcgcaaatcgcgcaacggagaacaatgtggagacctttgcttttatcgctttccttatggtatttgccgtagccgcagcatcttatgtgtgggttaagggcagcgaagacccggagcgcaatcgctacaaacttttcctggagtgtacgctcatcctcacgtccataattccgccggatttgcccatcgagctgaccttggcggtaaacacatcactgatccagctaacaaagttgttcgtgttctgtacagaaccctttcggattccattcgcgggaaaagtgcagatttgctgcttcgacaagacggggacactgaccacggataatctgatggtggaaggtattgcaggattggctcccaatggggcttgtgtccccattgagaaggcggagggaaatacggttcaagtgctcgcctgttgccattcattggctctgcttgatgacggattggtaggagatccacttgagaaagccactctagcagctgtagattggacgcttaccaagatggacagcgtcatcccaaagcgaccacagtttaagccattgaagatcattcagcgctatcacttttcatcggcacttaagagaatgtctgtgctagctggtcatctaattccgtactccaatgaggttaaacacataggagccgtaaagggagctcctgaggtcattcaaaagatgctgcgcgaggtgcccgcggactatgagaaggtgtatttggaatacgctcgtcgtggagcacgcgtactggctttgggaattaaggatcttgggaccctgggcgctcaaagagttagggaaatgaagcgtgaggaagtggagtgtgacctgacattcgccggattcttgattatttcatgtcccatgaagcccgattccaaatctgtgatcaaggagcttattcaatcctcacacaaggtggtcatgattacgggcgacagcccgctcaccgcctgtcatgtggcccgcgaactgcgcttcacccgtaaaaagctgatcattctcaccccgcccgaggaggatcgtaagaacaactggagctgggtatctattgacggggatcaaagctacgaactggacactaagcctggtagcaaaaagctttcccatttgctagccacacatgatctctgcattaccggagagggattgcagtatctgcaacagaatcagccgcaatatatgcgccaactactgccacagattacggtctgtgcgaggttcgcacccaagcaaaaggagctcgtaatcacacagttaaagcagctgggttactgcacgttgatgtgcggcgacggcaccaacgatgtgggtgcccttaagcacgccaacgtgggcgtctccctgctgaccagcgctccagtgaagcgcaaacgcaccgaggaggaacagcagcaggcggcggccaatgcagctgcaatagcagctcaggcacaagccaatgccaatcaacagttgacgaccagggagcgggcattgcgtcggcgccaggagcatctcaatcagacacaggctcgcctccaaaacgcactccgcgacatggaagagcaaactatggtcaagttgggtgatgcctctatagcggcgccattcaccagcaagtcttcgtcaattatgtgcgttaaccacatcattaagcagggtcgttgcacgctggtcaccacactccaaatgttcaagatccttgctctgaacgccctcattcaagcctactgtcagtccgtgctctatattgatggaataaaattcagcgatacccaagccaccatgcagggtattttcattgccgcctgcttcctctttatcacacgagctaagccgctgaaaactctatccaaggtagctccactgccaaatatcttcaacttctacacgatatcgaccattctcagtcagtttgctgtgcatttcggaacgctctactacctgaccagccaagccaacattttggcaccgcctagagagggcaaagtgaagttgtacattgatatggatgccgaggagaagaccaaatacgatccaaatattgttagcagcacggtgtacataatttgcctatcattacaagtcgctaccattgcggtgaattacaagggctatccgttcatggagagcttgcgctccaatcgcatgctgatgtatgccatcggagcctccgctgcactggtcattcttctgtccacgggactggcgcccgaactgacggaattctttgagataattgacttcccaacggatttccgtaaaactttgctcggcgtcctggtcctagatattgtaggggcttttcttttggaccgtatttgctcattcctgttcggggaaacgcgtcgcaaatctaaagtgctgaactgttaggaccattttatactaaatactagaaaagtaatgtgaaagcaggcgcaagccgtacgttccactagagaaacccctttcgtttttatttgtacccccataatgatgaataacaaaacgtaatattatggcgtcggtttcataaatattgaaattcttcatctaagaatcaacataatgcatttaaggtgtattatcaggcaagtgtattatcgggcatcctatatcattttattttgacaaattgagatctttcgattttttcgactctcccgtatatgcgattagtgaaattgtcgtaatatttgtaatgctaataaaaatagagaaaagttcgaaagccgcgatgcatatttatcaaatacttttgatataggttacatttaagtttgttctggtacaggatcctctactttcgagtcttcgagctgtttgaactgaatcaagattaccaagtatgttgtgacggccgaaaatatctga

SEQ ID NO: 13314 - protein, 1225 aa, DROSOPHILA
MTEAAGATNPGGAAGDAESYGKEMALQSGRPKEPTKLDDLVQYVSLHVRIPTPLTGVVLPFVPLYLSAFYLWINVTGGQENDTTNNDVITADNQTTTDNITTWNDVGFIGVLAIAFLHILTLLFCYWSVHVLAFLTCRRVKLPGANVLAKVVPTPNNGNSKIVPIRSSKLEDGSTQYYFVFQKTKYVWNEDRKTFRAVEFPVNGLLSTYSSSRGLETEEDIKRATQTYGNNEMEMVVPEFHELFIERATAPFFVFQVFSVGLWCMDDYWYYSLFTLFMLIAFECTIVKQQLRNMSEIRKMGNKPYLIYAFRQNKWRHLGSDELLPGDLVSITRSQNDNIVPCDLVILRGSCIVDESMLTGESVPLMKESLESLDNLDVEMDAEGDGKLFVLFGGTKVVQHTAPTKESLRAPDGGCIGYVIRTGFNTSQGKLLRTILFGANRATENNVETFAFIAFLMVFAVAAASYVWVKGSEDPERNRYKLFLECTLILTSIIPPDLPIELTLAVNTSLIQLTKLFVFCTEPFRIPFAGKVQICCFDKTGTLTTDNLMVEGIAGLAPNGACVPIEKAEGNTVQVLACCHSLALLDDGLVGDPLEKATLAAVDWTLTKMDSVIPKRPQFKPLKIIQRYHFSSALKRMSVLAGHLIPYSNEVKHIGAVKGAPEVIQKMLREVPADYEKVYLEYARRGARVLALGIKDLGTLGAQRVREMKREEVECDLTFAGFLIISCPMKPDSKSVIKELIQSSHKVVMITGDSPLTACHVARELRFTRKKLIILTPPEEDRKNNWSWVSIDGDQSYELDTKPGSKKLSHLLATHDLCITGEGLQYLQQNQPQYMRQLLPQITVCARFAPKQKELVITQLKQLGYCTLMCGDGTNDVGALKHANVGVSLLTSAPVKRKRTEEEQQQAAANAAAIAAQAQANANQQLTTRERALRRRQEHLNQTQARLQNALRDMEEQTMVKLGDASIAAPFTSKSSSIMCVNHIIKQGRCTLVTTLQMFKILALNALIQAYCQSVLYIDGIKFSDTQATMQGIFIAACFLFITRAKPLKTLSKVAPLPNIFNFYTISTILSQFAVHFGTLYYLTSQANILAPPREGKVKLYIDMDAEEKTKYDPNIVSSTVYIICLSLQVATIAVNYKGYPFMESLRSNRMLMYAIGASAALVILLSTGLAPELTEFFEIIDFPTDFRKTLLGVLVLDIVGAFLLDRICSFLFGETRRKSKVLNC

SEQ ID NO: 13315 - DNA, 2852 bp, DROSOPHILA
tattgctttatggccaagtgccaaaaatagacgatgaaccattcttctgcatattttgtcacaagaccccaggttagaatcggcatttttatagctcgtggtcagtgtgattccttgaaaggggactcatgccgagtgtagtgcccctcataaacgggaatagagtatttatcaccgcattgtattcagaaatcactgataactgcaaagcgtcgactgaccaattgcgctgcctgataacgctaattgatattggatggactctaaataaatcaactacactaacagcgggccatgcaatttgatttcgcttattgccggccacacttcatcatgattgttcgttgcgaaatgacactgcgattggagcgagtgtccagtggataagtttattgatgggacggctaattatacacatggtctcaactgtatcttatctgctgcagatacaagcacggcgaagagtccaaaataatctaaagtccaataagccgattgataactcaaaataaaattagggcttaatgttaagctgggcttcctgatcaaattgaacacgaatttcttaagtgagagctccaattatttgaaaagaatttaaaacacatgctttaaagattttttcgtgaatgtatttgtcaattttaattttgaaaacatttttttgtcaaacgttgcatattattaagcgaatataattttaattagaactcgatgttcaaaactattagtataattttagggatatgtaaaaaatatgtataaaatgcataaaaagtagtgtaaaagattgagtaacaataaatttaaaggtaaaaaatatgtttcgtataaaagttgtggaaaggcattataaattcacctgatgcgttttctgagttagcactttttatatttttgtatatttttaacagtgtacctacatttatgaaactttttcacctaaggaacaataataaaactactacaacatttataaaccacattttgtaaaagctctttagtttgcggcattgtcgactgcatttttggtcatttgacgatttccttttggtaatggcacatctttagataaaagtgcgtactccacgtccatgtgtcttatgaatggagatgccagcatcttggtggccagctcaggatcctcgtcgtcaaaagctttgagtaggttttgtaatgtgttcacctcctggggatcacaacggtttccccatttcttgaaggtcttcttggcatccacgtaatcctctagtgttaattgtaccagtattaaagcaactactaaacggccaacttgtccgtaagactttgtctgcagatttaggcttatttcctttttgagggctttcgtggcttcttcatattttttgagtctgaccaatatccgggaaaccttcgatgcaaattccgatgcctgatgagtggagtccccaatcaagacgactgccagggcgcgtttgtaaaatcccaaagccaagtcaggatgcttggattccgtcattttggcggctttatcgagagcagcagctgctgcttccggcgaaccatgttgctggtagagacagcaagccctattggcatagtcctccacttcggacagtttgtccgtttctttggcaagcaggataatctgctcgtaggatttggctgcatggaaccatgacttgttgttttcgtaacagtcgatggccttcaaaagacaatccttgcgcttatcgaaacttttggcaattcgatatgcggttgctgccttgaaatacataccagctttggcatactcattcgcggcactatccgtctgtcctatcaaggcctccgcctcttctatctttttggcatcaagagtgctcatagtgctaagttacaacctttgcgtgttgaaaaaatcaattcaagtgacttatattcaaataagtgtgcccaagtgcgcaagtgccgagaaaaacacaaaaggccgctccttttctatgcgggtatgacactggtattatggtaatattaagtgctttactaaagttgcataaaatatatatttgtatttaattaaataaatgcataccatataatatgcgagcttggggggtgaaaagtaagctatatttacatttcatgtaagctggattttgaatatatttaaaaaattgtatcgatttggtttcaaatcgaacttttatcgcatccatagaactcctagttcgattaagtttgtagccctgtctggataaaaaaaaaacatcgataaaaagacacgtgctttgccttaaaagatcttaaagtgaggaggtagcaaggcgctttgatttaacttactttgatattgtaacttaatgcaattaaatattaacataggctttaccaatcgtgtgcgaaatcttgaaaagaaacccgtcgctcggttttatatcgaattcttaacggaagaaggtaagatcctttatatgcagatagctttttttgacttattatcctaacatctttatagttaatcccatattactgcaagatgaaagcctggagagatctgggtattacctatatccagtattccaacatcgcagcccgtgtggtgcgagaggccctgcgcattgagctccgtgcagacgccgccaagcgaaacatcagccatgtgaagttcactccgtgggtgaacggaaagcctgtgccgcgcaagaaggtagaacgtgaatccgaatcttaggcgcccatttcggtgatttgtacaccatgtttcatccagaataacagctgccatgattctacaataacatttcaaataaatctaattcactgaaaaaatgatgtatattagattttttgttgggtcaaaacttcatagctcattcttctaaagt

SEQ ID NO: 13316 - DNA, 852 bp, DROSOPHILA
atgagcactcttgatgccaaaaagatagaagaggcggaggccttgataggacagacggatagtgccgcgaatgagtatgccaaagctggtatgtatttcaaggcagcaaccgcatatcgaattgccaaaagtttcgataagcgcaaggattgtcttttgaaggccatcgactgttacgaaaacaacaagtcatggttccatgcagccaaatcctacgagcagattatcctgcttgccaaagaaacggacaaactgtccgaagtggaggactatgccaatagggcttgctgtctctaccagcaacatggttcgccggaagcagcagctgctgctctcgataaagccgccaaaatgacggaatccaagcatcctgacttggctttgggattttacaaacgcgccctggcagtcgtcttgattggggactccactcatcaggcatcggaatttgcatcgaaggtttcccggatattggtcagactcaaaaaatatgaagaagccacgaaagccctcaaaaaggaaataagcctaaatctgcagacaaagtcttacggacaagttggccgtttagtagttgctttaatactggtacaattaacactagaggattacgtggatgccaagaagaccttcaagaaatggggaaaccgttgtgatccccaggaggtgaacacattacaaaacctactcaaagcttttgacgacgaggatcctgagctggccaccaagatgctggcatctccattcataagacacatggacgtggagtacgcacttttatctaaagatgtgccattaccaaaaggaaatcgtcaaatgaccaaaaatgcagtcgacaatgccgcaaactaa

SEQ ID NO: 13317 - protein, 283 aa, DROSOPHILA
MSTLDAKKIEEAEALIGQTDSAANEYAKAGMYFKAATAYRIAKSFDKRKDCLLKAIDCYENNKSWFHAAKSYEQIILLAKETDKLSEVEDYANRACCLYQQHGSPEAAAAALDKAAKMTESKHPDLALGFYKRALAVVLIGDSTHQASEFASKVSRILVRLKKYEEATKALKKEISLNLQTKSYGQVGRLVVALILVQLTLEDYVDAKKTFKKWGNRCDPQEVNTLQNLLKAFDDEDPELATKMLASPFIRHMDVEYALLSKDVPLPKGNRQMTKNAVDNAAN

SEQ ID NO: 13318 - DNA, 4545 bp, DROSOPHILA
ggacagcgtgctggtgtattccacgggcagaatgtcattgatggccgcgaatccctggcccaccttgatgtacagaccgccgttgagcaggcacgtctccagcagacgctcggcactcttcttgtggagcagcttcacctttgtttcgtactccggatcgttctcgtccagccgcagatagtcagcggctatcaatccggctgtttttaaggatcgtacaaatcgcacggaggcgccgcagtaggtgaagtcatttactatcccatcgtaagccaggccacctgcgccggctgccaaaagactaaatcgcaatacaggacgaccgcctttctggacattcgcctctcgcaggccattgagtgctcttttgcctcgaatccgtgttccgaggctcagcaactgccgcacacgctaagattttagaatgtattctctgcgattaataatggacctcagcgttgtagcactcacctggagaggtcgcattttctgtccgcccgctgcaaagttcacccaatgtttactctttggacacctgtcgcaatatcagctggaaaggccgaacagctgtttgtagacccgccgtgatgataacaacagcgcgatgatggggcaacatcgtcatcgtcacccgctcatttggtttccgtttccgcggttttagaatttcaagtgtattcgatttactaactgcttgaaaagtgtcattcaaaaatacgaaaagcactcttttcatagaagagcatttgtttctgtaaacttccgctttacactagattacgcagctcaaatttgttgcaattgactgattttatgtctaaataatagttcatattccaaaaaagcaccataagctaaataaaattaacaatcattcattaacatttcactaaaccgttattttggttgacaaaactaaataaactaaacatatactgatgttggtattttgtttaagtaccgaaatcgtgtctttttcaatcatccgcgcaaggtcacactgctttgttgattcttgattaggttctgcattttttctgtttgcggcggcggcggcgcgtttgaagtattgttttcaagtgcagcagattgtttactttacgcccacccaactgtgtaaacaaattcagcgcagggcagtaaaccagtgagctccaaaccttcgagcaaccaagatgtcgggcaccatactggagaacctgagtggccgcaagctgtccatattggtggccactttgctgctctgccaggtgttgtgcttcctgctgggcggtctgtatgcccccctgcccgccggccatgtcaccgtgctgggatcgctgtgccgcgaggatcacgcccgccagaatgacaccagtttcctgctgtactcacgcggtgcaggagcctgcatcccagtgacgcgagaggaggtggagcaggattcaacaaagatggccaatgagttggtgcacgttttccagatgccgctgcctcgtgacctgcgcgacctggactactcccgttggcagcagaatctgatcggtgtgctacaggtggagttcggctatgattcctcgtcggagctaagggaaccgcccagggaacttcagttgacaatcgacatgcgtctggcgtaccgaaataagggggatccggacaacggctggaagttgtacgcccacggcgtcgagcatcgctacctggattgtgtcacttctcatgtgggtcccacagaaacgctgtactcatgcgacatgataccgcttttcgaattgggcgcattgcaccacagcttctatctgctgaacttgcgtttcccgctggacacaccgagccaaatgaacctgcagttcggccatatgcacgatctcacgctgacagctattcatcagaacggaggattcacacagatttggctgttgcttaagacaatgctgtttccattcgtagtgggcatcatgatatggttctggaggcgagtgcatctgctgcaacgatcccccgccctgctggagtatatgcttatctatttgggagccgctctgaccttcctcaatctaccgctggagtacttgtcgctggtctacgagatgccgtacatgctgctgctaagtgatattcgccaaggcatcttttatgccatgctgctcactttctggctggtcttcgccggtgaacacatgctcattcaggatgctccgaacaagtcgaccattcgctcgcgttactggaaacatctctcggccgtcgtcgtgggctgcatctcgctgttcgtcttcgacatctgcgaaaggggcgtgcagctacgcaatccattctactcgatctggacaacgccgctgggcgctaaggtggccatgactttcattgttctggccggagtttcggcagccatttatttcctctttctgtgctacatgatatggaaggtgtttaggaatattggcgacaagcgcacctcgctgccttcgatgtcccaggcgcgacgactccattatgaaggtaagatatccattttcaagtccaatggttattcagattaaaccattatacgatttagacattgaaacatgctcgaaaacccatttgattgaattatttaaaaattctttaaccaaaaatatctcatacattattcgtgtcaatatgcgtctcccatacttaaatttcatatcttaattagttttgcgggacacccttgtttattttgaaacgttttttcagttcctttagaccagaaagttgaagattgggccggaatcgtatatttttacacaaaagcttttttttttcaattgcataaggcaaatgaaagtaaaggtatgacaaaataattttaactatgattcaatgttgtatccagaagctccactgaaataataccgcgttttgcaaactaataagttccaaatttattcacatcagccgatgtaaattagcataaacaataaattgaatgaagctttttagtatgctaatattaaaatccagttttaataagtttaaatcttaattatgtctaaatttcaggtcttatctatcgcttcaagtttttgatgctggccacccttgtatgtgcagctctgaccgtcgccggcttcattatgggccaaatggccgagggccagtgggactggaacgacaatgtggcaattcagccaacttccgccttcctgaccggcgtctacggcatgtggaacatctatatcttcgccctgctcatcctgtacgcgcccagtcacaagcaatggccgacaatgcaccacagtgacgagaccacacagtcgaatgagaatatagttgcctcagcagccagcgaggagatcgagttcagtcacctgccatcggactccaatcccagcgagatctcctcactcacctcgttcacacgcaaggtggccttcgattaggcggaaggactcgaattattgttttctaaagggttgtgtgccaaactgagatcacaatttggcctgcagccgcaacgcttaaagtgtgtgctcatttaattaccatagtcagtagcatttcttgcctagttttgcattctgtgcattcgacaacgcgatcagcattattacttatcattaacatatagattgtctagtttttcacagcatgctcaaagtgtacgattttatcaaatgtatttttatgtatgcgcctcggcagtattatctattgatgtccaattgtgctagcttgtaagttttaacatatattatcaaataacattttatacgtgtaataacgttcaagggtggtcccattttttttgctgaacaacatcttgcctcggaaactatatgtttaacattgagatgaattaaaaatcgaatagtgtattaaaatgatattattcatatagtttcaagtgccaaattgtcgacagattaaaaaagaactcatacttaccaccctataatatttatccagaggactctgcccagattttaaaactaaaaacgtagagcaattttgtattcaagtagcaatgcatcgaataaaaagcaatattgaaaatgtcgaactgttttatttcataaatgcccaagacgttattgaattgttaaggaatgccgtttaaaggaactaccatatgatcctttgaggagtgcggtagtttttccagtagaactcctttgtaaagtacacgtaaaacgtggccacattgagcagcagatgagctccgagctccagccactcggcgtaacccttgcgagtgtgccgtgtgttgagtcgaaacagaatgtacggcaccaggaagtagcgcagctccaggagtcgctggaagcacagcaccaggaatagactaagtggaaacattaacttaaagctttccggcatgtgacgtagtccgcaaaagagtacgcaaatcgagagcagataagcgggcgccatggcgtagcggaaccaccagaaccgtccataaagtcggctccatatatagaatgtatagtgtctgttgtcagccagcaggtagggatgcacttcggtgtttaggtgcaccaccaccagtatgagcagcaatgccaatagggacagcacgcgattcctgcgtat

SEQ ID NO: 13319 - DNA, 2017 bp, DROSOPHILA
ctgctttgttgattcttgattaggttctgcattttttctgtttgcggcggcggcggcgcgtttgaagtattgttttcaagtgcagcagattgtttactttacgcccacccaactgtgtaaacaaattcagcgcagggcagtaaaccagtgagctccaaaccttcgagcaaccaagatgtcgggcaccatactggagaacctgagtggccgcaagctgtccatattggtggccactttgctgctctgccaggtgttgtgcttcctgctgggcggtctgtatgcccccctgcccgccggccatgtcaccgtgctgggatcgctgtgccgcgaggatcacgcccgccagaatgacaccagtttcctgctgtactcacgcggtgcaggagcctgcatcccagtgacgcgagaggaggtggagcaggattcaacaaagatggccaatgagttggtgcacgttttccagatgccgctgcctcgtgacctgcgcgacctggactactcccgttggcagcagaatctgatcggtgtgctacaggtggagttcggctatgattcctcgtcggagctaagggaaccgcccagggaacttcagttgacaatcgacatgcgtctggcgtaccgaaataagggggatccggacaacggctggaagttgtacgcccacggcgtcgagcatcgctacctggattgtgtcacttctcatgtgggtcccacagaaacgctgtactcatgcgacatgataccgcttttcgaattgggcgcattgcaccacagcttctatctgctgaacttgcgtttcccgctggacacaccgagccaaatgaacctgcagttcggccatatgcacgatctcacgctgacagctattcatcagaacggaggattcacacagatttggctgttgcttaagacaatgctgtttccattcgtagtgggcatcatgatatggttctggaggcgagtgcatctgctgcaacgatcccccgccctgctggagtatatgcttatctatttgggagccgctctgaccttcctcaatctaccgctggagtacttgtcgctggtctacgagatgccgtacatgctgctgctaagtgatattcgccaaggcatcttttatgccatgctgctcactttctggctggtcttcgccggtgaacacatgctcattcaggatgctccgaacaagtcgaccattcgctcgcgttactggaaacatctctcggccgtcgtcgtgggctgcatctcgctgttcgtcttcgacatctgcgaaaggggcgtgcagctacgcaatccattctactcgatctggacaacgccgctgggcgctaaggtggccatgactttcattgttctggccggagtttcggcagccatttatttcctctttctgtgctacatgatatggaaggtgtttaggaatattggcgacaagcgcacctcgctgccttcgatgtcccaggcgcgacgactccattatgaaggtcttatctatcgcttcaagtttttgatgctggccacccttgtatgtgcagctctgaccgtcgccggcttcattatgggccaaatggccgagggccagtgggactggaacgacaatgtggcaattcagccaacttccgccttcctgaccggcgtctacggcatgtggaacatctatatcttcgccctgctcatcctgtacgcgcccagtcacaagcaatggccgacaatgcaccacagtgacgagaccacacagtcgaatgagaatatagttgcctcagcagccagcgaggagatcgagttcagtcacctgccatcggactccaatcccagcgagatctcctcactcacctcgttcacacgcaaggtggccttcgattaggcggaaggactcgaattattgttttctaaagggttgtgtgccaaactgagatcacaatttggcctgcagccgcaacgcttaaagtgtgtgctcatttaattaccatagtcagtagcatttcttgcctagttttgcattctgtgcattcgacaa

SEQ ID NO: 13320 - protein, 562 aa, DROSOPHILA
MSGTILENLSGRKLSILVATLLLCQVLCFLLGGLYAPLPAGHVTVLGSLCREDHARQNDTSFLLYSRGAGACIPVTREEVEQDSTKMANELVHVFQMPLPRDLRDLDYSRWQQNLIGVLQVEFGYDSSSELREPPRELQLTIDMRLAYRNKGDPDNGWKLYAHGVEHRYLDCVTSHVGPTETLYSCDMIPLFELGALHHSFYLLNLRFPLDTPSQMNLQFGHMHDLTLTAIHQNGGFTQIWLLLKTMLFPFVVGIMIWFWRRVHLLQRSPALLEYMLIYLGAALTFLNLPLEYLSLVYEMPYMLLLSDIRQGIFYAMLLTFWLVFAGEHMLIQDAPNKSTIRSRYWKHLSAVVVGCISLFVFDICERGVQLRNPFYSIWTTPLGAKVAMTFIVLAGVSAAIYFLFLCYMIWKVFRNIGDKRTSLPSMSQARRLHYEGLIYRFKFLMLATLVCAALTVAGFIMGQMAEGQWDWNDNVAIQPTSAFLTGVYGMWNIYIFALLILYAPSHKQWPTMHHSDETTQSNENIVASAASEEIEFSHLPSDSNPSEISSLTSFTRKVAFD

SEQ ID NO: 13321 - DNA, 3291 bp, DROSOPHILA
aataaaatattgtaacattttgttgtaaacgaagaaagaaactcaaaagtgcaacaatttaaatatgaacccaaaacagaaaaaaaaacgactcttcatttgatgaactgcaatcccattacaattttaccaatccagagacacacattatattttactttcattttttgaagaaccatagacatagcattaattaactttagtaaagggctcctggaacaacaaccgaccacattaagtctaagtgaatgttggatgcgtgaggacttgcgctatattgaaatcttgccaacacctgaaagtcagaaccgcccgacgattggagtgatccgagtactggctccaagctaaatttgctatgcattttaaccattgtatcgaacatagacaaaccaaaaaaaaaaaaaaacaaatctgtaaacacgtccaaaacaaaagcgaggacgtggatgcacaagaatagatttcctgaaaataaagtggaaagtaatccagattctttggttgagcaattctattctagtgtaagcacctccttcaaaatcatacgatatcaaaaatacaatttgtagaatttaatgccaaaacaagcaaatacaaaatccaagttaactcttcaatcaagaacaattgtaacgtaaaaagattataaaataacttatttgtggcaatatatatttccaacgttttccccccaaaaatttccggcaataaattgatgtaccaagttttaaaactgattgtttatttctattgggtttaaaaacacttcatctcaacgtttatccacgaagagaaattataaaacggaagtatgttttatccgccttttttcacaattgtaaagaatacaacgcgggggtaaatttcttaataacaaaaaagttatactaaaattggctatctaagaattaataatatacacacagtagtggaaatattaatttatacaatttaatcagttttcaagattaccattatttgctagcctagttggtaactaaggtcttgaattgtccgaaagattgatgtattttcccttctgcagggaaattttcttgggcaggctgatgaactctcctccgttggtacatttcgtcggggattccgggaaatctgccttagcgtaaaagcttttcttgcggtatggcaactttcggcgatcgggttcaacccgtttcatggggtccagcgtcataaacttgccctccagaagacgtcgttcctgttgggtagacggcactttgcttttgaatccagaaaagaggccgtgggaactcatgtgcgacattaagcgcgcccacactcgataacttgaggtgcagtccttatatgggcactcataaaatcgctgctgcgtgaatttgactttatggctcctcgtgtgcctcctgtaggatccttggttagcgaaggacatgttgcactccacgcagatgaaatcggatacattgtgaacgctgttctcgtggcggataacgtcgaaatagcgtgggaatatctggttgcatctgaggcacagaaattccaaatcctttgcgccgcacatggtcttgttgtgtttcatcgtcttcatgtgctcatgtagttcgtgtagtttgtggaactctgaaccacaatcgcggcaatagtagaccggattcgggcggggtttacaagaatgcatgcgtatgtgggtcaggatttcgagcacatggccgcaacaggtgcacagcatccgagtggcttgggtcttgtccttgaagaacttggtgactgccaagccatcgcgtgacaatcccacgctgaagaaatccacggacgcggttttcaaagattcttcgactacgatctccatatgctcgtttttttccaatggatcttccttcactggctccgcgatatgctgatcgaaagaattctcctcatcattcttttccgtttctacctcttctttgtttgatgtcacctccaacttgatctgaaatgcagtggagtcgtctatttcgatgggcctccggtgaaactcgtcctgggccgtgccccacttctccagggattcgcttatgcgcaaagtctctccaaagcagggctcgcaaatgcagtaattttcccccaggatagcagcctaaaatacgtgggtttctttgcatttgacatccattggactcactttcagaacttacatcaattttgtaccaatcgaaaagtctttgcagcagtttattggccgatttgaatttgggcttctcgagatcgatctcaattgctcggttatccttgcatagtttgcaaatttccgcttctgtcattttgctgatattttcgaggaggtccaaaaaccaagttaataaaaggcaagtaatcaatgatttcttcgatgtctgctaatcgatactatcgatagatgtttaatttatcgatacaatgcagagctgcttaatgtcgataggcaattgaattaatcgatttttaatttacggacttagaaatttatgcaaatctaaaaataaattaattttgattgatttgaatagagatagttgttcagatttaggagttaggtgaacgatctgagatcgaagtgaattttctaaagatgccgcctgcatattgaacggtataaaagctttcaatgtacacaaatttgcctaacatttgctaagagaaccggaaaatattgtttaatatcataatcgaacaaaaaccaatttacaagtttagactgtagttttttcattacctaaaaaagtatttgtgtaattatttgaatgttcgaaacccaaaacaagaaaatacaaataattatgaaaaaagtaagaagttgactaattgcaatataaatttaaaaattaaaaaatgttgtagtgaatccaggataccaggaaactagttccattcgcctccgataacttccgagtatcgataggctctatcggccatcagaatcgcgatctagttcggttcgcgtgcagcagaacgcaaagtacaacaggatttttttcgttccgtgtgacgtgaaaagtgcaaatagtaattgttcgaattagtttaagcctagctaactaactaaataaatagccatggtaggtagttgttgattgactgagataaaatgctgacgcagtgagcggtgtcagtgtgtatgcatgtgagccgcgcgttaactggtgtgtgtgtttttgtcgtggcaatgtgtgcgtgttaaaaaaagcggccgccgcgtcacaatacaaaattgtgcttcgatttttcctaattgcatttcgatttctccctatttccgtctatttcccggatcagtcgtttgcg

SEQ ID NO: 13322 - DNA, 1233 bp, DROSOPHILA
atgacagaagcggaaatttgcaaactatgcaaggataaccgagcaattgagatcgatctcgagaagcccaaattcaaatcggccaataaactgctgcaaagacttttcgattggtacaaaattgatgctgctatcctgggggaaaattactgcatttgcgagccctgctttggagagactttgcgcataagcgaatccctggagaagtggggcacggcccaggacgagtttcaccggaggcccatcgaaatagacgactccactgcatttcagatcaagttggaggtgacatcaaacaaagaagaggtagaaacggaaaagaatgatgaggagaattctttcgatcagcatatcgcggagccagtgaaggaagatccattggaaaaaaacgagcatatggagatcgtagtcgaagaatctttgaaaaccgcgtccgtggatttcttcagcgtgggattgtcacgcgatggcttggcagtcaccaagttcttcaaggacaagacccaagccactcggatgctgtgcacctgttgcggccatgtgctcgaaatcctgacccacatacgcatgcattcttgtaaaccccgcccgaatccggtctactattgccgcgattgtggttcagagttccacaaactacacgaactacatgagcacatgaagacgatgaaacacaacaagaccatgtgcggcgcaaaggatttggaatttctgtgcctcagatgcaaccagatattcccacgctatttcgacgttatccgccacgagaacagcgttcacaatgtatccgatttcatctgcgtggagtgcaacatgtccttcgctaaccaaggatcctacaggaggcacacgaggagccataaagtcaaattcacgcagcagcgattttatgagtgcccatataaggactgcacctcaagttatcgagtgtgggcgcgcttaatgtcgcacatgagttcccacggcctcttttctggattcaaaagcaaagtgccgtctacccaacaggaacgacgtcttctggagggcaagtttatgacgctggaccccatgaaacgggttgaacccgatcgccgaaagttgccataccgcaagaaaagcttttacgctaaggcagatttcccggaatccccgacgaaatgtaccaacggaggagagttcatcagcctgcccaagaaaatttccctgcagaagggaaaatacatcaatctttcggacaattcaagaccttag

SEQ ID NO: 13323 - protein, 410 aa, DROSOPHILA
MTEAEICKLCKDNRAIEIDLEKPKFKSANKLLQRLFDWYKIDAAILGENYCICEPCFGETLRISESLEKWGTAQDEFHRRPIEIDDSTAFQIKLEVTSNKEEVETEKNDEENSFDQHIAEPVKEDPLEKNEHMEIVVEESLKTASVDFFSVGLSRDGLAVTKFFKDKTQATRMLCTCCGHVLEILTHIRMHSCKPRPNPVYYCRDCGSEFHKLHELHEHMKTMKHNKTMCGAKDLEFLCLRCNQIFPRYFDVIRHENSVHNVSDFICVECNMSFANQGSYRRHTRSHKVKFTQQRFYECPYKDCTSSYRVWARLMSHMSSHGLFSGFKSKVPSTQQERRLLEGKFMTLDPMKRVEPDRRKLPYRKKSFYAKADFPESPTKCTNGGEFISLPKKISLQKGKYINLSDNSRP

SEQ ID NO: 13324 - DNA, 4448 bp, DROSOPHILA
cctattcctatttttcttcattcttgttgtttttttttttgtgcaactgtttgcattgcttttgccaatgcaattgcaattgcaattgcaattgctcctgcactttgttttgcactcgccaatgtgtgtgtgttttttgcgaacttgttttgcaattgcgttttaaaataaattacatcagtcgtggagggggggggaaggggttggagataggggttgggggttggtcgtgggccgatgggagtgaagtggggcatttggtcgggatggggctaaaacaacattgtggcaacggacagcggtagccaatcggatgcggcgatctcacatttccgtataaattactcatgaactcggccggcggaaagcggatgcaatggggcgcaccgaaaataattaacccgaaaaagttcattagccaaatatccatttacaattgattacaaacagaagaacttccaaaaattaatattaaactttattaacaataacgaattaaaaaagaggagtttattttccaaagaactgcccaattaattgcagtgcatcgctttatgcaatcgcaagattggcgccaagcgaaacgaaccaaagcctcaccaaacagaacgtgatcattgcactcgaatccccgtttccaaacgccccctccccgaaacgccacccatgcaaaactgataattattgacagacggacaattgcaaggtggggagggggggggatgggggtaaggatttattttgttgtcatagtctagccggggcactatgtaatacttgcgactgcgtaacggccaaacaaatgcccagtcatcacatgtgcatgtacataagtatgtacgtatgtatgtacgaatgtacaaataaatgcgattatacggacacttacggacaagcgatgccgttcagcttttgagagtctgcagattattacgaaacatacgtaatgtacgcaatgaagtttcatacgattgcgaaatgttatgcaaacagaactgttatgcaaacagctgtccaaaagtatgcagtgccaaaaattcacagctgcatttcctttttttttcctacctcaacgaacacaatcatcacttatcgttgacaacagtgtacattgtgtattatttattatccattttttttttattatcatttttattatccacattattctgacattttagtctgagcatcatcgctggcattgctcaaaaaggttcaacaatattaaatgcatacttattttaagctgatgccgaaggggaaatcacaatacttcacctcttttgttacgatttcatttgggcgcttttaagcaaggctcttaatacagttttgaccttgttcgcgaatgccgggagtttcctaaccttaaagtgtatcatatcataatgaaatgacagttcctaaaaggttttgaaatgcttttacatgcgaaaaagcaagcaattaatcatcgaattgaaatataaacatatacttcattatttatttatttcagtggtcgagaggcgcgaaaccgagcggaaaagaatcggcgggacaaactgaacggatccatccaggaactatccacaatggtgccccacgtggcggagtcgccacgtcgagtggacaaaacagccgttctgcgctttgccgcccatgcattgcgattgaagcatggtaagctatatacatatctcgtatttatccaaatgcatagtaatactatataaaaaaaaaaaaaaaacaactccttcagcctttggcaacagtctgatgcagcagcgaccacagatcacggacaccctgatggacatgctggacagcttctttctcacactcacctgccatggccacatactgctgatctcggccagcattgaacagcatttgggccactgtcagtcggatttgtatggtcagagcattatgcagatcacgcatcccgaggaccagaacatgctcaaacagcagctgatccccaccgagttggagaacctcttcgatgcccatggcgattcggatgcggaaggtgagccccgccagcggagcaaagccgaggaggatgccatcgatcgcaagttgcgcgaggatagacgcagttttcgcgtgaggttggtccaaaatctaatcatagcttatcttatcacgcatcttatcaacctaatcttgatatgctgtgattgtctaatacccatgtttttttttttatgcagattggctcgtgctggtcccagatcggaacccaccgcctacgaagtggtcaagatcgatggctgctttcggcgtagtgacgaagcgccacgcggcgtacgctccaatcatttcagctccaatctgcagttaatcaggcggacacgcggtcgtgacgatgtcattccactgcacaccattagcggcaatgatatcgtaagttgatctttaaattattgatataagatcctttcgaatgatgtcatatcgtatgttgcaagtactaccgtactgaaactattcgacatcatcacaagttgaagccaccataatcctttctccatgattcgtttagattctgactggctgcgcccggataatccgtccgccgaagatcgccagtcggctgatcgatgccaatacactggagtacaaaacccgccacttgattgacggcaggatcatcgactgcgaccagagaattggtatcgtggccggctacatgacggatgaggtgcgcaatctcagtcccttcaccttcatgcacaacgacgatgtgcgctgggtgatcgtggccctgcgtcaaagtgagtgttcctaacatagtccagcatatcgtatgtaacccaatgccatcatccatttggcatctttcagtgtacgactgcaatagttcatatggcgagtccacttaccggctattcacccgcaacgggaacatcatctacctgcaatcgaagggctatctggagatcgacaaggagacgaacaaggtgcactcctttgtctgtgtgaacacgctgcttggcgaggaggagggcaagcggcgggtgcaggagatgaagaagaagttctcggtaattatcaacacacagataccgcagtcgaccatcgatgtgcccgcctccgagcatccggctctgctggagaaggccgtgctgcggctcatccagaatctgcagaagtctggcgagaatggtggccacgatgacggcgacgaggacgatgatgcgcaggatggcgacgacgacgaggaggatgatgatgacgatcaggacgatggcgcgcgcagcatgtccgaattcggtgatccctatggcagtcatcacggccgatcgcatcatggttcctccgctctatcctcacacgggcatggtaacgccaaaaccccacccctggcactggttccgccggaagcgtcctctgtcaaatcggcgattacgaagagtatcagtgtggtcaacgttacggcggccaaacatttgcgtggtatccacgcatcgacggcagtcaaatcgcccagctccttgggcagctgcacctgcagcgattcgcattcgccttgcgacttctgccagggtgcacccacgaccgatctccaggcggttgggtccaatctgaagaggggcagcactgctcacgtggaaaccgaagagaagctgtccaagcggcgttttatacccagcactggtgagttgaaattgatttagcaacttgatttactattgctggatattttaataatgccaatgtttgttcgaatgtttaaatattcaaatattgaactatttgccggcagaaatcgagcatgtgctgcacacatctttggaccaaatcgggcgtaatcttacccagcagctcaatgtggccaggaatttgcgggaacagagtcagcgatacgagttgccccatgccaatcagcgattcgatgagatcatggtaagctattggcattcaattacagcgagaatcttgaaatgaaattacaagcaaatgaaatataggagagagattggaaatcacacagtttgtgattgatgctgaccgtattttcgtgacccttttgcagcaggagcaccagaagcagagtgaactgtatgtgaacatcaagagcgagtacgaggtgcagctgcagcataaggcaagcacccggaagtcatcggattcggatcggaatcaggagcagccgccgccgccgcttcaggaggacgaccaggactagagtgatggagagcgcccgatcgggtctcgactgaagggtttcatcgatgtgatatgtaactactgtcctggcagtcagctcaagccccaacatacaaagtgtccctaattcgtaccaaccaatagaaccaataattcagggttacttctcgttcggtcaactgatgggtaactgctgcggtacagtttaggtacagatacagatacggatagataacctttaaccccaacttatgagtgagcctgagacaagcatactttagataccctgc

SEQ ID NO: 13325 - DNA, 2070 bp, DROSOPHILA
atgcaaacagctgtccaaaatggtcgagaggcgcgaaaccgagcggaaaagaatcggcgggacaaactgaacggatccatccaggaactatccacaatggtgccccacgtggcggagtcgccacgtcgagtggacaaaacagccgttctgcgctttgccgcccatgcattgcgattgaagcatgcctttggcaacagtctgatgcagcagcgaccacagatcacggacaccctgatggacatgctggacagcttctttctcacactcacctgccatggccacatactgctgatctcggccagcattgaacagcatttgggccactgtcagtcggatttgtatggtcagagcattatgcagatcacgcatcccgaggaccagaacatgctcaaacagcagctgatccccaccgagttggagaacctcttcgatgcccatggcgattcggatgcggaaggtgagccccgccagcggagcaaagccgaggaggatgccatcgatcgcaagttgcgcgaggatagacgcagttttcgcgtgagattggctcgtgctggtcccagatcggaacccaccgcctacgaagtggtcaagatcgatggctgctttcggcgtagtgacgaagcgccacgcggcgtacgctccaatcatttcagctccaatctgcagttaatcaggcggacacgcggtcgtgacgatgtcattccactgcacaccattagcggcaatgatatcattctgactggctgcgcccggataatccgtccgccgaagatcgccagtcggctgatcgatgccaatacactggagtacaaaacccgccacttgattgacggcaggatcatcgactgcgaccagagaattggtatcgtggccggctacatgacggatgaggtgcgcaatctcagtcccttcaccttcatgcacaacgacgatgtgcgctgggtgatcgtggccctgcgtcaaatgtacgactgcaatagttcatatggcgagtccacttaccggctattcacccgcaacgggaacatcatctacctgcaatcgaagggctatctggagatcgacaaggagacgaacaaggtgcactcctttgtctgtgtgaacacgctgcttggcgaggaggagggcaagcggcgggtgcaggagatgaagaagaagttctcggtaattatcaacacacagataccgcagtcgaccatcgatgtgcccgcctccgagcatccggctctgctggagaaggccgtgctgcggctcatccagaatctgcagaagtctggcgagaatggtggccacgatgacggcgacgaggacgatgatgcgcaggatggcgacgacgacgaggaggatgatgatgacgatcaggacgatggcgcgcgcagcatgtccgaattcggtgatccctatggcagtcatcacggccgatcgcatcatggttcctccgctctatcctcacacgggcatggtaacgccaaaaccccacccctggcactggttccgccggaagcgtcctctgtcaaatcggcgattacgaagagtatcagtgtggtcaacgttacggcggccaaacatttgcgtggtatccacgcatcgacggcagtcaaatcgcccagctccttgggcagctgcacctgcagcgattcgcattcgccttgcgacttctgccagggtgcacccacgaccgatctccaggcggttgggtccaatctgaagaggggcagcactgctcacgtggaaaccgaagagaagctgtccaagcggcgttttatacccagcactgaaatcgagcatgtgctgcacacatctttggaccaaatcgggcgtaatcttacccagcagctcaatgtggccaggaatttgcgggaacagagtcagcgatacgagttgccccatgccaatcagcgattcgatgagatcatgcaggagcaccagaagcagagtgaactgtatgtgaacatcaagagcgagtacgaggtgcagctgcagcataaggcaagcacccggaagtcatcggattcggatcggaatcaggagcagccgccgccgccgcttcaggaggacgaccaggactag

SEQ ID NO: 13326 - protein, 689 aa, DROSOPHILA
MQTAVQNGREARNRAEKNRRDKLNGSIQELSTMVPHVAESPRRVDKTAVLRFAAHALRLKHAFGNSLMQQRPQITDTLMDMLDSFFLTLTCHGHILLISASIEQHLGHCQSDLYGQSIMQITHPEDQNMLKQQLIPTELENLFDAHGDSDAEGEPRQRSKAEEDAIDRKLREDRRSFRVRLARAGPRSEPTAYEVVKIDGCFRRSDEAPRGVRSNHFSSNLQLIRRTRGRDDVIPLHTISGNDIILTGCARIIRPPKIASRLIDANTLEYKTRHLIDGRIIDCDQRIGIVAGYMTDEVRNLSPFTFMHNDDVRWVIVALRQMYDCNSSYGESTYRLFTRNGNIIYLQSKGYLEIDKETNKVHSFVCVNTLLGEEEGKRRVQEMKKKFSVIINTQIPQSTIDVPASEHPALLEKAVLRLIQNLQKSGENGGHDDGDEDDDAQDGDDDEEDDDDDQDDGARSMSEFGDPYGSHHGRSHHGSSALSSHGHGNAKTPPLALVPPEASSVKSAITKSISVVNVTAAKHLRGIHASTAVKSPSSLGSCTCSDSHSPCDFCQGAPTTDLQAVGSNLKRGSTAHVETEEKLSKRRFIPSTEIEHVLHTSLDQIGRNLTQQLNVARNLREQSQRYELPHANQRFDEIMQEHQKQSELYVNIKSEYEVQLQHKASTRKSSDSDRNQEQPPPPLQEDDQD

SEQ ID NO: 13327 - DNA, 9758 bp, DROSOPHILA
ctggctctccaccttttcgcgaacatctaggagcaagcggccactctgcaccaacgacaactcctcacacatcctgtagaggctcttcaacagaggatggacatgcagcgtgatcccagcgatatgcggcaagtagtgcattcgcagctcctgccagcagaaacccagtctccggagcaccttgcgggccccaataatgcacagggcctccacgagatgtcttctccaggtttctggccgggacttggcgaactttatgagtagatcactttgcgggaagtctgatcgtgtcatggccaaaagtttctgcagaatgtaggtggcatccgagtggtcgtcgccataaagcagaaagcagaggcccacctagaagaaaacgaaggttctactgtttaattaacactttggtctagcggatgtgtaaaacatttgagtcatattcgaaaagtcctcccagggaggtgccataccttttgggcaaagttcatgtcacgttccacgtagatcagatcgttctgatcgatggtgtctagatgaatcaacaggtttgatccggccatggcgatcgggaatatacaaaaatgtttcactttaggaaatggccgataaattgcactcgctgacatccgatagccgtggcctgaagagcttccaccgatcgatatcgataaatggatatgttttctgcaatagcgaaagatcggggtgctacctattaattatacttaagaaacagatgatgtagttttttgatatagaagtttaacaaccggttcaacaatcggttaatatttaaaaatgtcgcagccagcgagcctttagctttaaaagtaagcttgcgttcacggtttttggggaaataccaaatatactaggtaaaaacatcgattaactaatatcatccaacacgacgatatgttctttgcgaaaaatatcgatgtactggtatttttatgtttccacacctctagttcgtttaagtcgatctgttgaactgttaacaacacaactcctgaatattatgttttggacgaaaagttttattaatttaatgtttttgtatattgtattctgtccatgagcgtaacagagacagacagagagaaagggacagatactgagatacggggccctcaggcagagaaagagggcgaaagcaagctacaagcgggtgcgagcgagagcgcgcgcttgcctcacgcacatatatataaatctgtacatacatatagtatcagaagaaaaaactaaagccgctattcgatttacgaaaactggcgaaaaattcgacgatttgtctcgtacctatctatgtacctcacaaccacttcgtcatcaaatacgtataagtcagatgtatgtcaaacatatatatacatatgcatgtatatacacatctatgtgaggccactgctatatcccatacatgtatgcctctatatatatgtatatatttatccacctactgtaccacttccacattatgtaagcagcgacgcaaacaaaacactaaagcagaaaatccgaaaagcaaaatgcgaaatgcaaaacaacgaaccaacaaaatcccatctataaaccgaaaaccgaacagcaatgttataacaaataccgaaaagttgttaatgttccacaaaaaagcataaagcagtcacgctaagagagtaagatcgaacaaatgaaatgtttgtatggcataagtagttcccagatttttgtatgtacttcaatgcatatgcatgtgtgcgtatgcatgtatgtatgtatgtttctcggggccatgtctccccacgcccacgtacgtgggtgctagaaagggacagatggtgcaaattttttaaattgcatacacttgattttggaacgccagccaaacaaaaagataaattgcgtgcttttcttttgctgttcgtatgtacgtacatatgcaagtggaaactgcgcagcagggaagccacacgcatgaacgccttccatttacagagcattcaaacaaatcgtaccgaaaaccaaacaaaaactttcacctcaagtgtaacaattatattcaaattcgctttgaagtcgctgtaaaatatatgtatgtatgtataaacaaagacaaaaacattttgcctcgcagtcgacacacacacgcgcactcgcactgcacgcctcggctgtgtgtgtgtatgccctgcttagatcatgagtgtgcgagcgagtcgacatgcttggcaatcgcgagtcagaactaaacacgcgctctatatgcacgtgtgtgagacgcattggattttgttattttcatcaatcgcaatgattccgtccatcagctacatccaaatatatacacgcatccgcgccatatgtacaatgctacgagcatttacatacacatgtacatatgcgcgtgtggctcataacggttcactccgcttacgcacaataataaaggcaaacgcctacgacttccccattgttcctaggctcaatggaaagccactccgttgctttcgactttcgcttttcggattctggaatttgtttcgctgtccaaaactacgtataactgaatctttatgttaagccaattgtaaaaagtgtattttcctttctcgttctctccacacaacaaatgtgctagcgcaactttgttgatcacttttattttatactggaagcatgtccaggacccataccctttaattcatcaaactgatttgcttattattttgttgctgcactttggaactagctaagtgccaggctaaacctaagcgatccgatcccacttaaaccaaccaacaaagagcaatccaaccattgtcagcgaaaagtgctcaaactttccgagtgctgagataaggaagggtgcccaaaacattcatcgcagccatgctgcccacgctacaaagtgactctgactgaatgcatcaggatcgtatgatccgggtggtctatcttaagtcaatagtttctgtcgctagtacttggacgtgccttctgaatccgtagtcatttgtgataccagccattttatattgtatttacctcaaaaacattaatgtagcatttattcaagcaacgcttgattttagtgttaaccaattcctttcatttgtgttcaaaattttgaccgccaatggggtgattcaaataatccccgaatgattttggaaaaaaagaataaggggcattaaactacatttattaattcgtttttattcacttagaagcgtattatggtacattccacctttttagttaatactagcagttgctttattttaagataccattttatattgtaattggacgttaagacaaattataagacgtccttatatatgattagattgggaatttgaccttaaaacatatttatgcatccatatatggtattcaaaatccgatcccttatcaacagcttttccaaataccaaacacttaagagtgcagcaacagaagagggaggccactttttttaagggcaccaattattccaatctcatcctgtgagagattagctgccaaatcgataatgtctgtcgctttagcggatgaacccttaattgacttggaggaggatttagaggacggcgagatcgacgacgatgaggaggacgagcagcaatcttcaaaaatccaagtccaaaagaagactttcgtaggggacgacgatgtgcagtttgtgggtgtcgaggctaagaaccaaaatgacgacgaagatgtcgtttacgtgggaccatcgacagatgccgtttgcctccaaaacagcaacagcaccaagtcaaaaaagcctcgcccattagaaggtgaaagctcattcagttgtttcattgattcttcttgtttaatctggatgtattccctagatgaccatgctagcagcattgagttggcgattgccaatgccctcaagaagaagggcatagagcccccaatgccccgcatgcgttcgtctaaccaggatacgagcgatcagtctttggagggatccggggagggactggctaccgccaatccccttcttcagtcaactcgcagcagcaggcgaaggaaacgcaagaaagaacgtgagcgcgagcagaagaaagacaaggagcagcaggtgaggccatcacattatgtccaaatgcaactattagatacccattagctgacaaatgcagtatacccttctgctccaggagcaagatttatatagttgtagctagccttcgattggcacttatgaaatgatttttaccatatttacctttttaaatagaacattgatcttgggtgttacatggaagcggttaacccagccagcgtgaccaagttccacgaccaattgttttgtgttccgacccaactccgcgcttctcctgcacttaatttatcattagccatcgggattagtattgcatggctcgttcagcttgtttcaacacattgggtcagtgtacaaggcagggccaagtatagggatcttaggccaagtatagggaataggagcagaaaattaaatctgatatgacattacagtacagtattctttatatcagtaccgcgaacgcagcaaatatccatgtggaatgtaacacgtctgctgttcttataggggataccgagactttgctggggttcctcgccaggatgtccatcccgtgaattctagaattatattttgtggtttaagtatgtacgccgctttgttatccccgcagaaagtttcattaagggattttagtaatagttaaaaaggttatatgaacacacacatgttttcttattgaaactcctattgactttatcttaatcctttccagaaccgttcccgacgtgacgagaacgacgtgtctgtggtgccaggcggcgttgaggacatggacgaatatgagatgatgaacgtacgtggcggcagcccgccaccaggaggagcggcaccacccctttccagctgcggtcagcggtttagtggtgccgattgggacatggacgacgggtcagccgcaaccggagcagctggtcttggagcgggaggcggagggggttacaactcacacagcagctatgattcctactccgatgaggagacaaatgggcccgggctaatgaatcaacgccgtcggacccgaagggataacgaaaaggagcaccagcgtggcgtgaataatcgcaagcgcagggatcgcgatcgccttgaaggcgggttagcgggaagcggctccaagcgaaatcgccgtgattctggcgaaggaggcggcggtggacaggaaaagatgggcggcagcaatcgcgttgagccccgcaagctggagctgtgcaagttctatctaatggactgctgtgccaagcgggacaagtgctcctacatgcacaaagagtttccctgtaagtactactacctggggatggattgctatgcaggcgacgattgcctcttttaccacggcgaaccgctgtccgagcagctccgcaacgttctgctgaaacacatggagacggctccgaaggagatccttggtgatttcaagcgaatatccagagacattgccattgtgcagatgacacggcggcacgagcagctgtgcgaccaattgaatcgggagaacacgtggaattcgattggctgcggcttaatgggcaagcggcaggaccatcaaatgcaacaacagcagcaacagcttcagcatcaacagcttcagcagcagcaggagcaacagcagacgcaacagcaggcggctgcggatggcggcggctgcattccttcacttttggacatggtcatcaatccaccactttcagaaaataagcgcaagtcccgctggaccgaaaagatgggtgccaaggcagcagctggagcagcaggttcttcagaaagggatagcacatcgccggacgccaagccactaccaccacacttggacttggctaatctcagtcacgtcttaagtgctgaaaacatggccaagctaaataagttgggtattacgaatctggagcagatgcttcaagtgccgtttggccagttgaccgaggctggcctaactctggtcgagatcggtgagattcagcgcaaagccgaggacgccaagccgcaaacccaagctgaattggaaagcaggtgagctaatcaatgcaaaacaaattacaatttccttattttaatatatatgttcactagcactcctccttcaaagcgggaaacggaggccaacaatagtaactcgaagagcaacggactcatcatggtggactacacgcagtacctcaaggatgcacatgtcagcttttcgggtaacgatccgcgtgagtagatggcaccatttgaacttaatctatttcttttcattctcttcacggcgttatgaataattttattaacttgcgaatttcattccagtggacgacgatcgggatgacgacgaacaactgatcatagacgatggcaacgattccaccgccgaagaggaccagcaacctaagaaagccaaggcaccgccagccgccacccatgaatcaagcacagaggaggcacccttgccttctgttttcgacttgccgagcttcatgaacaacatgctgggtcagggatcctcagcgaggcagttgctgcccgcaagtgccacttcgcccaatcaggagaatgcgcatttgcctggaggagatcaatcgacacataaatccgcgcccatcggcggaggcacctcaaccaacgtgcttggccggattctgttcggcgacaaacaatctgaccccgaggctagagcagctttctatcgcgacataatacgcaatcccttcaaggctcacagtggcgatggcgacgtggactccagcaatgagaactcaaattccaattcgcattccctgacgccaactcccacgccagagccgggatcccaatcccccaagccggaggaccacgatcaggatatgccggaattgcctgtcattgcaccagcgttgccgccgacaactccttcgctctatgtacgtcgttccatgtatgacttcgatcccgtcaaagagcaagagcacgggcgacaggagcttcttacggaggagaaggaacagtaccagcgtgataccgacatgcgactgccgttcgagccgatgaaacactatatgcctgccaccgagatcgacgcggcgatcttctcgcacactccgatacgctggcagctgcatgaagtaaccatagaggagagcagctatgctcagattagggccagtgctctgcacaaggagcagcgggagctacgcgatcctcgaatgcgtcggattctcggccttccggaaacgcctgataacagtggacccttgggctccgtgcccattatgggcccaagctccttttcggtcgacaacattgcgcgttgcgctacgaccatcgcttccccagatttggagaccgccgttcgtgattccacccccagttcaccgcccccgtccgtggtaaacctaccgtcaatgagtgtgccaccgccgtcgatgagggtaccacctccgaacatacaggtggaaaagccaactgtgcggacagatccacgtcgcgatcccaggagagccgttctgcaggctccaactaaaggtgctagtacggcaaacaccacagcacccaatgcctctggtggcagcaagcaaatctcggaaatccgaagcctgctgcaggtttccaactggtacaacaatctcggcaccaacaataagattatggtgaaccaacagctcgccctggtctttaccgagctcaagaagttccatcagctgccgaatgatgctccgaaaattttcgatgtcagctttatagtgaacaacacaacgttgcagcagatctttgccaagctctttatctttgtagatgacaatggcgaggtggtgcagattcccgaggagcccaacggtaatggtgctgctcttggtggcggcggagattctggaggcggagtaggaggaggaggaggaggaggaggagtagtgcttcccaatctatcgcaacccccaccaaatctgagccaaatgttaaggctaccgccaccgaacatacgaatgcttcgcatgtcgggaatgatgatgcaaatgggcaacgtgggaccccctttcaatcagccaccgccacgcggaggattgatgggaatgcctccgaatggcaatggattaaaccagggcgttggcaatctgggaggacttggccagttggggataaaccaaggaggaggacctgtgcccaatggcaatcccttcaacccatttggtgggaacaatgggggaggagctggcgtcatgaacaacatgaattcaatgggcaacatgggcatgggcttcaataacttcaacaataatggcggcagaggagggcactttccgggcggaggatcaggcggaaacggcaacggaaacaatcgcaaccagcgaggcggcaaccaccgaaaccgcaacatttaaaggcccatgcgttgcgaaaacacaaacgcaaaaggagcccttttgccccaatgatcttaaagcgatgctatgccacatgaccctttcccccaaccataccatacgtcgtggaaaactcgtggttttccgcgcaccttccccgaaaatccaggcatgactccttgtaaatgtattttattcccgaatccccattattgtcactatttttttcgctaggtgtaaggatcttattagctatacgagtagtaaagagtaaataacaaaacaatccggagtaagaacgaaaagtgaagcagaatggtatgcgcagccctttttaacaaacttttttaaattatataggataatttgttcaatagcgcgagtactacattgattaactagacgtacgaactcaaaataaatgacatcttttaagtaatgtgccatgcttaggttgctgggccgtcccggaggagcagaaagaaatgaatagctcttgaaagcgtgcgaaactacacctaaactctttagaaagcttttgcgtacttatcgatgctaaattctgaattggcttctcgaccatttttaatttagttcctacaaggtatatgtttacgtttacgcttaaattatgacatcttctgcgaattcgaactaaaaatagcagtatagcgcaattctaccttatatacacacttgccatcgaatctaatgtactaataatataaacggtcgaagaaataccggtggagattccatattcaatttctcgccagtggcgttttgttagatttccctatcaatttcgttggtaaaagaacgttgaccgttgaacgtttttgaattcctaaaaaaaccagggctgcattagtcagagcacagttggctacctggcagcccccgccgatccggtctggcaacactggtttaacaaaaacatactacacaaattacgttgttttgcatagcagaacaagcacattgaagcatttattgttttaaaaatcactacgacctgaataagggcatggattagccatgtcaaccgacgccgacctaaacaagtgcgtcagtcccatgtaccaggtgtcaaccgcaggcgacggcctccaagcagaagccgctggagatctggcgttggcctccattgtcgcagctccctcctattcctgcgagccacagaaggactccaccgacatggacgtggacatggagatagacaacgatcttaccactagcgaacggatgccaacggtggccgaacgttcaacggtcaacgttcttttaccaacgaaattgatagggaaatctaacaaaacgccactggcgagaaattgaatatggaatctccaccggta

SEQ ID NO: 13328 - DNA, 4788 bp, DROSOPHILA
acaacacaactcctgaatattatgttttggacgaaaagttttattaatttaatgtttttgtatattgtattctgtccatgagcgtaacagagacagacagagagaaagggacagatactgagatacggggccctcaggcagagaaagagggcgaaagcaagctacaagcgggtgcgagcgagagcgcgcgcttgcctcacgcacatatatataaatctgtacatacatatagtatcagaagaaaaaactaaagccgctattcgatttacgaaaactggcgaaaaattcgacgatttgtctcgtacctatctatgtacctcacaaccacttcgtcatcaaatacgtataagtcagatcttttccaaataccaaacacttaagagtgcagcaacagaagagggaggccactttttttaagggcaccaattattccaatctcatcctgtgagagattagctgccaaatcgataatgtctgtcgctttagcggatgaacccttaattgacttggaggaggatttagaggacggcgagatcgacgacgatgaggaggacgagcagcaatcttcaaaaatccaagtccaaaagaagactttcgtaggggacgacgatgtgcagtttgtgggtgtcgaggctaagaaccaaaatgacgacgaagatgtcgtttacgtgggaccatcgacagatgccgtttgcctccaaaacagcaacagcaccaagtcaaaaaagcctcgcccattagaagatgaccatgctagcagcattgagttggcgattgccaatgccctcaagaagaagggcatagagcccccaatgccccgcatgcgttcgtctaaccaggatacgagcgatcagtctttggagggatccggggagggactggctaccgccaatccccttcttcagtcaactcgcagcagcaggcgaaggaaacgcaagaaagaacgtgagcgcgagcagaagaaagacaaggagcagcagaaccgttcccgacgtgacgagaacgacgtgtctgtggtgccaggcggcgttgaggacatggacgaatatgagatgatgaacgtacgtggcggcagcccgccaccaggaggagcggcaccacccctttccagctgcggtcagcggtttagtggtgccgattgggacatggacgacgggtcagccgcaaccggagcagctggtcttggagcgggaggcggagggggttacaactcacacagcagctatgattcctactccgatgaggagacaaatgggcccgggctaatgaatcaacgccgtcggacccgaagggataacgaaaaggagcaccagcgtggcgtgaataatcgcaagcgcagggatcgcgatcgccttgaaggcgggttagcgggaagcggctccaagcgaaatcgccgtgattctggcgaaggaggcggcggtggacaggaaaagatgggcggcagcaatcgcgttgagccccgcaagctggagctgtgcaagttctatctaatggactgctgtgccaagcgggacaagtgctcctacatgcacaaagagtttccctgtaagtactactacctggggatggattgctatgcaggcgacgattgcctcttttaccacggcgaaccgctgtccgagcagctccgcaacgttctgctgaaacacatggagacggctccgaaggagatccttggtgatttcaagcgaatatccagagacattgccattgtgcagatgacacggcggcacgagcagctgtgcgaccaattgaatcgggagaacacgtggaattcgattggctgcggcttaatgggcaagcggcaggaccatcaaatgcaacaacagcagcaacagcttcagcatcaacagcttcagcagcagcaggagcaacagcagacgcaacagcaggcggctgcggatggcggcggctgcattccttcacttttggacatggtcatcaatccaccactttcagaaaataagcgcaagtcccgctggaccgaaaagatgggtgccaaggcagcagctggagcagcaggttcttcagaaagggatagcacatcgccggacgccaagccactaccaccacacttggacttggctaatctcagtcacgtcttaagtgctgaaaacatggccaagctaaataagttgggtattacgaatctggagcagatgcttcaagtgccgtttggccagttgaccgaggctggcctaactctggtcgagatcggtgagattcagcgcaaagccgaggacgccaagccgcaaacccaagctgaattggaaagcagcactcctccttcaaagcgggaaacggaggccaacaatagtaactcgaagagcaacggactcatcatggtggactacacgcagtacctcaaggatgcacatgtcagcttttcgggtaacgatccgctggacgacgatcgggatgacgacgaacaactgatcatagacgatggcaacgattccaccgccgaagaggaccagcaacctaagaaagccaaggcaccgccagccgccacccatgaatcaagcacagaggaggcacccttgccttctgttttcgacttgccgagcttcatgaacaacatgctgggtcagggatcctcagcgaggcagttgctgcccgcaagtgccacttcgcccaatcaggagaatgcgcatttgcctggaggagatcaatcgacacataaatccgcgcccatcggcggaggcacctcaaccaacgtgcttggccggattctgttcggcgacaaacaatctgaccccgaggctagagcagctttctatcgcgacataatacgcaatcccttcaaggctcacagtggcgatggcgacgtggactccagcaatgagaactcaaattccaattcgcattccctgacgccaactcccacgccagagccgggatcccaatcccccaagccggaggaccacgatcaggatatgccggaattgcctgtcattgcaccagcgttgccgccgacaactccttcgctctatgtacgtcgttccatgtatgacttcgatcccgtcaaagagcaagagcacgggcgacaggagcttcttacggaggagaaggaacagtaccagcgtgataccgacatgcgactgccgttcgagccgatgaaacactatatgcctgccaccgagatcgacgcggcgatcttctcgcacactccgatacgctggcagctgcatgaagtaaccatagaggagagcagctatgctcagattagggccagtgctctgcacaaggagcagcgggagctacgcgatcctcgaatgcgtcggattctcggccttccggaaacgcctgataacagtggacccttgggctccgtgcccattatgggcccaagctccttttcggtcgacaacattgcgcgttgcgctacgaccatcgcttccccagatttggagaccgccgttcgtgattccacccccagttcaccgcccccgtccgtggtaaacctaccgtcaatgagtgtgccaccgccgtcgatgagggtaccacctccgaacatacaggtggaaaagccaactgtgcggacagatccacgtcgcgatcccaggagagccgttctgcaggctccaactaaaggtgctagtacggcaaacaccacagcacccaatgcctctggtggcagcaagcaaatctcggaaatccgaagcctgctgcaggtttccaactggtacaacaatctcggcaccaacaataagattatggtgaaccaacagctcgccctggtctttaccgagctcaagaagttccatcagctgccgaatgatgctccgaaaattttcgatgtcagctttatagtgaacaacacaacgttgcagcagatctttgccaagctctttatctttgtagatgacaatggcgaggtggtgcagattcccgaggagcccaacggtaatggtgctgctcttggtggcggcggagattctggaggcggagtaggaggaggaggaggaggaggaggagtagtgcttcccaatctatcgcaacccccaccaaatctgagccaaatgttaaggctaccgccaccgaacatacgaatgcttcgcatgtcgggaatgatgatgcaaatgggcaacgtgggaccccctttcaatcagccaccgccacgcggaggattgatgggaatgcctccgaatggcaatggattaaaccagggcgttggcaatctgggaggacttggccagttggggataaaccaaggaggaggacctgtgcccaatggcaatcccttcaacccatttggtgggaacaatgggggaggagctggcgtcatgaacaacatgaattcaatgggcaacatgggcatgggcttcaataacttcaacaataatggcggcagaggagggcactttccgggcggaggatcaggcggaaacggcaacggaaacaatcgcaaccagcgaggcggcaaccaccgaaaccgcaacatttaaaggcccatgcgttgcgaaaacacaaacgcaaaaggagcccttttgccccaatgatcttaaagcgatgctatgccacatgaccctttcccccaaccataccatacgtcgtggaaaactcgtggttttccgcgcaccttccccgaaaatccaggcatgactccttgtaaatgtattttattcccgaatccccattattgtcactatttttttcgctaggtgtaaggatcttattagctatacgagtagtaaagagtaaataacaaaacaatccggagtaagaacgaaaagtgaagcagaatggtatgcgcagccctttttaacaaacttttttaaattatat

SEQ ID NO: 13329 - protein, 1325 aa, DROSOPHILA
MSVALADEPLIDLEEDLEDGEIDDDEEDEQQSSKIQVQKKTFVGDDDVQFVGVEAKNQNDDEDVVYVGPSTDAVCLQNSNSTKSKKPRPLEDDHASSIELAIANALKKKGIEPPMPRMRSSNQDTSDQSLEGSGEGLATANPLLQSTRSSRRRKRKKEREREQKKDKEQQNRSRRDENDVSVVPGGVEDMDEYEMMNVRGGSPPPGGAAPPLSSCGQRFSGADWDMDDGSAATGAAGLGAGGGGGYNSHSSYDSYSDEETNGPGLMNQRRRTRRDNEKEHQRGVNNRKRRDRDRLEGGLAGSGSKRNRRDSGEGGGGGQEKMGGSNRVEPRKLELCKFYLMDCCAKRDKCSYMHKEFPCKYYYLGMDCYAGDDCLFYHGEPLSEQLRNVLLKHMETAPKEILGDFKRISRDIAIVQMTRRHEQLCDQLNRENTWNSIGCGLMGKRQDHQMQQQQQQLQHQQLQQQQEQQQTQQQAAADGGGCIPSLLDMVINPPLSENKRKSRWTEKMGAKAAAGAAGSSERDSTSPDAKPLPPHLDLANLSHVLSAENMAKLNKLGITNLEQMLQVPFGQLTEAGLTLVEIGEIQRKAEDAKPQTQAELESSTPPSKRETEANNSNSKSNGLIMVDYTQYLKDAHVSFSGNDPLDDDRDDDEQLIIDDGNDSTAEEDQQPKKAKAPPAATHESSTEEAPLPSVFDLPSFMNNMLGQGSSARQLLPASATSPNQENAHLPGGDQSTHKSAPIGGGTSTNVLGRILFGDKQSDPEARAAFYRDIIRNPFKAHSGDGDVDSSNENSNSNSHSLTPTPTPEPGSQSPKPEDHDQDMPELPVIAPALPPTTPSLYVRRSMYDFDPVKEQEHGRQELLTEEKEQYQRDTDMRLPFEPMKHYMPATEIDAAIFSHTPIRWQLHEVTIEESSYAQIRASALHKEQRELRDPRMRRILGLPETPDNSGPLGSVPIMGPSSFSVDNIARCATTIASPDLETAVRDSTPSSPPPSVVNLPSMSVPPPSMRVPPPNIQVEKPTVRTDPRRDPRRAVLQAPTKGASTANTTAPNASGGSKQISEIRSLLQVSNWYNNLGTNNKIMVNQQLALVFTELKKFHQLPNDAPKIFDVSFIVNNTTLQQIFAKLFIFVDDNGEVVQIPEEPNGNGAALGGGGDSGGGVGGGGGGGGVVLPNLSQPPPNLSQMLRLPPPNIRMLRMSGMMMQMGNVGPPFNQPPPRGGLMGMPPNGNGLNQGVGNLGGLGQLGINQGGGPVPNGNPFNPFGGNNGGGAGVMNNMNSMGNMGMGFNNFNNNGGRGGHFPGGGSGGNGNGNNRNQRGGNHRNRNI

SEQ ID NO: 13330 - DNA, 6780 bp, DROSOPHILA
cactttcaacatttgacttttaccgtgttttactccttctgagaaatgttagttaggaattaccataaaatgggacaacaacaggagcagcatcagcagcacaacaccggcacgtataagaacttgacaattttcaataaagggacttccgcaatacccctctccaatggctcacttattgggatcgccccaacccaactccaaatccattcgcgcacattcaacgacaaacttcgacattttaaacatttaggacattttatttttgtacataaagaacaggcaagaaaaaagtttggtcactttcgagcccaccccaaatgagagacataactgattttatatctatgcttgtcaatatccatgttttttgccgatttttttatatgatttgtacactcttataaataagttgtaaccttggtgtttgccttttgttgattgctagaagtttgaatatgaaaacgatgtataaaatatgatgtaccaattgacaatgatttgtttctttcgtttataagcaaaagtgtaatagaattaaattgtaacgttttaataaacataaagatgaaaaaccgagacttgtgcattttaaacttggcgccaattggccgataaatggttaatgcttttgtttgtttaccagcactaaggcacagctgactcgcaacgtcaacaaagagggaaatgcccattcttcgactactgggtaccccgtactaagttagctgctagtgaatcctgcataactaacaataaataactttattgcaaaaataagagcataaaccttatacaagtagtacgattaaattttgtaaatagacacaaaatataatgataaaaaaaatgattaggcaccgttttgaatggtaatgttagtgaattaactaaatataaaacaatatattgaaaagccctgacctctccaacaaggcagtgaaatgtcaacggcctcacttttttttaaaaacttgaaatcaaatctgaaaatagggatgagtacatttgattaatttccaaaaattgttgcaatcagttcaaatcaattgcaatacacaatgcacacaagtaacttataggggcggaagtgttttctgcagctggcgacaaacacagttgcgtgtacaatatacccgtgtattgggcaattaccgggtataaaaatatcaaagagtcgctgagccccgaagtgagtatatggccaaacacaacgcatttgttgttcaaagcgttcggaacgtggacggattgagctccgccgggtaagagttggtcgtcgtaaatgttatagctatgtgccgccgcttctaatcaaaatctaatgagtgtttcgatgtgtgggcgtggtatagtaaatcaaatctgcaacatctgatccaataatattatgggtgaattgcccgatatgtgttaacgtaagcaaaagtgagcgggatgcattataaactagtttggaacacgcacgcttggcgctctcacttttgctaccacgagcggcggtacaggcaagcctcctgagaacggaagcgctacgaagaaattcctacatccttattaaatatgcgccactataaatgaaccctggctgcaccaaaattgcattctttgaacgcatgcacctcttgctgtgttgtctgttttggttctaggtgtagattctttactggtgtgctgatttcacctgtgtcagcggtattttcttacctggctggttgacaaatgttttggggctaatgaaacgcgataaggttgatccgagtgctaacaacccgctgcagtgttaaaattaatcgtgcaattgtttatagctaaatggcacccgtttttttcttgcaggaaccgccttctccacatcaacagccttttgaaccacattcctgttgggattcgctttggcccagcttgctaactcacaatgaaatattttggcggagtcgaagggtatgtacatagaaaggtcaccaatcgatttgtaattcaatagccaaacgcgatgattaatggacgtgattaagcgcagggtgttataccctgatctggcagatatcagctgcgggaagtgcttcaaaatattccccagctttcgttgataagcccaacgatttaatgataacagtcaaaggtacagaatgtgttaagcctaggccttgatgaatttgaccagcttcgtctccggtatccgtttgtttcgcgtgatcagctcctggttgtccatgaatggtcgcagaacggcaggtatctcgatgccatcttccttctgataagattccagcaaggcaatcagcagacgcggaatagccgtcgcagttccgttgatggtgtgggcatggaggatctgtccgtcagcggagcgccggtatctgatgcccagccgccttgcctgataatccgtgcaattgctgcaacttgagatctcgccccacatctgacggcctggcatccaggcttctatgtcgtacttctggtacgccggagcgcccagctcgcaaggtggcatgtccagcagccgaaagttgaggcccagtcgacggaaaagatctacctcaatgttcttaaactcctccagctcggcctccgactgctcctcggtgcagatggcaaacatttccaccttgttgaactggtgtacacgataaatgcctttctcctcctgcagtcccgatgtttcagccctatagcatcgactcacggcggtcactttcagtggcagttggtcctccgacagtagtttattcgcaaagaatccagccagggccatttccgaagtgcccgataggcactcgccggtgtccagtttgtagacctgtgtgcgttcaccctcggtgcgcatgccacaagattcgatcacctccttaggcagtatgtccggcacggagatcagcttaaaaccgtgttcggtgactgcctgaagtgcatattgtatgatggcctgctccaaagttgccagctggccagtaaggtagtagcttttgtggccagtgtagttacccaagtgatccatgcggtagaggttaagagcacgggctaattcagagaactccttgagcctggactgtggcgtcaactgccggtggacatactgcgccagttcccgcggctcctctccgtagtctcgcaggcgcggatgcgtggcattgggcagctgttccagttccgcctgcagctgcctcaacttgtgctggtctcccgcatccaactcctggatgagagagcgtatcagtggcacgttgttcttgtggtggcgcacaaccacgttccgctccagttcgtccagctgggcactggttggaaccggtctgtgtattggggcctccaccgcctttgcgtcatgcgacctttggcggcgcagcagcagcagaggccgccaaagttgagaattcgtcggcaatttcattttaattaacaaacttctttgttgcacgccagcggtcgcgggttggggagcaatttcattcacttttaagcgaaaacattaaatgtttttgagcacaatttgataattatattcagcaaaaacgcacataacaaattgtaaaagccgctaacattctgttaactttcgattatttatcgaactttttcattatttgggctgataacgtaacgctcgctattaagtacgtaacaaaacttgagccctattttgaattgtccccaccgaggtatttttatgaccaaagtaaattgaaagaaaattaaaaatagttaagcggcgataacaaacgtcttttgttgtgcccattttgcatggactatcaaataattgcctcaattgagcgtattaagcaatgcactttcgtcacgtcacgtcttttcagtcggtggttgtctctgtgcattataacggtaatttcaagcttcttttatgggaacgtaactgtcttcatgcttctccaaattcatttctttgcattgttgaatgcagagaaacaattttaaacattatatcacgttatgttgttcaatttctgatatgaatgtgtataggttttaatcttgagttctgcgtaagataaggtaacaatcttcgccaacaaaaatgttgatctatatttctattagttccaagccgatccagtttttttcggtgtacttatggactcggttttattgggatctatgggttgtcgaatagaatttgtgcgtgtgacacgttttccctaaatgaatgtgtcaattgcgtgtttctttaacttcaattagccgccaccagatcggttaatttaatttgattcaatagcggtattgttcgcggtcacggcccctacgaccatacaacacctattgtataaccatgaacagagtccggaaattgaaagcatcttctttgtctcctgcagcggagccacccactccagactggtcatctgcgatgagagcggccaatctgtgggcgccaccagcggcctgggcaccaatcactggggcattggcattccggagtgcgcccgccggatcgctgacatggtggagcgggcgaaggaggaggcgggcattcccaaggagacgcccctcacaagtctgggattgagccttagcggctgcgagcaggtcagtgtcagtggttacaacgcaataactactttcaagaatcaaatattttaaataagttttaagcacatataaacatatctatccttacaggaggccaccaatcgcgagctggagcaggagctgcgcaccacgtttccgggcctggcccagaactatgccgtgtccagcgacaccatgggcagcatgtacaccgcctcgtccatcggaggaatggtccttatttcaggaaccggatccaattgcctgctgcgtaaccctgacggctccacgtccaattgtggcggctggggcaacttcctcggggacgagggaagcggtaagtggggaatgcccccatcgggtggtcttatcactaatggtctactaatgcctggcccaatgtcgagattaacggctgcatctccgattaagattgcctgatagcgttgattgccattgactcattgccgcttttgttgtggtttatttcgcaatcatcattctgacccccaactcttctattccacagcctggtacatctcgtatcgcgcagtcaaggtggtgttcgaccatatggacaactttgagcagtcagcggctcccgtggagaaaacttggagtctgatcaaggagcactttagtttggagacgcgcctggatatgctgccgcactgttacgccaagttcgacaagcccttcttcgccaatctgtgcaaaaagctgtcgcagaacgccgaaaatggagacgaactggcgcgcagcttgtttcgcgaagctggcgttcatctggccagaatgatccttgccctgctgcccaatgtgcaccaggatctggtcaagtccggggacctaagcgtagtgtgcgtaggatccgtgtggtccagctgggatctgctgcaggaggccttcatcagtgaactcgctaagacaaccatcgacttcgacctcaagctggtgcgcatcaccaagagcagtgcctacggagcctgctacctgggtgcggatagtgcggacttcgatcttccgagaaactatgccgacaacgtcacagtactgtacacgtacaccgatcctcgaaagaaagccaaagccaccaacggctgtaactgttagataaattgtgtttgacaacccattccgcaatacacttcccaattgccaaattcgcaatcaatattccagttagtggtacggataggtagtattatagcttatcaaaaaataaataattttatcctttgacgaaatccgctggaaagtaaagaagtttccctttcaatcttgcatcaaactcacctacatatactttctaaactttttttgttgggtttgttagaaatacgtatgaaaattttattcgataatgttcattgtattaattgtatgtgtctcaattgttggctgtcgtggcttcttttcatgtatgtgggcatacatgtgcggcatcttctttgtaatactttgattgtgtttaaagccaatttgtttttattttcgcagtgctgtcaattcaattctttggctaatttgattctcgaatcgggaagcagaacataaatgtatctgtttgtagcgaaggaatacataggccaaaaacataatatcttagggagcttagaatagagtatttgggataatgtacgagtagctgaatcgaatgccgtagcaagtgaatcaaaattacatctacatgtatatatatataattgcttggataaaacatttaacgtactgtaagattgaatgcgacataccaaaagagattttcaataaaatcgaattcaaatagaaccaagaccgccactttgactaaaaaaactgtcaaagtttcggcagcatagccaagaaaacttggcttttcggcttctacgtcgctgttttcctggggactaattcatctgcgattaagtgtaacctatttgtatgcgattagcttaaatgcatccctttccgggcgacttcaattgtttatgctctgccgcagcttctggggatcctggtagtgcgacgaggacgatatgaccgagggatgctgaggcggtggaaaacaccgcacgtgctccacatttgagccctcgccatcgccgccctttagatacttgttgagaatggagaagatttgtgagtttaatacttggaaccgacgaatccgatccaccattcgcttcaattgctgttaaggaatattcaaattgtactttgggcactttggtagttatgttagaacttacaatgccctttacg

SEQ ID NO: 13331 - DNA, 1522 bp, DROSOPHILA
gagtacatttgattaatttccaaaaattgttgcaatcagttcaaatcaattgcaatacacaatgcacacaagtaacttataggggcggaagtgttttctgcagctggcgacaaacacagttgcgtgtacaatatacccgtgtattgggcaattaccgggtataaaaatatcaaagagtcgctgagccccgaagtgagtatatggccaaacacaacgcatttgttgttcaaagcgttcggaacgtggacggattgagctccgccgggaaccgccttctccacatcaacagccttttgaaccacattcctgttgggattcgctttggcccagcttgctaactcacaatgaaatattttggcggagtcgaaggcggagccacccactccagactggtcatctgcgatgagagcggccaatctgtgggcgccaccagcggcctgggcaccaatcactggggcattggcattccggagtgcgcccgccggatcgctgacatggtggagcgggcgaaggaggaggcgggcattcccaaggagacgcccctcacaagtctgggattgagccttagcggctgcgagcaggaggccaccaatcgcgagctggagcaggagctgcgcaccacgtttccgggcctggcccagaactatgccgtgtccagcgacaccatgggcagcatgtacaccgcctcgtccatcggaggaatggtccttatttcaggaaccggatccaattgcctgctgcgtaaccctgacggctccacgtccaattgtggcggctggggcaacttcctcggggacgagggaagcgcctggtacatctcgtatcgcgcagtcaaggtggtgttcgaccatatggacaactttgagcagtcagcggctcccgtggagaaaacttggagtctgatcaaggagcactttagtttggagacgcgcctggatatgctgccgcactgttacgccaagttcgacaagcccttcttcgccaatctgtgcaaaaagctgtcgcagaacgccgaaaatggagacgaactggcgcgcagcttgtttcgcgaagctggcgttcatctggccagaatgatccttgccctgctgcccaatgtgcaccaggatctggtcaagtccggggacctaagcgtagtgtgcgtaggatccgtgtggtccagctgggatctgctgcaggaggccttcatcagtgaactcgctaagacaaccatcgacttcgacctcaagctggtgcgcatcaccaagagcagtgcctacggagcctgctacctgggtgcggatagtgcggacttcgatcttccgagaaactatgccgacaacgtcacagtactgtacacgtacaccgatcctcgaaagaaagccaaagccaccaacggctgtaactgttagataaattgtgtttgacaacccattccgcaatacacttcccaattgccaaattcgcaatcaatattccagttagtggtacggataggtagtattatagcttatcaaaaaataaataattttatcctttgacg

SEQ ID NO: 13332 - protein, 348 aa, DROSOPHILA
MKYFGGVEGGATHSRLVICDESGQSVGATSGLGTNHWGIGIPECARRIADMVERAKEEAGIPKETPLTSLGLSLSGCEQEATNRELEQELRTTFPGLAQNYAVSSDTMGSMYTASSIGGMVLISGTGSNCLLRNPDGSTSNCGGWGNFLGDEGSAWYISYRAVKVVFDHMDNFEQSAAPVEKTWSLIKEHFSLETRLDMLPHCYAKFDKPFFANLCKKLSQNAENGDELARSLFREAGVHLARMILALLPNVHQDLVKSGDLSVVCVGSVWSSWDLLQEAFISELAKTTIDFDLKLVRITKSSAYGACYLGADSADFDLPRNYADNVTVLYTYTDPRKKAKATNGCNC

SEQ ID NO: 13333 - DNA, 3104 bp, DROSOPHILA
gtggtgaaggggggctccagcgggacagtggtggtgggtgatatggcgggattgtgggggctccgctccaacagctggaagctctcgtccttggagaaggggggtggtgaggtggcctcctccagagcgccaactttggcactgcctaaatttagcatcttgtttctgagaaattcctaaatttagtcagtttcgctaaatcgcattctctcttctttttcgctcttcctcttctgcggtgctttcacaaggcatctgcatctgtgtgcgttggtggccagaaatttagcaatcaactttcatctttgccgttcattaaactagtactactaatatcacaccctcctattgcactttacactcatttattattttataattatgaatgaattaattttcgctgatttagcgagcgacaacagagcgaaaaaccgtttctaccaatgttctgtaacaaactaacaaagtgctcagatggtgggcaagtgccagtcggttctcgataatatatcgataactgagcgcgcagcttaaaagtggtaagcttgataacaactcaaagttggacagattcaatgagttcgtaattatctgcggaactggaatataatgttatcaaattatatttttgtcgtattgtgttggttagagtacaacggtaatcaatttccaagcatatgtcaatcgtactacttagggaaaccatttggttgttagacgattgcctgagacaacaatccattaaaagagaaaacataaaattgctttacattgtacattttattttatgccgagtctatacactatataattaagcggattaatcttaaaattgaattttttaagcacccagaggcgtgactatcgccatcgccagtgttgagcaccgatgaaatgaactcgccgcaaaaatcttatcacgcagcagctgactgcagtgcagatatgaaaaatgcgagcaggaagaaagtgaggaaaacaattgaaacacatgacttttcggataaaacaacaacgtgtattgggcagaacacaaaacaatgataatacaatcccgcgcgagtgggaggcaaactaatatgctcgcttttttctacatggaacaacaacgaattttcactttaatgtatggaataataatacagcagtgtttccagttagattaaccactattattacgggtctaaattatggattagagttgaacgtggacattgaatttacagcgcacagtttggggggccacctctttacttgtggttgtagtttttgtgcacctcgggcgagatgttgtacacgtactgcaggatctccaggatgaacgggtccttgcgggtctggatggcccggtccatgtcggccagcttaacgcggatatccgcatcgatcttggccgccacgccctcgcgactgcccatgtgctgtaatcggggttcacacggtattacatgtacataagtttccctatgtggcgtcttaccttggcctcgaactccttgaaggcgcgctcgcgctcctggcggaacttctcgatctcctcggtagcctcgtccttggcttgcttcaacctccttgccttgcctgcgggattacccagaaatccagatgatcatatcagttcaacttggcaaatcagccctccgcaagatgaccttccataacttaaagtgccaactcgcacaaaaactatttactgcacttaagttgcagtcttagtggccacaaacaattttaatttaatttaatttaatttaatttagtttaatttgatttatatctcgagttatggaggattgacttgtatttacttttttccaccacatcatgtgacccacacacaacggtgatggtggttatggtagcacgggggcggggtggtgaaaaaatcgcagttacttgtcgccctgccatttccaattggatttttgtttctgaaaatgaaacttacgtttacgagcctcggcgaccttctcggctgcctttttctcggcagcgagcaactgctggattccctgcgtctggctggccataatttccaaacttctctaattcctcgccgtggtgtatactgtgcaagtcgaaaaaagcaagtgcgacagaatcacaatcgacgacgaactgtgaaaaatgtcatatgacgaagtcacacacacgcaaactcaccacggtggctagttggtgtgggtaagcagtgtgccggaaagctgggtgctgcgaaactcttggagatggctcggtcgattgcatatcgattagcttagttgtatattattgtttggtattgtattggccagaagtattaaataatttgacgtttttgtaagcattaactttctcatttattcccatcatgaatatttttcttttataattttgtaaactttaattcattttaatttaaatgcagcgtttaatctgcttcgcactgtaatagttccggctgtatttaaagctattgtaagaaattagttcgtaaaaaattctttatattattttaaaattgaaatacataaagattaaattttgaaataatttattcatattaatatctgaaggctatcgtttgatattaaataacaaccatgttgtagtggaccgaactcaccacacctcagaccaaaattaaatatttgaaaatcacaaatcgtaactatatgaagctgcaaatactttatatatctttagccatagtgtatttatttcaatcaatttgaatactttgttgatatttttccgaataaatctctgctgactagctatcgatatcaccgatagtgtcatctctgtcctagaagttaaaccacagatgctcaggcattaaacaaaattaatttcgaaatttgttgcagtaaatatagtttaattgtttaaaattcctgtataaatccttaagaggggtgcctaaagatgtttacgcccaccacgaacaacgccattggaggcgccactgctgctaccggcgcttttgcttttggcgcgcgaccggcgacgacgactgctccgcctccatcctttggagcagccacctctacgccaaccttcggtgctgctccggccaccacctccttgtttgcagctcccgcggccacaccggcctttggggc

SEQ ID NO: 13334 - DNA, 678 bp, DROSOPHILA
tgattctgtcgcacttgcttttttcgacttgcacagtatacaccacggcgaggaattagagaagtttggaaattatggccagccagacgcagggaatccagcagttgctcgctgccgagaaaaaggcagccgagaaggtcgccgaggctcgtaaacgcaaggcaaggaggttgaagcaagccaaggacgaggctaccgaggagatcgagaagttccgccaggagcgcgagcgcgccttcaaggagttcgaggccaagcacatgggcagtcgcgagggcgtggcggccaagatcgatgcggatatccgcgttaagctggccgacatggaccgggccatccagacccgcaaggacccgttcatcctggagatcctgcagtacgtgtacaacatctcgcccgaggtgcacaaaaactacaaccacaagtaaagaggtggccccccaaactgtgcgctgtaaattcaatgtccacgttcaactctaatccataatttagacccgtaataatagtggttaatctaactggaaacactgctgtattattattccatacattaaagtgaaaattcgttgttgttccatgtagaaaaaagcgagcatattagtttgcctcccactcgcgcgggattgtattatcattgttttgtgttctgcccaatacacgttgttgttttatccg

SEQ ID NO: 13335 - protein, 117 aa, DROSOPHILA
MASQTQGIQQLLAAEKKAAEKVAEARKRKARRLKQAKDEATEEIEKFRQERERAFKEFEAKHMGSREGVAAKIDADIRVKLADMDRAIQTRKDPFILEILQYVYNISPEVHKNYNHK

SEQ ID NO: 13336 - DNA, 8436 bp, DROSOPHILA
ttatagaaaaaaaactatctctactcttagcagcgtttctgttttcttggcaattaacaatttaattaataaaacaaataagaaacgttgtaatgatgattgtaatgacttacccgatacacgccatcgacgagttttgtaacttcctcggcctccatagttgcctctccgatttgctgccggtcaaatctcctatcgatggatgtgaagtgtattcaagtagccgaaaacttcgggctactgatcgatagtgatgtattaagcgcccgaaagccaaaaacaccacaccaaaaatcgaatcacgaaaatggtgatcacttgcaggtcgaaaaaaattcactttcaactgcagccgccgatgggttgggattcagattcagattcaattccagacaaagtagcggactgcactcgattttcactttctaaagtggcacacacacacacacacacacggggagacaccgaaaatgtgttgcaaagacgttgaaccgggccaaaagactcgaatttggagtaaacttgtaactttgactttcgttgcagaatcttggaaatctcgtttctctgtcgtgactttctttttggcgggcagacgaccaacatcaaccgcaccacgtaacgcgatccaagcaaatgaaatgccagccaagagttttgggatttgtttgtttcttgttttcagttttcggtttctcgacgggtttcttgggtcttcgggtcgtgtttgttgtttgcccagtgagttatcaacaaacaacttgtggcttcggcacgtgaataaagatgttcgtggatctgaaaaggagtgaaacggaagttaagtcagtcagctggcatagaaatgggcttaaagttgacacgacacattgcctggcaaccggcaatgtttaatcgatagctcgccaaggatttagcaaggtattaaacggaaaaacaagtacataaatattcagaaaattaaacgaataatttctattaaatattgtttaacgtaaagatgagcaaactagacgatctgctgtccaaaaagaagacggtggtgcccgtcttggatctcagccgcagcaatattcagaccgtcgaggagttcaaacggctgctggagaaggtgcccgactacaagatgcgaccggtgaaggtgcgcgccgaggagataaagatccgggagaaggactacgccttcaagatgcccaaaaaggagatgcgaaagctgctgcgagccaacggggaacgagaggcgatgtacacctatgcggatccggtgcccggtgaaatgaaggatgtggtgctgatggaactgtgtgcggtgcccatcgattggaagatgctgaccacgctgaggcccaagaacaaacaggaggaggaatacttcagccgcatggttgagatgggaaagttggagcttaaaaccgaggctcgcgatcgccgagagtttgccctaaacaattgtgtcaagaaaatcaagaataaatcgggaattgtggaaactcgactgatgacctgtgagtcctgcggcgaggaaatgtgttgtggttagtatagatattacttagctataatcttaatttaatcaagatctctcatacaggcaagacttgcggcgacttcaattacgatctgtacattcgggttgaggccagggtgattaagccgaaaccggcacctttgtcctccaacaaggccaaattaaatggacgcaaaaagtcatcggtgggcggaaccaagatcaaggtcaaaaaggcatcaagcaaagccagctaaactaaccgattgaacaacaaatatttacgaaacattccgaaaattgacttagcttttgtactcgtatttatttgctactatattgttaatgaatataacacgtttttctcaatgtgcaacatatttcacatatttgttagtctcaaaagttacccgattttctatttacttacttttcaagccatgtgtagcatttgatagttttgctaattaattaataataattaaaactctataaagctaaggtgttaaatgaatacagcccatacttaattacttgcgaaaatacatcaaataaactaaataaatgcttatataatttcattatcaatcaatcttaatttacaacataccatattcaacactcttcctgccaaaaatttaaaactattttatgtgtttcttttttttagcattttattttttgcttttatcttaagaaatccacttaacatcaacactgccagcgaaaagcgtaaaaaatgttgtaaactactgaaacaatgatcacagctcaaatgcaaaatagtagaaatttttgaagactttttttccgttcgacaagcgacactcgaacgtttttgccggtcagcggcacaaaatgaaatggttaaaatatttaaattgacacagagcaccacagcacaaccgaatggccattaagaccaagtcaacgagttaactggtgttctgtgctcggtggtctggagagtcttgactatcggtccccagggagtacactgagccaaatatcgtatctttatacataaatgattgatttatatcacaaatgttgtatgcatttaaagaaaccattttggaattagcttaaatttgctaagaaagataaaccgatggcatggaatgtttgaaaaaatgtggaataatattatataaaattttccaacattttttctttgagtgttgtatagacaaaacggcgccggagtccacttggatgcgttggcgacatcgctccagtggcaagcagccacttacagtccacgaatcgctgctccgcggtttgtgcaacaatttgtgcaagtctctgctctcggccagaattcaatagccatgtctcagatattcacctcttctgcgattctcagtctggcggcgcagtgcagcacagcttttgattactaatgagccaagctggcttttcagctacgtaagctccaacgatcgcagctctgatttatgcggtttatttatggaaatatctattcgcgtagaaattgaaaatttaactttgaatatcaaatttattgcctgccggcgcagccggaggccgaggcgaagttttggtcggaatcttaatttgattttgattttcttacaacaaagcttgttcggctaattggagtgagtatgttgatctggattgcgattcacaacgttttgtgttcattgttacaatcaaaatgcataaagatacaaaaattattttgaagttaatcataaaatgtaataagtaattcttccagcattttgccacttatttttgtttatttgttatttgtttattacatatttatatagctaaatatgttaccttttttacgtatgtatgtctgaaggtggcttggacttactttgcattgtctactgtgtcttgatacaacttccgatatgtaattattatctttttgaaccaaatctcacttcctcatcttatttccccatccatcattgtttctattcatagtggcacttgtatcttcaactcacttcgtatatcagctcagattgttgacttttaccaaacttaattgtggtatcaagagtgtgacacaccattcgagtcgaattctgctattgtgcgctaccatcaaactgccatgaaagagtcagcatcaatatgtcagcacaccgccgcgggtgactttcgtatcttggggtctttcacctggccaaaagacgtgtcaagacgattacgtaggcacacgcgtctttaactccgatctgttgaaccgatcggtagatttccaacataaacacgaccgaatgaaaatgaaaacatggcccaaaacgcatttaaatcttacgaaatgctcgatgtcgcatctccatatttatgcagatgcaagataaacacattccagataaacgctaggcaaagtgagagtaacggaaagaaagttagctttgtttttcaatttcgttaggctttcgtctacgtgatatctggcagggccacgcccacgggccttgattagaattccgagctgtccgcatacgaaagacttaggcaacgaacttcgcagctgcattcttttcacgcaaggttagcatcgtcactgtggtcagcagtggaacccgatatcacagcaccgtggacgacggcttaattatgcatctgccatgaaaatatatgcaaaaaacagcgcttgtctattaagaacaaggccagaattgcacagccaactaacttagctcgagaaaaacgaaaataacattgctcaactattatcctactgtatgattattgacttttaattgctgccttaactttgacttttttctgtgattgtatatttaatcattaactaactaagtaaattcaaattgatttctgtggaatatgtaataacgaatgttattcagtactctactcaatacaaagtgcatcctcttttcctctttacgatcttaaatcacttggaaaaactttcgccaaatcgaagagctgatgagcagtcaacgaccatttccattttcctgacattcgcaatacatgcgaataatcgggtaaacaacttaaagcagcatgtccaacatcagttaagctggagaagcaaagaagattggttcgcgaacccaaatgctattatcaaatgctcatcattaacatttgctggctgctgcggctgaaatctcgacgtgacgatcaaattgcagcacatgtgaatatacacgtgtgctgaacacttgggcagaggtgaaccgaagatgttgttttgccggtgctgttgtgaaaatgaaattaaactaaagacgcaagactgaagactggaagattggaagactgacgactgaagactgaagacaatgcactgggcgaaggggccctcgagatgcacactcgtatctgagcgctaaattgccgccagacacatttgcaaataagtcttagatacagcacacaataacattgttcagccataccataccataacataccatagggtacctcagttgctgccccccccatctcatccagtccacatgccatgcaaattgagagacgaggcctgttcgttcagtcaaattggcagtgaaagtaaaagtttaagttatttttttcactctctgggctgtcgaaccaagaccaaaaacgaaccaaatccgaaccatggccaagcgattcaaacgcacaggagaaggcgaagagtggccagcatctcggactgacacttggctgccataaagagatgtggtccatgtttcaactcgccctcaacttagccaccccaatgcccctgtagcttcaccttaacctgaccaactcccgcttgctgaaacccacccaaaatcattcgccttttccaattaacttttaaccagtacataactttacaaataactttacaaatgttgcttaataaagaaagcttagcgtgtagtcaaattaagataattataaattaacttaaagtaataatgatttgaatcacaaatgtgttcaaagcaatagttatgctgctcctaatggatctttattatgaaagcctaaaaacccgttgtggtaaataattttcaacatttgaattaatcatcagctatttgactttagtagatcctcatttttctcttccgtctcacttagctgttccattaacccactgagctgcgcatctcggcgagattacccgcgcctggaggctgatcagcggacacaccctacttggagctccaccacccatcccccacataaatacatgctgcacacatatatacaattcttcttctcttaacggtcgtgacttcatttagtcgtactcctcacgtactggcatctcctgtttattgccattgctggcggttaaaaaaaagaagctctccccatcataaattaggtgcagatggaatctcaaagtgccgactctagtttgtcttcggttttttctctgggagcgttaatggcaatgcctataattctgaacaggaactgtctgtacgatctacacccacatcgtaatgaatgaaggaaaattccaaagaaaattgtaggattttatgataaaaaccaaatagaaaatgtgtgaacggcgatgtatgcttaggaaaagcatacataaaatacctcataaatatatttttctaaataaacatatattctattgaattgctacaagcggaactaagccgaaacccaaagtttgattgattcctaagcacttgtcatgggatctcttggcttgaacagcggatcggtagccgaaaccaaaactcatttgtccgcccactcagccatcaacgaaataaagatactcagagtggagtcctaagaccacgagagctaaccaagacatcgagtgccgatgtgaaagaaatcgacaaacgactcgagactccgtcacctgcaaggaatgcgaccttgagctgtcgtcgtcggcaatatggggctgcttgttcaaatgtcgtgactgcccaggcccagacccaggtaatactcgtacccgatacccaatacgaccataaataagagatatatgtacatatatagttgagacgtgtggtgcggggggatcagaacccacttgagatgagaagacaagacgcagaaaatagcgcaagtatctcatacaataaaacacgtttgacgaacgattcgatggcaaagatgaagattgaatatctgtcagatacaaatacgtagacggcaaaccacaatcaaaagcctctaagagaagacggcgctcacttttattttcaaaattgcaactttacgaacagcaacaaccgcaacaacaagcccaaataacaaagatcagttgactgagaacaaaagcaacagcagcaaagattgttgctataaaaaaagaatctgtcagtaccatttcatggctaaaatttatatattccattataaactccaaagctaaccaagccccgtgtatttgccaagccgaaaacgattcgctcattacttaaataaataaatatatatacaaattgctgattttcgggggaattattctctagtatattgaaataagcccaagtaattccaaatattgtaaatatttgtccaaatatacaacaaaaaatgcggtgcgtaatgaatccgttgcgtaaacaaaggcttatatattttagaatatttatttatttaaagtgatttatttgccttagctaagcaatatatatgccaataaacgttcgtgtgattcaaggttgcaattaaaatgatatgctatttgcattatactttttattcaatcaaatatgaaagattctgactgccctttcacctgaaactttcccactgcggacagttgatacttttttctaaaatccacgttactaaagttaatcgacttcagaaaggtggcacagttataagtcccaaccatgaaatcgtattaaaatccaagtcaatgaacctaaacgaccgcttcgcgtttatttatgcagtcggaggcccaattagttttcagaatgtctaaaagaaaaaaccgagaagtcagtgaaatatttgatttgccattcgagacaactgattaaagcaaatatttttgttttttttttgcattttgaaatatctgagtaattttgcggcgcattctcgaagatttgacacagttttgattaggaaaaacctgttttagatctgtgctagaattgattttaatttcggctggtttgcttttgtttttgcttgcattccaacgattgtgtataaccagttaaggaatctataatttttgctaaaattacattatgcaaatggtgatttggcatttggtattcacagaatttctctcagactgccaatctgtcaatttcattattgacaaattttggtagctttgggtttctattcagcttattctttttattcgagttcaacggttgagtgagtgatttgcataaattataaactgattttgccatttaattttgtaagagcgaatccacttattgcgaaatccgttaactgtaaatattattgcataaagaaagcgtttaaagttctaataacacaaaagcgattgccatactaacacaatttgtcatgtttctgttgccctttctttgcatttctaaaatattgtatgtaggtttgtgtaccaaatgaacaaggcattaaatcaaaaccataaacccaattatggtcgaccacttttatgataagcatttgtggcttaaattagtcgtaaaacaaaagactcaggcaacaaacttgaagcgtaattaaagctacgtgctgagcgttattaaacattgctgttaatccaaaagcagaacaagaaaagtgaaaaagcagaagtaaacaaatgacgctttcaagtttttggttttcggggatcggcagtcataaaaatcactcaataaaccgacggaaatgacttgctctccaaaaaccaagaaggcggcaaaacaaagactaaaaactaagaaaaaaaatgttcgacaagctgaaatttcataattagccatatatag

SEQ ID NO: 13337 - DNA, 1038 bp, DROSOPHILA
atgagcaaactagacgatctgctgtccaaaaagaagacggtggtgcccgtcttggatctcagccgcagcaatattcagaccgtcgaggagttcaaacggctgctggagaaggtgcccgactacaagatgcgaccggtgaaggtgcgcgccgaggagataaagatccgggagaaggactacgccttcaagatgcccaaaaaggagatgcgaaagctgctgcgagccaacggggaacgagaggcgatgtacacctatgcggatccggtgcccggtgaaatgaaggatgtggtgctgatggaactgtgtgcggtgcccatcgattggaagatgctgaccacgctgaggcccaagaacaaacaggaggaggaatacttcagccgcatggttgagatgggaaagttggagcttaaaaccgaggctcgcgatcgccgagagtttgccctaaacaattgtgtcaagaaaatcaagaataaatcgggaattgtggaaactcgactgatgacctgcaagacttgcggcgacttcaattacgatctgtacattcgggttgaggccagggtgattaagccgaaaccggcacctttgtcctccaacaaggccaaattaaatggacgcaaaaagtcatcgcggatcggtagccgaaaccaaaactcatttgtccgcccactcagccatcaacgaaataaagatactcagagtggagtcctaagaccacgagagctaaccaagacatcgagtgccgatgtgaaagaaatcgacaaacgactcgagactccgtcacctgcaaggaatgcgaccttgagctgtcgtcgtcggcaatatggggctgcttgttcaaatgtcgtgactgcccaggcccagacccagttgatacttttttctaaaatccacgttactaaagttaatcgacttcagaaaggtggcacagttataagtcccaaccatgaaatcgtattaaaatccaagtcaatgaacctaaacgaccgcttcgcgtttatttatgcagtcggaggcccaattagttttcagaatgtctaa

SEQ ID NO: 13338 - protein, 345 aa, DROSOPHILA
MSKLDDLLSKKKTVVPVLDLSRSNIQTVEEFKRLLEKVPDYKMRPVKVRAEEIKIREKDYAFKMPKKEMRKLLRANGEREAMYTYADPVPGEMKDVVLMELCAVPIDWKMLTTLRPKNKQEEEYFSRMVEMGKLELKTEARDRREFALNNCVKKIKNKSGIVETRLMTCKTCGDFNYDLYIRVEARVIKPKPAPLSSNKAKLNGRKKSSRIGSRNQNSFVRPLSHQRNKDTQSGVLRPRELTKTSSADVKEIDKRLETPSPARNATLSCRRRQYGAACSNVVTAQAQTQLILFSKIHVTKVNRLQKGGTVISPNHEIVLKSKSMNLNDRFAFIYAVGGPISFQNV

SEQ ID NO: 13339 - DNA, 4696 bp, DROSOPHILA
agtgctttactaaagttgcataaaatatatatttgtatttaattaaataaatgcataccatataatatgcgagcttggggggtgaaaagtaagctatatttacatttcatgtaagctggattttgaatatatttaaaaaattgtatcgatttggtttcaaatcgaacttttatcgcatccatagaactcctagttcgattaagtttgtagccctgtctggataaaaaaaaaacatcgataaaaagacacgtgctttgccttaaaagatcttaaagtgaggaggtagcaaggcgctttgatttaacttactttgatattgtaacttaatgcaattaaatattaacataggctttaccaatcgtgtgcgaaatcttgaaaagaaacccgtcgctcggttttatatcgaattcttaacggaagaaggtaagatcctttatatgcagatagctttttttgacttattatcctaacatctttatagttaatcccatattactgcaagatgaaagcctggagagatctgggtattacctatatccagtattccaacatcgcagcccgtgtggtgcgagaggccctgcgcattgagctccgtgcagacgccgccaagcgaaacatcagccatgtgaagttcactccgtgggtgaacggaaagcctgtgccgcgcaagaaggtagaacgtgaatccgaatcttaggcgcccatttcggtgatttgtacaccatgtttcatccagaataacagctgccatgattctacaataacatttcaaataaatctaattcactgaaaaaatgatgtatattagattttttgttgggtcaaaacttcatagctcattcttctaaagtacaacacagttctgtatttaaatatcatataaataataatatacacaacatttagcatacattctacacacgcgtatcaaatacatagattgtgactgcttaatttagactaagacactaaataggagaatctaagaatgagaaaacagtcagttctggagcacgagccacggtagcaggatgatgcacaaggaccaggataagcccatcgatccactcttcaagttggtataactgtccacgatgtgaatcttccagcccatattgccatgggtaaaggagttgtagtacacagtatccggccatgtgatattcggtgtaatttccaatagagccggttccccttctacacactcggtgatgagggatcgattgaacttcttgaaagtggggaagttatcatccagtcgacgatcactattttgaggatatctggacaggcacaggggaccagcagccgtgggcttgggcctgcctctccgggtgaattcaacaccggctaatacacgaatctcactctgctttgcatcagacagtcggtcatacccaccctggggatcatcggtgataaccaacggatgatagtgctccggcgagtgaggattattgccacccctaaccttaaaggtgtaggtcagaccacgctttaggtaaagctctggaatcatgtagccgttgatgtaccaggccaagccactggacacatgattcgtcaatccctgatagccacgaagtcctccagagggtcccaagtaggcgttgaatgtgcgtaccgttctgcaaaacaaggaactatattaaattttcattgcaggaagattggagtcttacgcatctgttatcctggttcgctcccacactggaggattagtcgtctccgctcgttttgtaaatgcaaagcaatcattaaccggttctgtggtgttaaaatctatcactatatcgctcttgggatagtaagtgtgaaaggcgggctcgttgttggagtccaatgggccaaatgcccagatcacgtagttgctgcggtctaggaagatctccttatcgccatcatcggctaaaatgtgaaagagctgcatcagtaagcaaaaggcataccacttatgataaccaactcacatgacttgagcgtccgcctaaaactgatcgtattaatgccatccttgcgactatacgtattcaactggaagctgtccaatccaccaaccacatcgtcacggcaaactcctttgttttgacccaaaacctgaacgcacggcgctaacgaagtgatattgtagtccacggtgtagcctctgatgtcgtctatataggccaccacgacatcggagccaatcatctggctggatacatcagatccggatatgccgaaagacatataatcgttgccgcccacctgaccggatagttgaaacgtgatctgcggcccgaaaacctcccaggacacctgcatatccttgtgtagttgccggcaattgggcagcgagaattcgaatggtgtaactttcactagggaaggtggaacattaagtttatcgttgaacagaacatgaccatagttctcgttgtcagccacatcgtatacactgatccaatcgatgtcaaagatagtcttatctcctggcagttccagttctatggtctccttgttgtactgtcttataggatcaaggctaaatgatttatgatgaattgtttaaatgggtttgtgattaaattttttttaaatccctagagaaacttactatcctcgctcatctggcagcttgcttcctcgactcgatggctgtggcccgactcctgtccagaaaaatgtcctcttgccacgcccatcgtaggtaaagtccttgatgcgaatggtctttgagtccaagatctcaacactgctgctgctcacattgtgactgcgcttggagaaggttccgcccaattggctcatcggtggatcgaactcctcgggtatataaacgtcgccaaagttgttttgactgctcagatcgtaaaccgccagccatttaatctcagttatcttctttcgatccggcagcgtcagcgtgaaatccttgttgtgatagcgatccagaatgttggttctacggttggcatttccatcatatattcatttcaatttattctccataggaataatatatattttgacacttacttgccatactcatcgggcacaatgaatccctgcggtcccggccgattactagcgcccgaccagaaaaacgtatccgccccgttgccatcgtagttaaagcccacaatcagaaaggtgtactcattcacagcgtacacatcgccggacacttgatgatggtaggagttcagtttccccagatattttccccggtacggaccatcttcttcttcgttctgggccgctatttagataagttaaagttaagctaagaaaatttgaagccggcaaaaaaaaaaacattgaaaacaaatcgcaaacgaaagactatgacaacaaacttgtttttttttttttggattttcgctctgactaataagccaacaatttggcttctgatttactgccactgggccaggtggcgccccctggcgggagctctgagcgaccaatccaagactagaccagtttctctagttttacacgaaagtgaatttgttttttgccccgtctggagcgtaacgccagtaaaaatttctctttcctttgcagtttgcctcggttttctttgttattgttaagtgtgcaatgtagtctagttaactcacaggcggcggggcaaagcaggaaaatcgttaaaataaccagtaataaatggtgctgcaatcgcagacaaagaactctgctgctcaatgccatcttaattccctcctttgttatcccggtctggtttatttcactcccacttcctaagccacgttttaatttttttttttaatttttgaatcgattttatgcttatgaattcttattcacgctgcagcattttgcattttgggttttttcgcgggttcgcttcgtcactgaagatggtcagatttccaaacaatacatagatacgtctgtttaatattaattgagagccaagtaaattatttataatttttcttgcttttgcttaaggtcgtttcgtcacttgcatgcgttttcgctgctattgttgttgttttgttcacttggccaaaacaggtttaggcagcagttccggcgtttttatatatatatttttactttttccaaagctcgcgcttaaggccgaaatcaaaaacgaaccgcactgtccaagcgatctgagtgaactgagactttaagccgccgttatttcgttttgggtttctttcggagttccgacgtcttggtcttggcaatgttaagtgagcactgctctccgaatctttctctcttgagctgtgtgcatgcgtgattggcattgaaatggccaagagtggccgtaacggtaacttgctgcacacggaatacgcgaggtgtgcttgagagattccaaaataataccacaaatacattatactacctacgtgtgcactgtaaatgatttttaaagaattcttcggaaaagatctatgattatctattcattgtggcgctatcaagtagaacaaattaagccgcatataatatatattgcgatattaatgttgctgaccccatgaatagtattatatttttatataacttttcttgatccgagttcttatcagggtaaatgtagccatctgaaactgcctggggcgaaataaaacacactttcattatttttcacaattttcttgcttgcaaaactaaactttatccttaagtttgcctttattagatctttattttgaatagcaattcaatg

SEQ ID NO: 13340 - DNA, 2070 bp, DROSOPHILA
atggcattgagcagcagagttctttgtctgcgattgcagcaccatttattactggttattttaacgattttcctgctttgccccgccgcctcggcccagaacgaagaagaagatggtccgtaccggggaaaatatctggggaaactgaactcctaccatcatcaagtgtccggcgatgtgtacgctgtgaatgagtacacctttctgattgtgggctttaactacgatggcaacggggcggatacgtttttctggtcgggcgctagtaatcggccgggaccgcagggattcattgtgcccgatgagtatggcaaaaccaacattctggatcgctatcacaacaaggatttcacgctgacgctgccggatcgaaagaagataactgagattaaatggctggcggtttacgatctgagcagtcaaaacaactttggcgacgtttatatacccgaggagttcgatccaccgatgagccaattgggcggaaccttctccaagcgcagtcacaatgtgagcagcagcagtgttgagatcttggactcaaagaccattcgcatcaaggactttacctacgatgggcgtggcaagaggacatttttctggacaggagtcgggccacagccatcgagtcgaggaagcaagctgccagatgagcgaggataccttgatcctataagacagtacaacaaggagaccatagaactggaactgccaggagataagactatctttgacatcgattggatcagtgtatacgatgtggctgacaacgagaactatggtcatgttctgttcaacgataaacttaatgttccaccttccctagtgaaagttacaccattcgaattctcgctgcccaattgccggcaactacacaaggatatgcaggtgtcctgggaggttttcgggccgcagatcacgtttcaactatccggtcaggtgggcggcaacgattatatgtctttcggcatatccggatctgatgtatccagccagatgattggctccgatgtcgtggtggcctatatagacgacatcagaggctacaccgtggactacaatatcacttcgttagcgccgtgcgttcaggttttgggtcaaaacaaaggagtttgccgtgacgatgtggttggtggattggacagcttccagttgaatacgtatagtcgcaaggatggcattaatacgatcagttttaggcggacgctcaagtcatccgatgatggcgataaggagatcttcctagaccgcagcaactacgtgatctgggcatttggcccattggactccaacaacgagcccgcctttcacacttactatcccaagagcgatatagtgatagattttaacaccacagaaccggttaatgattgctttgcatttacaaaacgagcggagacgactaatcctccagtgtgggagcgaaccaggataacagatgcaacggtacgcacattcaacgcctacttgggaccctctggaggacttcgtggctatcagggattgacgaatcatgtgtccagtggcttggcctggtacatcaacggctacatgattccagagctttacctaaagcgtggtctgacctacacctttaaggttaggggtggcaataatcctcactcgccggagcactatcatccgttggttatcaccgatgatccccagggtgggtatgaccgactgtctgatgcaaagcagagtgagattcgtgtattagccggtgttgaattcacccggagaggcaggcccaagcccacggctgctggtcccctgtgcctgtccagatatcctcaaaatagtgatcgtcgactggatgataacttccccactttcaagaagttcaatcgatccctcatcaccgagtgtgtagaaggggaaccggctctattggaaattacaccgaatatcacatggccggatactgtgtactacaactcctttacccatggcaatatgggctggaagattcacatcgtggacagttataccaacttgaagagtggatcgatgggcttatcctggtccttgtgcatcatcctgctaccgtggctcgtgctccagaactga

SEQ ID NO: 13341 - protein, 689 aa, DROSOPHILA
MALSSRVLCLRLQHHLLLVILTIFLLCPAASAQNEEEDGPYRGKYLGKLNSYHHQVSGDVYAVNEYTFLIVGFNYDGNGADTFFWSGASNRPGPQGFIVPDEYGKTNILDRYHNKDFTLTLPDRKKITEIKWLAVYDLSSQNNFGDVYIPEEFDPPMSQLGGTFSKRSHNVSSSSVEILDSKTIRIKDFTYDGRGKRTFFWTGVGPQPSSRGSKLPDERGYLDPIRQYNKETIELELPGDKTIFDIDWISVYDVADNENYGHVLFNDKLNVPPSLVKVTPFEFSLPNCRQLHKDMQVSWEVFGPQITFQLSGQVGGNDYMSFGISGSDVSSQMIGSDVVVAYIDDIRGYTVDYNITSLAPCVQVLGQNKGVCRDDVVGGLDSFQLNTYSRKDGINTISFRRTLKSSDDGDKEIFLDRSNYVIWAFGPLDSNNEPAFHTYYPKSDIVIDFNTTEPVNDCFAFTKRAETTNPPVWERTRITDATVRTFNAYLGPSGGLRGYQGLTNHVSSGLAWYINGYMIPELYLKRGLTYTFKVRGGNNPHSPEHYHPLVITDDPQGGYDRLSDAKQSEIRVLAGVEFTRRGRPKPTAAGPLCLSRYPQNSDRRLDDNFPTFKKFNRSLITECVEGEPALLEITPNITWPDTVYYNSFTHGNMGWKIHIVDSYTNLKSGSMGLSWSLCIILLPWLVLQN

SEQ ID NO: 13342 - DNA, 3388 bp, DROSOPHILA
tcacctcaatcggaaattctggctcaaatttactcgccgtctctcctcgtttcgcgcgctcttttcgctctccgcctgcacttactcgaggattttgaaagaaaaaggaagccgcagctggggattcagcaatattcgatattcactgtgaaatttaaccgacttctaccgtttttggtgcctttatttgggtcctatatttgttattttattattttgctgcttttcgttcgtgtttgtcggaacagaagcgacgattctgctaatcaacctattcgttttggatcgctctttcttctgctgggcctctgcttttcatttatttatcacgcgactcgctttcatcgtcggttcttgtttttgtatacatggtgagcagtcggagttgccactcggttttatcagcggacggtatcacggcaagatttgtccaaaatgcgtgcttattcgtccaactgaagtccggcctagtgttctgataaagtgtgagacaacgtttgtttgtaaaaagaactactcaaatgggatttcagtcaaaacaaaacaagagcacatcacacacaagacgcacacatacacacaagacgcacacgcacacagatggtcaaagaggtgcagggctgaaaataaaaacacgtagatatttcgtactgtttgctttactagccacttttttcggtcaatgctttttgctgaggactcggctttcgacgcgatatattttatgtagtttagatctctggatggacgatttatttgtgaatttatgctgctgctactatgtgtaaactttcgttcttcgctttccttcgttttccatttctcttttgtgcgctggtttggcgtacgcggaaatgcccacttgctgttaatcggctatcggaaagaatttgcaagcaggggctccaactagcgtattgagaaagtagctatattttgtatgacagttaagacccctgttttttgaattgatattttttataggattgaaatcaggagctttgaattattaatttgtaaaataaaatgagtttattttgacagcaaacgaaaatacttagctagaatcgagctaaaccattaaaatctgtaaatactgactaatcgataaccttacagagtttcgatagatccattagccgcgaatgcccttaaaaagttgtaatttatttaatttaatgttgcgtgtttttaaaaaaaggttaatatgtcggggacgcaaatgtctgccttcctgagaaagtatctagccgacgaggacaaaaaaattcgtgcgcaattcaaagaaagcgatcctaacaacaaattgattctatggatgcacgaaaaaacggtaagacgcatttcattttgtaaattgaaattgtatattgtatagtatcctgtatttgaagagaataaccgaggaggacttggcacgcccatacaccgaggacgaggtaaaggagctttgtctacgcaccaaagtgaaggttgatatgaccgcttggaattgtctgtgggaagccaaaaagaggtttgaagcaaaaggacgttttgtgaacaagtctgagagattcatcaaccgaatgtatatgaaagcggtgcgcagaaagatggtccaaccgtatccggaggagtttgtggcccagcgaagagaaatagttgcagccgagactaagaagcagaacatcagccgattggatagatggcaaaagaaaaagagtcaaaacctatcagcaccagaatcctctccagacgctcatgcatcttctaatgacgcggtgcagagccacgaggaccaagcaaacacaaatcttagttcactgtctcaaatgaactttcaagtggaagcgatggctccgccaggcgtgtcgtcatctgatcttagcggcatcggagacgatgaggacgaacagcagcagtcaggatttcaggatgagaacatcaaccgtccagagacagagattaatgagaattcggtgagatgtgatccaattaatttaggaaggatgcggactggatgtataaattcgcaagcaaataacagtttccggaatacggagtctgatccggactactatatgtttggcacccaattgagcacattagtacgacccacgtcgactcaagagcctgacgatcaggtaaactgtccagagacagagatgaatgagagctgggtaaggtgtgatcaaattaattcggaaagcttgtcgattggaccgtcaattgattcggaaggaactatcacttttcaaaatacagaatctgagccgatcgacgtcacctcaatagcctgatgtccatatattaaactatataaagttcttcatttattggtgttaattaattaaaaacatgtaatccctaaaaatgttataaaatgtataataaaaatcttaattaaaatacgatggtcgattaagctatgtacactaatctaggatgatccgcaaccggagctgtacaagaagggtaaacatttaaaatgctcgcttttacataattacgctatgtacaatttatatattgctaaaccatggtcccatggggcgcggcagggggcggtgggtgctacgggaagtggtcaaacaagaactgttccatgaacagcgactccgaatgctagttggacgaattgtcgccaggctcactgaccgcaattgtcatcttcacttcatcgccactgtctagttctggatcctcgtcatcctcctcatcctcgcaatcatccatatcgtcctcgtcgagctcctcgtcttcgtcgtcctcttcggtcaattcatcatcctcctcgtcgtcctcatcatcgccgaaactatcacccccgccgctggcctccacagtcggcagctgaacgatcgtggccccgcccggcgtcacagttgagcctgcaaccgtggccgccacactggaggctccactgcccgccgccgctgaaccgccgcccggaatctcaatcgtcacaatgccgttcaccgtgctaatgcttttcggtgcattgccacccttggtctcctgcttgatgctcagctcaattagctccacgccagagcggctcttaaagtgcgtcttgatgtgcttcgacaggtgatcgctgcgcatgaactttttgttgcactcctggcactggaaacgcttctctcccgtgtgcgttcgtcggtggcgctgcagttcatcggagcgggtgaagcgcttgccgcaaaacgcccaggagcagacaaatggtcgctcgccagtatgccaacgcaggtgagcccttagatgggaagttttcccgtataccttatggcagccggttatatggcatatatgctggcgcttcttgtccgagtgtttttcgccatctgtacaattgggacaggtgcaggctactcgctttaagcgtggtttgggctctccagtc

SEQ ID NO: 13343 - DNA, 1327 bp, DROSOPHILA
tttgaattattaatttgtaaaataaaatgagtttattttgacagcaaacgaaaatacttagctagaatcgagctaaaccattaaaatctgtaaatactgactaatcgataaccttacagagtttcgatagatccattagccgcgaatgcccttaaaaagttgtaatttatttaatttaatgttgcgtgtttttaaaaaaaggttaatatgtcggggacgcaaatgtctgccttcctgagaaagtatctagccgacgaggacaaaaaaattcgtgcgcaattcaaagaaagcgatcctaacaacaaattgattctatggatgcacgaaaaaacgagaataaccgaggaggacttggcacgcccatacaccgaggacgaggtaaaggagctttgtctacgcaccaaagtgaaggttgatatgaccgcttggaattgtctgtgggaagccaaaaagaggtttgaagcaaaaggacgttttgtgaacaagtctgagagattcatcaaccgaatgtatatgaaagcggtgcgcagaaagatggtccaaccgtatccggaggagtttgtggcccagcgaagagaaatagttgcagccgagactaagaagcagaacatcagccgattggatagatggcaaaagaaaaagagtcaaaacctatcagcaccagaatcctctccagacgctcatgcatcttctaatgacgcggtgcagagccacgaggaccaagcaaacacaaatcttagttcactgtctcaaatgaactttcaagtggaagcgatggctccgccaggcgtgtcgtcatctgatcttagcggcatcggagacgatgaggacgaacagcagcagtcaggatttcaggatgagaacatcaaccgtccagagacagagattaatgagaattcggtgagatgtgatccaattaatttaggaaggatgcggactggatgtataaattcgcaagcaaataacagtttccggaatacggagtctgatccggactactatatgtttggcacccaattgagcacattagtacgacccacgtcgactcaagagcctgacgatcaggtaaactgtccagagacagagatgaatgagagctgggtaaggtgtgatcaaattaattcggaaagcttgtcgattggaccgtcaattgattcggaaggaactatcacttttcaaaatacagaatctgagccgatcgacgtcacctcaatagcctgatgtccatatattaaactatataaagttcttcatttattggtgttaattaattaaaaacatgtaatccctaaaaatgttataaaatgtataataaaaatcttaatta

SEQ ID NO: 13344 - protein, 337 aa, DROSOPHILA
MSGTQMSAFLRKYLADEDKKIRAQFKESDPNNKLILWMHEKTRITEEDLARPYTEDEVKELCLRTKVKVDMTAWNCLWEAKKRFEAKGRFVNKSERFINRMYMKAVRRKMVQPYPEEFVAQRREIVAAETKKQNISRLDRWQKKKSQNLSAPESSPDAHASSNDAVQSHEDQANTNLSSLSQMNFQVEAMAPPGVSSSDLSGIGDDEDEQQQSGFQDENINRPETEINENSVRCDPINLGRMRTGCINSQANNSFRNTESDPDYYMFGTQLSTLVRPTSTQEPDDQVNCPETEMNESWVRCDQINSESLSIGPSIDSEGTITFQNTESEPIDVTSIA

SEQ ID NO: 13345 - DNA, 5581 bp, DROSOPHILA
cttgacctgattccggccgaaaactcttaccggtttacacgatctaggattaacaatattaaaatttattaccttaaagttgatcttacggctgcgtaattgttaattgttactattgaattatcttgggctaggtctaacttcttcattgtgtgtgtgtgtgattaccttaatggtttttttttaagcttgacaggctgaatattcattatttttttaaattctttgcaattattcggttcacttcatatagtcgtggtattattgaagacgtttgcaaagatttaaagtgtacttgactaaacaacagcgtttagttggtcgatcgaaatattgcaccattgtgatgtttaatttcggacaaactttcttgaattcactccttaaatctaaattattttaataccaatttgttacttgactttagagctcttcgtttaaggatttacaactaatcgaattcgtttctaggttaatatttgattttgttttgtttttttcgaaagaaggcatggttatgagctagcgatttccatgaaataccaccggcaacatttagatattaagttatttataaaatatacttgcttaacatacagtagaatcatatataattacgcacaggagtgatggggatgtgttattgcaggtgaacgtgggaacaatgctaactctaatactattccggaaaagtctaacaaacatgcgctttaggctctaccaaataaacaattaacaattaatacaaagcgattacactgctagtagacaatggggcgaaaagatgttttgtttagtcgattagatttggcttcgattgcggatattgttagtagaagtgcggcggcggcaacgtttgcgagggcaacgttgtcggctgctgttcccatcagacaacagaatctttccgtatcctgaatttgttagcatgttttcggggggaaaagagagacaagacaacatttcatcagcaatggaagggatgggagttgagttagtttcaggaattcggttgcttaaaactattttcgcaccacatatagttctcagtctgaggggcacgcataacgcccacgccgccgcccagtcggcggtagttcatgcagccgcacaaacgccattggttcgtctctgggtcgtagacctcgatggttttcaaataggcggaaccatcaaagccgcccacagcatacagctgtccattgacgacggccaggccaacctaaaatggtgcgatttcatttaatacaatactattcgccgagaaaaagtgtaacaaaaactcaccccactgcggcgggaggtcatggccacgatggggctccaggtattggtcagtggattgtagcgctcggcggacgagagctccatgcaatcgtctcgcccgccgacggcgtaaatgtagttattgaacacagcacagcccaggtgcttgcgtcgcgttgacatcgggctgactgctacccatttgttgtgtctgtaatgataaaatcggggcaatgtaaatcaaacaaatactacgttcaagtgcaatgtacattaaggtcatttgttacaagcgatagaaaatgtacttgtacgtctaaagcttttaaatgctttatttatgatttacctgggatcatatcgctctacggtgttcaacgggcactgtccatcggagccgccaattgcgtagagaaatcctccaagcacggctaccgccactcccagtcgccttgttgtcatcggtgccactttcgaccatttgttctcttttggatcgtagcgctccacgtggttcaaacattgaacgccatcctggccacccaccgcgtacaagaagccgtcgagcacagccacgccgacgctggtgcggcaggaagtggtgggcgcaacgtcgcaggaccattgattcgtttgtggatcataacgctcgatgctattcagatagctctggccatcgtgaccgcccacggcgtaaagtagatcatttaacacggccacgccaactccgcagcgtcgtttgctcatgggagcgaccattttccagtcgttggtctgaggatcgaaacgctccacggaggcaatagcatcgccggaacaccaaccgcccacggcgaacaggacttcgcctcgtcgagttggctttcgcggtctggtgcgtggaccctgcatcagcggtcgctcctgcggaagcaacagatagttcttagcctcatccaccaaatcccggcaggcctcgtcgctgcgcaccaggagatcagagcccaccgtgccaaccaggaactttggcgacagcagaggcagacggacgtgttggagcacctgagaatattcgaaaatatcaattcattatttatttattagttgcaatacttaaaaattgagctgtttatattattccaaagtaattatcaaacggaacaagtaggaatcggtgagtagtaatcagatatggtttacagtagctcacctgtgccagatgttgtcgccgctcggcgacattgtacttgagccaggacatgaccgcgttgaagacctgctcctcggagcgcacgtttagctcgtcgctgcaaatgatgtccaccagctggccgacggggagcagcagaaactcctcgctctccatcacctcctggaagttgtgctgcgtgaatttgtcggcgatccgtagaagttcccggcaggagtgtgtgtcggcaaaggcgcgtatgcccaggcagttggtgggatccaattgccgtttgaggaactcgcagcagatgtcctgaatctcaaccagttgaagcaggcaggcggcgggaaggagggtctggacattcgactcctcgacgattatgtgggcggtgtaacaaaagtcgatgagcagctccatggcattctcatcgatgtcgcgtatggtgacctcagtctggcgcgattcctccaattcgccagtgaacatggcacagaagtaggagctgcaggcggacaggattacccggtgggcaaagatcttccgtccgcccacgttgagcaccacatcgcagagctcccgatggcgccgtagcatatttagttcagtgagcgtgaccttcggatgtttctcggacgtgtgagagaggcgggcgggcgacggaggtcggtccactgccgtagatccaacggaggagccgccaccagccgtggaattaccaccggtaccggtgacagctgttggcatacataatgattttgagtataaaaataccatatgtttggaatagtacaaataaacttaatggtaccgattaattggaattgtgaatgagagttcaaatacttttttatgaaggaaaaaccttttctaatagtattttttagctgaaagatcatagtcttacgaacaaatatgaagtatttaaagtcacatgaggcacacaggttgcccctggcttgctctcttcccaattccaaaccaagctcctatcaaatccttaccagcatcccgtggttgagcggtggagcccgagcccggcaggtcgcccattctgttcgctgctaagcgcagcgggccggaagcaacccaaccccacacggcgtctatctgtgggcagaaatggtagtatatagtagaatagtgattaatggtcaagtcaaagtaaattaaatcaatgcgtaggtagggcgtagaagggcggcattgaactcgattataagtaagtaagtaactaatcaatttacaaggacattgtgcttcgtttaatatcttcttgaagcgactgtttacttaataaattaagtaattgtacatttttgatgcaaataattcatattctgggcactggatgtggaaattctgatttatttttcttgtcctccgcccttttgcaccacccacacacagacatgctgtgtaacacgcacacattcacaacttcggatctgcggatactaaggtggacctttcgactaaagaaacatcttaacactaatacgagtgttatttaaggtattcattcaacacgttaagtttaacaatccaccattcgtataaatgatataaaataaatattaataatccttaaatatttagaaactttaagctaaaagatcgttacttgaaacttctgttttgaatcttaaaatagctaagttttaaaattaaaacatgtactttaattggtaaacaaattggcaggttgagttaatcgatggttaagataaacagttctctagttcaataatatgcttgtggaattatcttcaacctaatttaattaaaactgaaatctcttttattcatgtgatatatgttcaatcgcttttacaacattcactccatggaacaccttaaaactgaaaggtaacctggtccacccacaagcacacaccacacacacacacacgcggatgatgttggtttagatttcgatgtatatgttggtgtcccaacctttgcgtctctgttctctacggatacaaagcacgtccagggccagctgcaggcggaaaatttcgaaaatgcaatcttgatggcttaaaaggaccacatcgaagattttccttgcgcgaattgcacttttcagtacggaaaaatcgttttttggttggcctggaaaagtcgaaacacgaaacgattggtatggcgatagagatgtgagaaatgcataacaatatcagtgtatcgatatttttgagaatacacttatttatattgtgatactttggtggacatttcgttatatcgatattgttattaaatcgtaaacgtaagctaattttaaggagatctgtttgaaatatctcttcacattttttttcgaaattaaaataagagatcacatatttttaaataattaaaaataaaataaacactatttgtatacaactacaagtaagtgcaacggaagggaatctaactgtgaattattgaaatcattataataatctcttaaaattttcattagtaaactgtcttttaatattcccgaaaaaataagcaaataacgtaagacaggctttgtaagagtacatttatcacagagccaactgtatttggcttccctggtcgctaaagaaacggtatattttggtatcttagtgagcagcatgctggtattttttatttcatactatttctatacgcgacgctgaagaggaaggcgagttttgagcagttgaaaagcccgttaaatagtgcaaaatagtagctaattttaagtgcaacgtgtaaataaaggcaatttagatcgcgaaaaagttcggtgagcaaataataatttgagattggaaagtggaaagtacgtgaactgggcgagaaaagaaaacggaaaaacgtgagactgtgtgcgtgcgaagaattttccgtctccctcgcaccaaagtggagcgcactcaattattttgtggatggagtggaacacaaacaacaaaaacgacaacgactatagcaataacaaaaacgacgacacagcaacaaaaacagcaatagcaacaacagaattaaatgcaaatgcaaaacatgttgagggaaagagagcgaaaatcgagagaacaatagcaaaaggatgtaatgcaaccgatggaataactagagtacaagtacaaaaattgcattggaaatttaaattcgtgcgac

SEQ ID NO: 13346 - DNA, 2114 bp, DROSOPHILA
atcgtttcgtgtttcgacttttccaggccaaccaaaaaacgatttttccgtactgaaaagtgcaattcgcgcaaggaaaatcttcgatgtggtccttttaagccatcaagattgcattttcgaaattttccgcctgcagctggccctggacgtgctttgtatccgtagagaacagagacgcaaagatagacgccgtgtggggttgggttgcttccggcccgctgcgcttagcagcgaacagaatgggcgacctgccgggctcgggctccaccgctcaaccacgggatgctgctgtcaccggtaccggtggtaattccacggctggtggcggctcctccgttggatctacggcagtggaccgacctccgtcgcccgcccgcctctctcacacgtccgagaaacatccgaaggtcacgctcactgaactaaatatgctacggcgccatcgggagctctgcgatgtggtgctcaacgtgggcggacggaagatctttgcccaccgggtaatcctgtccgcctgcagctcctacttctgtgccatgttcactggcgaattggaggaatcgcgccagactgaggtcaccatacgcgacatcgatgagaatgccatggagctgctcatcgacttttgttacaccgcccacataatcgtcgaggagtcgaatgtccagaccctccttcccgccgcctgcctgcttcaactggttgagattcaggacatctgctgcgagttcctcaaacggcaattggatcccaccaactgcctgggcatacgcgcctttgccgacacacactcctgccgggaacttctacggatcgccgacaaattcacgcagcacaacttccaggaggtgatggagagcgaggagtttctgctgctccccgtcggccagctggtggacatcatttgcagcgacgagctaaacgtgcgctccgaggagcaggtcttcaacgcggtcatgtcctggctcaagtacaatgtcgccgagcggcgacaacatctggcacaggtgctccaacacgtccgtctgcctctgctgtcgccaaagttcctggttggcacggtgggctctgatctcctggtgcgcagcgacgaggcctgccgggatttggtggatgaggctaagaactatctgttgcttccgcaggagcgaccgctgatgcagggtccacgcaccagaccgcgaaagccaactcgacgaggcgaagtcctgttcgccgtgggcggttggtgttccggcgatgctattgcctccgtggagcgtttcgatcctcagaccaacgactggaaaatggtcgctcccatgagcaaacgacgctgcggagttggcgtggccgtgttaaatgatctactttacgccgtgggcggtcacgatggccagagctatctgaatagcatcgagcgttatgatccacaaacgaatcaatggtcctgcgacgttgcgcccaccacttcctgccgcaccagcgtcggcgtggctgtgctcgacggcttcttgtacgcggtgggtggccaggatggcgttcaatgtttgaaccacgtggagcgctacgatccaaaagagaacaaatggtcgaaagtggcaccgatgacaacaaggcgactgggagtggcggtagccgtgcttggaggatttctctacgcaattggcggctccgatggacagtgcccgttgaacaccgtagagcgatatgatcccagacacaacaaatgggtagcagtcagcccgatgtcaacgcgacgcaagcacctgggctgtgctgtgttcaataactacatttacgccgtcggcgggcgagacgattgcatggagctctcgtccgccgagcgctacaatccactgaccaatacctggagccccatcgtggccatgacctcccgccgcagtggggttggcctggccgtcgtcaatggacagctgtatgctgtgggcggctttgatggttccgcctatttgaaaaccatcgaggtctacgacccagagacgaaccaatggcgtttgtgcggctgcatgaactaccgccgactgggcggcggcgtgggcgttatgcgtgcccctcagactgagaactatatgtggtgcgaaaatagttttaagcaaccgaattcctga

SEQ ID NO: 13347 - protein, 623 aa, DROSOPHILA
MGDLPGSGSTAQPRDAAVTGTGGNSTAGGGSSVGSTAVDRPPSPARLSHTSEKHPKVTLTELNMLRRHRELCDVVLNVGGRKIFAHRVILSACSSYFCAMFTGELEESRQTEVTIRDIDENAMELLIDFCYTAHIIVEESNVQTLLPAACLLQLVEIQDICCEFLKRQLDPTNCLGIRAFADTHSCRELLRIADKFTQHNFQEVMESEEFLLLPVGQLVDIICSDELNVRSEEQVFNAVMSWLKYNVAERRQHLAQVLQHVRLPLLSPKFLVGTVGSDLLVRSDEACRDLVDEAKNYLLLPQERPLMQGPRTRPRKPTRRGEVLFAVGGWCSGDAIASVERFDPQTNDWKMVAPMSKRRCGVGVAVLNDLLYAVGGHDGQSYLNSIERYDPQTNQWSCDVAPTTSCRTSVGVAVLDGFLYAVGGQDGVQCLNHVERYDPKENKWSKVAPMTTRRLGVAVAVLGGFLYAIGGSDGQCPLNTVERYDPRHNKWVAVSPMSTRRKHLGCAVFNNYIYAVGGRDDCMELSSAERYNPLTNTWSPIVAMTSRRSGVGLAVVNGQLYAVGGFDGSAYLKTIEVYDPETNQWRLCGCMNYRRLGGGVGVMRAPQTENYMWCENSFKQPNS

SEQ ID NO: 13348 - DNA, 8002 bp, DROSOPHILA
gcgccacgtacgatgactggcgattggtcggattggttccgttccgcaactccgacttgaaattcgaatgctattggttattggacggcgacggctgattgctggccagtggctagcatcgcacggtgtgcacttggcctccggatcaccaccgagattccgattacgttacggtcgcgagtccgccgcgagttcactgcgaatttcgtgtcgttttgcttctaattttcctgcagaaaataaagaaactgtagtggaagttcagtgcgcgtctgtgtgcgtgtgtgttctgtgtgtgtgtgctggcgcatctgcaggtgtgtgagtgtcagtgttaccaggtggttggttgcgtttcctcctacacatatcgatgggcgataggcaacgataatctgcgatctgaaaaaatctttttcaaacactgtgccgttagaaagcttaaacaatatttagaaatatgattattattttcaaatcgataaggattttgttaaacaatatttagaaatatgattattattttcaaatcgataaggattttgttaaaaaaaaaactttttagaacccatatattttttccttccatacacaccttgctatatctacatttaactttaaaatccccaaactacatcaaattacatttatattaaatagtaattgttaatttctttgtaattatacaatatgtgaaaataattcatatctccggtcactattaaattatgtgtgtacccaaaggtgactcatggccaacagtaaaacagattgcgctcgaaattggattacacatttttatttataaatatgtggtctgataaatggcaaaaaatacaagtgttcaaggtgggaacttttgggccgcggcctcggcagtcggtgctccatgtgccggatcacttcttgtactccgcccaagagtagcggaaggagcggatcatgtggataaggctgcaaatacaaatctggtaaaaacggagggcagtgtttgttgggcaacacatgggagttgtggtgtgaatggcacatggacggcacagggacactcacaagacaagacgatgacgtatatacaataaatcgtttattcgtaggcagttcttgcataatataaaataaatatgtatacagttacaagtaatttaaaagtacaaatacagtttcatttccataggttgttttgtttgccctctcttgtcatcttaatagttccattcacacattgcagacacaagatctttagaagctttcatggacgccttacacaacaagacaacaaacacgaggcatgatggaggggatggatggggtggtggtgttcgattgttggacaaaaaacacaaaatggtcgaaagcgggcgagtatataaataagtaaagcaggcgataggatgaggacgatccttagtggctacagggtatggattgcaagttgcaagtggtatgtgaatgttgcagtttgcagttagcatgttgttaagcagagcatggcctttacatggtgttgtaggcggcggtgttaaagcctgttttcggagcacttagcctgctcagcggatgcgtcttcccgtgctgcgccaaccgccggatctgcacctgctgctgatgctgctccggttgcagttgttgctgctgctgttgctggtgctgaacgttgctgctgtgactgacgcggacgggcgcgggtggcggtcgactgtcgctatagtcatgcgtggatctgttggacagcgagcggtcgtagtaggagagcgggcgttgcttgaagctagtagtggtagtggtgctgcaggagtggctgatgttgctggcggttccggcgggtggcagtggggcacaggcgactgtgggggtggcggccgcctggctactgcaggaagtagtggtttgatatttatgcactagaccttttacattacgatcacaattttcgcttacgctggaatcggacgagttggaggcggaggagttggagttggaggcggcggacacgtggttggcatgctgcgccaccggcgacgatggcagtgattggtggctagtcgtcttcttgccgggattcgctgagcaggctccggccaccgccgataccgacgttgcgattgttgaactactgcccgatcccgctgcagtgccaccgcctcctcctcctcctgtgcccaccactcccgctttggcttcgaaattttgcttgagtatttgcacattgcccgagatgcgctgatcgtcggccagcgtttgtccctggacgcgcagcactaccgtcgcctcatggtcgcctggcgtggtgttcttgttctcgatgtcgctggtgtgcatcagctcctcactattacagcgtagtggctgacgctgccgcggactgtgcgccgaggaggcgctcctatagaggcttgggcaccgcctctgcccagcatccacagcctcgagtagcagctcctggctttcttcctggcagcgctttttcagcgaggtgctctcttccagcttctgcttggtgcgctttacggtgccctcgccaactccaactatcggttccacagcaacggcgactccttcgattacattgcaattggaactgcgcttgaggtcttggataacgccctcgaagatggccgtagtgttgcgattggagtcatagtaggagccggaactggtcctctgcggcagacagcatcggttgtctcctgatccccaacttgcgtgccgcgaaggcagctcccgctgacgtgtgcctcggggacgcagaatggcgtttgactgctgcttctgttgctgtggcgtggggtccaggacgatgccgccacttggacccaaggactctgtccaggagtgcgtctttcgacgctggcgcttctccccttcatccttggcaaaaacactgtccacctgcgaggagaatacatccgaacagctagaatcccgccgcgagtcaatatttccactactgctgccactgacactttttcccaagtgagaggtctgtgtaatcagttttgtcagcgaggtccagacaggttgctgtggcagctggtccgcccggtgcgcctcgagatcgtgaattcgtgtgcgcactgacagaggcgtgtgtttctggatgtgcagcacctggttctgggtgacgctgtagttctcgccgttgctgcctgggaagcgcatattttttggctcctcggccacgctacgttccggcgtaaggttctccatagactggctttgctgcttggtaaccacagccgtctgggttttgggtgatgtgctgctcgagcgcctaaccatgcgacgctgtgacttctgggcgatggatcgccggtgcatgcgtgaaccatcctcctcttcgccatcgggtgttacgcccgcttcaccagtcgacttcgacttggcctggtttagagcctgaatgaggggcgttggttcgctaccaggcaacagtcgcgcgtcctttgtgctcttcaagttcgtctcgctcttgctgcgctgcagcttctccttgttcttcatggcgtccaacatcccactatacgtctccagctgattgaggaagttcttgttgggctttatacagctgcgcctcttcttcacgtgctctagcgcctgctggaactcccactggtaagccttcatggcatatgcgatgacaaccgaggcggatcggctgacgcccatcttgcagtgcaccagcaccttggatccctcggctttcgcccgcgtgatgtagcggaacgtatcgtcccagtacttgagcaggttcgtcttctcatcgtcgtacacgcgaacgttgaaatactcgaaggtgcccggaaagaagttatcgatctcccgcgtcacgttcaggatgtggcgaacgctgaaaatgaaaataagttgtcgctgattttagccaattttcccaggatatcaatagtgtggccttttttttctcttaaacatacccgtttttctgcagctcctccaagttgctggcattccactctgatcccagatagacgtgctcgaaaatcttggtgggggcatccatttggcctagaataacgagcatttcggcgtcgataaacgacttgtactcgcccaaatccatgtccaggatctcctcgaggcgtccgcgtatatacttggaggtgacctcgtccaggtccactgacatcatgatggccttcagcttcatcttaatgacactttcggtttcctccttttcggggggtctgtttatggcattcaagggaaagaggaattaaaaccgtaaataattagttgtaccgaacccttacttgtttcgtatggcatcaggcgaaggtggtcggcggctctcgagcgcgtccatggcattccactcgttcagacaagactggtccgactcgatgcgcctctcgtagctggatagccagtcgtgggagggtccactggcatagaagttgttctcacgagcctttttcgacactttgtgcagcgtctgcagcgcggacctggaaagaaacaagggtttaatttgtgactgaaggggatctgactccaaaggaggcacctaccacatggcctgcactgagaccggcttaaatatatgcgttttttcgtacactttgacgctgaatccgctgaaagcaagataagataaaccattgaaattaaggaaatgcacatcacacgtttatcagaacaaatacactctgccatgctattattaaaatagcttaagataaattggaaacaaatgtgcgacataaatgccaccgctcaactaggaaattggtcaaggcgacaccgatttgtgtatagattaggggcggctaatttttaaattaattctataaataattcccaaggttaatagcgacaattaggcagttatgagtgcatgactcttacgagatgaatgcccagtcttacccatcgccatccaggtgaattgtggtgtccgccaggatgggcaccaccaggccaatggtggtccgctcgttgcagtctatgcccagcaggcaggactcctccatgcccgaggtattcttgttgtcgccggccgccgttgcgttttccttgtctgctgttttatcacatttgctgctggcctctgtggcggtctgctcaacggacagctgacgctgcgtggggaccgccggggaggtggacgactttgttcccgcggatccaccaacttttaccgagtggtgacgcatgatccggtggcgccgacggtcgctggtgccgctccgacaacaactacgcgatgcaatcaccagatagcgcgtgcggttggaccgctgtgactccaacttgacagccttttgataggaatagaaagatatgtttaaaagatagacaaagtaattttacattggatacgcaccatctttagcgtgtcctcgcgctgcaacaggtaaaacattgattgcaggtggagctggatgtccgagttgttgctttgcgtactgttactggagcgggtggagtcggtgctcaggcgacgctcgctttgcgtcaggggcgggatatccttaagagccagtaccagggcggttcccttgccggcaaagaagcactcgctgcgatcgtttcctttgctattgccctcgtcgtcctcggactcgccatcctgatgttatagagaaaggaaagttgtttactcggtgtttaagaataccttatcctgctgcacctcacccgtggggttaggctaaatataaggatgtcgtctggcaaagaacaaacttgcatgctcattattttgcaaaggggtaagataaactcctgattatagtctacacttcaagggcggaaaagaagcaaagctgtatctgcagttccaagaaatctgattgttcaactgaataccgtctgattttgagaaaagggtcacaagttcgaaaaagattccggtttagtgaagtattttttttttttttatattttctgatttcttagaaataataaaatgttaatttatgtgttcaaaaataccgatttgacatattgagcatatctgaattaaaacgttttgtaaaattaaattgatcaacccccgatattaatttttccctctgtgcaggcggacgtcaaggtctcgcgaactatttttgggcggtggggcggcgaagaaaacaaaaacaagcggtaagcggaaagcgacaaaaacgacaaataaggcaatgcaaaagtctgttgaaaaatatagacgtcgcgacgtctgcggatttgcttgggttacaccaaaagcagcgcagcgcagcacagccgatgacgatgatgacgctgcctcataccgcccacacgcgaacgttgaacgtcgaaatccaaaaagcgtaagcaacaagctggcggatgataaacattgggcatgaaaagcacatccgagcacacaaaggatcatggccaaaagcggaacacgcactaaagagcctgcccgtaattggctctcctggcagagtgggggtgaccaaaacaaagcacacacgcatacgcacacgcgaaaaccatcaagtctcctctcaccgaattcgagcaggagcccgccacactgggagagcgctgcaccgtcaccagcgccatttgttgttgccgtggtcgtggacgtcgtcgtcgtcgccgcagccgctcctccacctcctgctcctcctcccccgccgacgcctcttgaccctcgtgttccacctggcgcagatgatggcgatgctgcagcggtgtcccttgcaatcctctcctgcttcggctccttctgctccacctccttttccctgtgtgtgagtgtgcgcgagagtgtgtggtgtgtgtgcaagtgttgtgggctaaggctacaaatgcattttcatatcgctgcctgctggccgttgtttttgcagtcggctccgcgacctcgtcctgcgatcgtcttggtttccgctttccggacactctagccaggcggttctctctaagaaacagcgtgtccttacaattaacggacacacacaacgctgctaaatggtaaatagactacacgaatttttcttaaaagaaagacagtgaggacgccatttctaatcgataacactagtatcgtcaggcaatcgttctggcagggctggctaactatcgcaagcgaaagcaatgttcgtgtggtacaccgaaaaaagtacttattaatgagaaacgcagtgatgtttgtatacttcttgatatatcagtaaaacaggctttaatacatttttatgtactcttgcctttttgatgattaaaaatcaaaaaattaagttacattaagttatcatttatcgaataacaagtcaaaggtagtcagaggtggtagccactgcacagctgtttagtgttggaaaataacaacaagccgaacagatgattgtgaaaatcagctggcccaagaacaacataacaagcgaatgcttccggcggtttggatcttttaaaagacgctcaaaatcgaagaaaatgtcagcattcatcgaggaaacaaaaagcctgctgccgcggatcgccttcatagcctgcggatgcttcagtccacccacacccatgcaccttcggatgttcggtgagttaaactagattgtgaaattctgcggtacataatcgataaaattacgcggcatgtttttgtcaacagagatagccaaggaccacttcgaaatgcagggaacccacagagtggtaggtggcatcatctcgcccacgcacgactcatatggcaaaaagggtctggcctccgccttggacagatgtgccatggtcaagctggccacccagagctccaattggattcggttgtccgattgggaggtgcaccagaatcagtggatgcgcacgcaggcggtgctccagcaccaccagaactatatcaataaccacataaattccggcgggggaggcggagatgacggggagaacacacatctacccggatggctgcctcgtgggttgcacgacagtcgggatcctgtacatctgaagctactgtgcggtgccgatctgctggagtcctttgctgttccaggcctatgggcagaggccgatg

SEQ ID NO: 13349 - DNA, 4467 bp, DROSOPHILA
tcctcactgtctttcttttaagaaaaattcgtgtagtctatttaccatttagcagcgttgtgtgtgtccgttaattgtaaggacacgctgtttcttagagagaaccgcctggctagagtgtccggaaagcggaaaccaagacgatcgcaggacgaggtcgcggagccgactgcaaaaacaacggccagcaggcagcgatatgaaaatgcatttgtagccttagcccacaacacttgcacacacaccacacactctcgcgcacactcacacacagggaaaaggaggtggagcagaaggagccgaagcaggagaggattgcaagggacaccgctgcagcatcgccatcatctgcgccaggtggaacacgagggtcaagaggcgtcggcgggggaggaggagcaggaggtggaggagcggctgcggcgacgacgacgacgtccacgaccacggcaacaacaaatggcgctggtgacggtgcagcgctctcccagtgtggcgggctcctgctcgaattcggatggcgagtccgaggacgacgagggcaatagcaaaggaaacgatcgcagcgagtgcttctttgccggcaagggaaccgccctggtactggctcttaaggatatcccgcccctgacgcaaagcgagcgtcgcctgagcaccgactccacccgctccagtaacagtacgcaaagcaacaactcggacatccagctccacctgcaatcaatgttttacctgttgcagcgcgaggacacgctaaagatggctgtcaagttggagtcacagcggtccaaccgcacgcgctatctggtgattgcatcgcgtagttgttgtcggagcggcaccagcgaccgtcggcgccaccggatcatgcgtcaccactcggtaaaagttggtggatccgcgggaacaaagtcgtccacctccccggcggtccccacgcagcgtcagctgtccgttgagcagaccgccacagaggccagcagcaaatgtgataaaacagcagacaaggaaaacgcaacggcggccggcgacaacaagaatacctcgggcatggaggagtcctgcctgctgggcatagactgcaacgagcggaccaccattggcctggtggtgcccatcctggcggacaccacaattcacctggatggcgatggcggattcagcgtcaaagtgtacgaaaaaacgcatatatttaagccggtctcagtgcaggccatgtggtccgcgctgcagacgctgcacaaagtgtcgaaaaaggctcgtgagaacaacttctatgccagtggaccctcccacgactggctatccagctacgagaggcgcatcgagtcggaccagtcttgtctgaacgagtggaatgccatggacgcgctcgagagccgccgaccaccttcgcctgatgccatacgaaacaaaccccccgaaaaggaggaaaccgaaagtgtcattaagatgaagctgaaggccatcatgatgtcagtggacctggacgaggtcacctccaagtatatacgcggacgcctcgaggagatcctggacatggatttgggcgagtacaagtcgtttatcgacgccgaaatgctcgttattctaggccaaatggatgcccccaccaagattttcgagcacgtctatctgggatcagagtggaatgccagcaacttggaggagctgcagaaaaacggcgttcgccacatcctgaacgtgacgcgggagatcgataacttctttccgggcaccttcgagtatttcaacgttcgcgtgtacgacgatgagaagacgaacctgctcaagtactgggacgatacgttccgctacatcacgcgggcgaaagccgagggatccaaggtgctggtgcactgcaagatgggcgtcagccgatccgcctcggttgtcatcgcatatgccatgaaggcttaccagtgggagttccagcaggcgctagagcacgtgaagaagaggcgcagctgtataaagcccaacaagaacttcctcaatcagctggagacgtatagtgggatgttggacgccatgaagaacaaggagaagctgcagcgcagcaagagcgagacgaacttgaagagcacaaaggacgcgcgactgttgcctggtagcgaaccaacgcccctcattcaggctctaaaccaggccaagtcgaagtcgactggtgaagcgggcgtaacacccgatggcgaagaggaggatggttcacgcatgcaccggcgatccatcgcccagaagtcacagcgtcgcatggttaggcgctcgagcagcacatcacccaaaacccagacggctgtggttaccaagcagcaaagccagtctatggagaaccttacgccggaacgtagcgtggccgaggagccaaaaaatatgcgcttcccaggcagcaacggcgagaactacagcgtcacccagaaccaggtgctgcacatccagaaacacacgcctctgtcagtgcgcacacgaattcacgatctcgaggcgcaccgggcggaccagctgccacagcaacctgtctggacctcgctgacaaaactgattacacagacctctcacttgggaaaaagtgtcagtggcagcagtagtggaaatattgactcgcggcgggattctagctgttcggatgtattctcctcgcaggtggacagtgtttttgccaaggatgaaggggagaagcgccagcgtcgaaagacgcactcctggacagagtccttgggtccaagtggcggcatcgtcctggaccccacgccacagcaacagaagcagcagtcaaacgccattctgcgtccccgaggcacacgtcagcgggagctgccttcgcggcacgcaagttggggatcaggagacaaccgatgctgtctgccgcagaggaccagttccggctcctactatgactccaatcgcaacactacggccatcttcgagggcgttatccaagacctcaagcgcagttccaattgcaatgtaatcgaaggagtcgccgttgctgtggaaccgatagttggagttggcgagggcaccgtaaagcgcaccaagcagaagctggaagagagcacctcgctgaaaaagcgctgccaggaagaaagccaggagctgctactcgaggctgtggatgctgggcagaggcggtgcccaagcctctataggagcgcctcctcggcgcacagtccgcggcagcgtcagccactacgctgtaatagtgaggagctgatgcacaccagcgacatcgagaacaagaacaccacgccaggcgaccatgaggcgacggtagtgctgcgcgtccagggacaaacgctggccgacgatcagcgcatctcgggcaatgtgcaaatactcaagcaaaatttcgaagccaaagcgggagtggtgggcacaggaggaggaggaggcggtggcactgcagcgggatcgggcagtagttcaacaatcgcaacgtcggtatcggcggtggccggagcctgctcagcgaatcccggcaagaagacgactagccaccaatcactgccatcgtcgccggtggcgcagcatgccaaccacgtgtccgccgcctccaactccaactcctccgcctccaactcgtccgattccagctagccaggcggccgccacccccacagtcgcctgtgccccactgccacccgccggaaccgccagcaacatcagccactcctgcagcaccactaccactactagcttcaagcaacgcccgctctcctactacgaccgctcgctgtccaacagatccacgcatgactatagcgacagtcgaccgccacccgcgcccgtccgcgtcagtcacagcagcaacgttcagcaccagcaacagcagcagcaacaactgcaaccggagcagcatcagcagcaggtgcagatccggcggttggcgcagcacgggaagacgcatccgctgagcaggctaagtgctccgaaaacaggctttaacaccgccgcctacaacaccatgtaaaggccatgctctgcttaacaacatgctaactgcaaactgcaacattcacataccacttgcaacttgcaatccataccctgtagccactaaggatcgtcctcatcctatcgcctgctttacttatttatatactcgcccgctttcgaccattttgtgttttttgtccaacaatcgaacaccaccaccccatccatcccctccatcatgcctcgtgtttgttgtcttgttgtgtaaggcgtccatgaaagcttctaaagatcttgtgtctgcaatgtgtgaatggaactattaagatgacaagagagggcaaacaaaacaacctatggaaatgaaactgtatttgtacttttaaattacttgtaactgtatacatatttattttatattatgcaagaactgcctacgaataaacgatttattgtatatacgtcatcgtcttgtcttgtgagtgtccctgtgccgtccatgtgccattcacaccacaactcccatgtgtt

SEQ ID NO: 13350 - protein, 1045 aa, DROSOPHILA
MALVTVQRSPSVAGSCSNSDGESEDDEGNSKGNDRSECFFAGKGTALVLALKDIPPLTQSERRLSTDSTRSSNSTQSNNSDIQLHLQSMFYLLQREDTLKMAVKLESQRSNRTRYLVIASRSCCRSGTSDRRRHRIMRHHSVKVGGSAGTKSSTSPAVPTQRQLSVEQTATEASSKCDKTADKENATAAGDNKNTSGMEESCLLGIDCNERTTIGLVVPILADTTIHLDGDGGFSVKVYEKTHIFKPVSVQAMWSALQTLHKVSKKARENNFYASGPSHDWLSSYERRIESDQSCLNEWNAMDALESRRPPSPDAIRNKPPEKEETESVIKMKLKAIMMSVDLDEVTSKYIRGRLEEILDMDLGEYKSFIDAEMLVILGQMDAPTKIFEHVYLGSEWNASNLEELQKNGVRHILNVTREIDNFFPGTFEYFNVRVYDDEKTNLLKYWDDTFRYITRAKAEGSKVLVHCKMGVSRSASVVIAYAMKAYQWEFQQALEHVKKRRSCIKPNKNFLNQLETYSGMLDAMKNKEKLQRSKSETNLKSTKDARLLPGSEPTPLIQALNQAKSKSTGEAGVTPDGEEEDGSRMHRRSIAQKSQRRMVRRSSSTSPKTQTAVVTKQQSQSMENLTPERSVAEEPKNMRFPGSNGENYSVTQNQVLHIQKHTPLSVRTRIHDLEAHRADQLPQQPVWTSLTKLITQTSHLGKSVSGSSSGNIDSRRDSSCSDVFSSQVDSVFAKDEGEKRQRRKTHSWTESLGPSGGIVLDPTPQQQKQQSNAILRPRGTRQRELPSRHASWGSGDNRCCLPQRTSSGSYYDSNRNTTAIFEGVIQDLKRSSNCNVIEGVAVAVEPIVGVGEGTVKRTKQKLEESTSLKKRCQEESQELLLEAVDAGQRRCPSLYRSASSAHSPRQRQPLRCNSEELMHTSDIENKNTTPGDHEATVVLRVQGQTLADDQRISGNVQILKQNFEAKAGVVGTGGGGGGGTAAGSGSSSTIATSVSAVAGACSANPGKKTTSHQSLPSSPVAQHANHVSAASNSNSSASNSSDSS

SEQ ID NO: 13351 - DNA, 14947 bp, DROSOPHILA
agagtggccgtaacggtaacttgctgcacacggaatacgcgaggtgtgcttgagagattccaaaataataccacaaatacattatactacctacgtgtgcactgtaaatgatttttaaagaattcttcggaaaagatctatgattatctattcattgtggcgctatcaagtagaacaaattaagccgcatataatatatattgcgatattaatgttgctgaccccatgaatagtattatatttttatataacttttcttgatccgagttcttatcagggtaaatgtagccatctgaaactgcctggggcgaaataaaacacactttcattatttttcacaattttcttgcttgcaaaactaaactttatccttaagtttgcctttattagatctttattttgaatagcaattcaatgtttttaaaactaatcaattgcaatttgtcgtctgtttgcgtttctattcaaacagcaattgcaacagtttctctactcgactgctttggattttatttcatttaatgaataatgttttcgttttaagttttctcttttttgtgtttgcgattttatttacaaaaaggcatgtcaaagatatatgaataaggatgtgcgttgcaaataaaattgaataagtgggtcgtcgatctaaaacatgaaatttgcaaccaaaatatttgtatcgaagttgtggacaatttgtatacgattcactgaggatctagaccaattttcacggattttcttattttctaaacaatttaggctctgctatcttctatcccgctgcactcttcgtactcgtattactattttattgaaaatacaatattaataatatatcattattctcataagaagcacaatttatgttgttttagtttttatttcatcattttatgcgtttacatttcagtgttttgaacattttttgccgtacatttttcagaattttgttgtttaacattttcagcgcatggtttataatttactctcatttatcatttatggtttgcgtttttataatttgtttgttttgttttttatttgttaacactagacactagataacctataaaaatggttgttttgtttatagttctttatggaaaacatgacaatgaatacaagaaactttacaaaacagtaaacacgctggaaaagttgttgaccgatgaaaaagggggcggggccaaggggcaaatagactatatgtgagaattggtcttggacgcacgcacgcatagttgaactaaaagtagcaatacttagcttaaatgtagcgtataaaaatagtattttcttattattgtttttttttcttgtttctctcatttcagatagactttcaataaaacgaattgagaacactaatttgtattttaaacttaggctgcgttttttttatatgtatatgtaggtatcaattaactgcgatgcatacgttattaatgcatctattttatacttcttccgcgtttgcctcatctctttgacttctgctttctggtctagctagcattgggttcttagtgaatttattaagtgtttaaatgagcattttaaattggtttgactgagacaacttccggctgttcgattgctgacgttgctgatgagattaaaaatgagacacatagtcgatcgacaagctccgcggcctatcgtctctttttgcatggaatgaacgttgtcaaacgaataaacaatcggaaattcgtgtttagtctatatttataaagtagagcaaacagggcgcatatgtttcttgacttttcatcgtaaacttaacaagcgaacagaaaaaatgttacaacatgcattttatgatttttttttttatgttgtatattattatcttttattacaaatacttcggcgctggcgctaattatacaaaaaatttcggcgaaatcaatagctaacataatatattactcttattgtgggtttttgaattgcgctacatgaaatcaaatatacgcttcactatttataaatgtaatgtataaaaatttgtttccatctcttaagtttctggtattgtttctcgttatacgcatacagcgcagaaatacattacaaagcttttgctatggcattatgtatgatgtaatttgtttgggggcgggaaggagaacatggatggggatagggataagggtggcctgaggtaatggtgttaggcaaacaatttgattgcaagtgaaatttgaaaactattttgaagcaaaccgattaatttaacataagaatgaggcgtgatcgtacttcttggtgtttctgtagatatagttgcttgtgtgattgtggcgtatggtgtggttcttgtgaggagtgttggctaaaatttatcctgaaatatgaagaggttattggtcgcagccacggcgatgatattttcttcggggtgccaggcggtgtgcaggatcttcttgttgaaatctagacagtccacgctgatctcatccttctttcgtttgccgccagtgcaaactttccgtggcttaagcaccgttttcggtttgatgatgtccctggacgcctctagcgtcacatcctttttcgagttgcgatcgaagacgcggaagaagttgttgtagcttccggtcattattgagctgtccttgccgttccaacagcactcgaacttgtcgaagatgcagtcattctcgtacagcgagcacagcttggcgcgcaggtattcatgaacctgtaaaaaataacaatgaaattagtatggctctcagaaaaaatcagatgtgcttcaaaaattctgcagatacctctacctttgagaaacacattattttaagtaataactaaccggataggtctcaatgggctttgtttccatatgcagatcccacactttgatgctcaagtaatccctggagatcatgtagcgacccgagttgcttagcttcacatcgctgatggagctgattatttcgctgaaaaagctgcgattcgttggattctcgggctcctcgaactgtttgctgtgccggtcgcatagcgccgccgaacgcatatcacataatcgtattgtgcccttagagctcgagtagacaaacacattgcactcggtcggatggaattcggccgcggtgatcacctctgttagctcctccatgttggttggcttgatgtcgacaatgttgtagctctggttgaccacctccaagtgccacagattgatccgcaggtcgtcggccgacaagaaggtctcctgatccgaattaacgcttattgaattgatgtgataggtgtgtgcattggcgaaggtgcgccgtggggaggcctccaccagcagtggtatctgcttcacggatggcactcggagggccgttacattctgtggatcccggatcagtccgttctcctccttcgtgttgtagccgccgaacgacttgtcacgctcactgaccttccacaatttgactgtcttgtcgttggtcgagagcagaaagtgcacgggattcttttgttgcagccaccggatcttgtttatcttctcctcaatctccagggacttgaggtagtcgaattcgggctcgtgcgattggaatgtcgaatagacattgtattcgccgcgtctcggattggcggcttttgaggcaggatcacgctgcaatagtttcatgatatattaaataatgttacgtttgcataaaatatatttcactcacctgaaagatgacgacgcgaccgcccttgtcaccagtggccagcagctcgccatcgtgattgaattccacgcaggatatgatgtctgcatccgtgacatcatcgtctagggcgcctttaatctgtgagaagcaccaagacgcctctccattacctgaaaagacagagcacgaccaaatgatgagtattcaatttgacactttcggccagctggagttcgatccactgaatggcaattcgattggacaactaactgaaaaggctagcggctcatgaaaccaagtgtaacgtttgatttgcttccgagcccatacatgttcaaaggaacatacatagatggtaagcggaaggacaaccaactatgacgacggtatcctcggcctgcccaaatatttgctaatgacgccatactcggccttccgcgccggtctgcctgcctttaaagtcctttaatctcttggccaaatattcctctttccgttttcttgtctagctgctttcagcccacaaccacgccccttttccatcgctctttttttttttttttgccattctctctctccgcacagccacttttagcgattgcggtacgttgtgtaaacgatgacgttgctgctgtcctccttattcgaaaaccccactttatacactgatattccataatgggagcatttcatttggaaaatgagttttccttttcactgacagtgggatgcatgatggtgtttattttttaatttatgaacatttttaattttttaatcaatatcgaagtaaactggtattaaaagcaataatctataaataaaatgcctccggcatcattataaatttcatgaagataatacataaaatgtttgtcatgcccactgtactccatttcgttttgtatctgccatttgctttttgttttttaggcccccatgtctgggggctgtgtgcgaattttggcaattttttcatcattcccaaatattcattgggctttgtttgtttgatttctttggcacagcccttgcccagcccagtcccatgtgctgtgacctcattatccgctggctattggcagtctgttggcattttcctgctgccattgacgacgtcacaatgcgattgacgaggcgcagcaattgtacatatttatgccgactgtttttattccgagtgtgcagggtatcagcaccgtaataggatcaaaggcactcagtcgtccaattagtcagtcataactcacgtctcgcggcactgcgactatttatagttgctattatatgtggcagcttcgcaaacgcccccgcaaacctaacaaactaccatttagagatgttgagtcattgaactcgtcgtaaatgcacaaatgaaaacaaaagtgttgaatcgatgatgagcaatttaattgtgtaacgtccgaaaattagtaaataaatcatattactgcataacgagattcctttaaagaaaatcgtataaattaggctatgccaatatattaccacatatgattgcgaaacaactcattagttcttacggcaccaataaaaaaataattttagcattttcactgggaagtatatgggaaagaacaagacaatctgtaaaattgctcttgctcgcttatttattcgttagatcgtatataaacgtacataacgagataagtagattttcatgagcgcccgcaaaatggaacaaaataatgaaactcaaatattgacacaattatttaacacaaccacgcgatgtcgctgctaagccaaagctttagcgctctatccccccacctactattatactctgctataccatactatctacctatctatctacaatatcacggttttagtctatatacgctatagggcgggacaactgaacgacctagagaatggcggaacggactgttcggctgacaaacacagaaggcaaggtaaatatatagcgggtgagtggtgaacggggcacatccggcagggaaatccttttttattttggcagccccttggataagttgtttcctcaaaggaaacatggctgaaccactgagcgagcaattaagaatgttggttaggaatcattaatgagcaaggtatttggggaatgcgcacaacaaaattcaaatgcttctttgaaacattttcgctatttatcaaattcggccagtttcacctattgtttatattgtcaagtctagcaaagaaactgaatagtacaggccccacctaatcgataattgattggttgtttagttatgatctcagcttgtttggcttcttgggcacttcaagtgtgcattgcaaattgagcacaaaagagccttaacgttcgtctctgtagcacctcgccagttccgccccccgtcaattaccatatccaatctaatctaagacacacatcaatctgcccctccttacttaaccctctcgaaatcttcgcatttctcatgactagaacatcaaaacttatgtaatgtcttgtttggcgacattttgttgttcaacttctggagacgtgcaggccattaggagatgtccatgtccacttgtgcgtatcttgcagatacacagagactgcatatgaaattgccaaataattttgcatacatcgcaaagaagcaacgaaaaaagtctataaacctgagcgacgtcacgttgtctgaaaatatgcttggggaaattgaataaaatagagggggtgggtggatggggtttcctttggtccattgcgactttaactcaatttgcacatggcaaaaaaaccacgatccagtttcgagcgctctatatctattgaccgagccaatttgtacgccgcattctcagcactttgtgcaattgtttattatttaattatggcaattgtttgtctgtatcgagcatgtgcttgaaatcaattttatactcttgcaaaaagtcctttaaatattagaaaagtatccttatataaaatggggtttactcaaattaaagaatgtacaatacaaaaacaataaaggaatcttttaaaacaattaactcaattgtagcagttttatctgtttactaagtttaccgtactctgtatagatcttcttatcggatgcatactgttgtagcgattcgtgcttaacctttacgagttgctatagttgctcgttttttttttttttgtaatagataatgcaattgggggcgccggctcagttttagtttaaaaaaaatattttaggggctgcgggggcctgtcaatttaacttttgcatgccgctcacgtcgctttcggcgttttgttcaagtgcaaagatcaatgctagttgatagggaaaagttgttattcgaatgcgttcgagactagtttgtttacttctcactgaatttgtttattggcgcatttaatgccaacatcaaaatgatcagaaaagcgaaaatagatcgaggaaatgccaaaacatacgtaaaatacacttgcaatttggccttgtaagctctttattatgtcgaaaaaaactcgaactagaaattcaattatttatataaaaaagagtattttaagaaaataaaatcaaaacgatcacatccacgaaatcacaaacctacaaccaacctcacaatactccactgtagggtattacaaaaaagttggcagttcccacacaaaaagcgagtgacgaacgcgaagagcagcagagaaaaaggaggagagaaggagaagagcatcggcaagggagaggaaagaattaaacttaccggccatgttttaccgaacagtttgcgtcgattttaaggagccgcagctaaaacaacaacaacagcactagaagcaacgaaaaacggagcgacaacaaaaataacaagaacaaaaggagaaggccaaaggagctgcgctcgcgctctctagctccgtctctttctcacgggggtggtgttgttgttgtagctgccgattttaaagtttcaaaaagttgagcgcgattattacacttcttcttctacgctcttttcactaattcgtttgattacactttggttttccgttgttgtttatgcatttgattcttttgttaattgtgtatttttttgtgtgttagcacgacttaagcatgtagaggggaagaaagaactgcaaaagtaggggaaattattttttttgttcccgacgacgacgtcggcgacggcagcgcagcggcagaattttggcgtgcgttttatacgtgcatttgtgcgtgcgtgtgtgtgtgtgcgagcgagcgaaaggaagagagcgagtgcagccggtggttgtgagcgaatacaaaaaaaattacttcacacagataaacgagatatttgccagttaatctacaattattattatttattgcattttgccaaacaaatgcgaaatacaaataaacacacacacacactgaggcagacacacgtttgcgccgcttgctttgtctctttgttttatcgcgaattccgagcaaaaaatatatgcgaaatctaaccttcaaaatgagaacactaaatagtggcgatgccttgttactttacgcctgcgagtaaaaaccgcgtgatcgaaaaagggataagcatgcaatttcccattttttactacccaataaacgcaggcaaaaatcaaatgttgccgaaaataagacgtccaaaaaaagcttctgttttctgattctgtttccgattcacattctgcgcgctgcctcttcttcccgtttttgccgcctcttttgctgcactgcttcgtcgttgcgtcgtaatattaatatgaatgcgagtgagtgtggcttttgcttttgcacaagcggcattccgcctcgattttcgctatagcacgcacttttgcactatttacacggctaccgaaccactcccgcacgctccgctcgcttttttaaattggttagtgactaacggattgcgataaatccaacgcaaaatggaagtataaattttgttgcaaatttcgcactttacaataagagttccaagctaccgaattgccgctgtgcgaacggcgttgcatttgcccagtgttgggcagtataccgaggcgttggtgttgcaaagtactcgcgactaacagcagactgttggcgccaatgttattggtaacggtggtttggcgggcacttcgaattgttaaatgtttaaataaactcgccttttccaaagcataatataattcctattgttgataccgtttgggcaagttcattgaaagcaataattgatcatatttgttgataacatttttattaccgcctgaccatggtctattttttataccccaaaatatattaagttaacatgcatgtggaaaaacttaaaaatatgatactgcattgacttacttgctggcttcttggctccattgatgttgatggccgtgttgagcatgttgccgattttcgtgatgctcgactgtcgcataaacgtccttggcggcagagtgggcggcgggggcgtcgtctgcatctgtgggtccggcggctccagcaccggactctgccgtccccagcgacccattgggtactggatttcccgtggacgcggttaagaatgggctggtccaagacgaacgtgatccgagcgatgatctgcaggcaaattgaacggtcgaatctattagcgtgttggatgcacacacaccggttgtatgattgtataatgcatgtttgcatgaatctccgacttcgtcgcatgagcgggctgcgtgtttttgaatttgtcggccaattaacacctgtcgcacaacgactagtcccctgcccacacccctcggcacctaccccctcgctcttgaccaaacaaatgggttgtgcaaatgaatcgtctcctgtcatttgtttactttaggaattacgcctgcgtgcaaaacagaacaaaacatctgctttcggtttgaattaaattccgccgccttcgtgtttaataaatttaaggtttcttttctctatttcttttctttttttttggtcagttcagaggtgtgtccgtcgtttttggcctcgtctacttttgtagatcctcttttttattgatctctactaaatttatttcgcttccatcagcagggaaataatattcagaatatttcgtttttttttttaaggccagttaatagccaaatgcaaagaggctggctggcgttccaattaacaattacacaaaaaaaggcaatttcgctaatctccagcccaaatatttgattttgaactctgaaggcagcgcgaaaacgtcagagtggaaaattttggccagtgaacaaaaacattgtaaaagacaaaaacatatttaatgtggcttattgtggacatgtgtacaacaaaatcgtggtagtcgcatttttagttgggacacgaaaacaaactaaagccatctatgaattccagaataatatttacaaatgaagaagtcaatcaaatcgtcaaaaattcattaagttcgttaaataaacaaaagtaaaaccacaggcatttaaaagaagctccttcttttttatcattttttttttttttttttgaacttgaacttttttaagaaaatgtaatggatcagattctattaaattttccattaacaattgtacacaaaataagtttagggcgagtttatttaaatgagatacgaattgtttacaattaaaaattcctatgcaaataaattcgtcaataaaacacgtaaatcaaactttttagataagttatatcgatttctttattatttcttgtattgtaaagacttcgccccctaagttttacttattattatgaaataaataaatgaatatttcaaaaatattttaatttaatattttaaattaatatttaagcactgtatttactatctagagcatgcccaatgtatcacttctattattttgacctcgtctgtttacactttgtcatgagtttttgtgtacgatttatttcacacaatttcgcattacggatatacggttacaatatgaaggcgaaattccaccacgttcattaaaggagcgatatatgcagatatatatgggctatacgaagtgtgcagagggggcaggtggcggtcgaggtgtggcatatgcggaaaatcgggtgtacgcaacaagttgaagagtcgcaacatatgcatgactaatggccaagaagaagcagaagcagacggcaacgtgtggaacaacaaatcaaaagaaaaccacactggtaaaatgcgaagaattgtaatccaattaatgggctgcgtcttcaatgtctcgtgtacccgtagaaacgtgagtgcggcagccaatcgcgaattaaaaatcttgccatttcttcggcatgggaagtacagtgggtactaagtgacgtgaacaacaagaaatttatatggataaatacgtctgaagcatagttttgacatccttaaaaaaatattacgcatacgtactgtataacattcttttaaagttacaaaattatgcttaatgtgccattgtttaatagcaaacagttccattttactaaatgttgccttactaagcaacatattgcaaaatattaagtatacgccttgtctaacacttaacaatttgttatagtatgcatttgcaacataattatttagttatttggatcgtttactttttttttagaaatatatttctaatattataccccatatttactgttctgtcataggtgtcactgatgtttaaaaatacactacccgaacactagagatgcaaaaataaacaaacgaaatgaaaggtctattaaatgtgtgtggcatgtgaatggctgcagggacaagcgccagcttttcttttcctccgaaacgcagcagaataacaaacacaaacggcaaaaaagcaaaacaatagcaaacaaataccgaatttttcaagaaaataatcatggcgagatttttgttgttcactctgctgttttcgggaaatgacaaagacaggcaacggaagcgccgaaaaggaactcaaaaataaaattagacaaatacacaatttttttttgcagattttcatgcatactacactggcattacgcattacgcaaatgaaggtgaaatttgaaaaaaaaaaacaaaatactaaaaacatacaaatgcaaacaaattaatgatttatattcgtgtataacaaacttaaatattcaagttcaaaataaagtgtctgaaagcaagtttaattatgactaaaatactttttttctgcctacaggaaccacggatttacagatgctataaataagtgtagcaacagttttagagccacctaaccacgtgccgcacgagactcatttggatcccgatcccaatcccaattccccttccccaatccctggcacactcatcatccaaagtccagccaggtagacgccattcgtctgccgccgaatctttgctgccttgattattttcggatctgtcaacccttctcgcctgcttttcctaattttcctttaatgaaagggggtggaagatggtttgaaggagggggggggtgggggtgtgcacagttatacctggcattgtttatatttagaatttcatatgctcccgcttgccgaactgtccataatatgtccatcaaagtgtcttttcagtttgacatccattggcggcagcagagtgccttactttttgtatctttttggggaggtaagagggtggtattgataaacatttcgacggacagacgtgattactaccatatgtccgaccagatccgtggcaagcaatattgtgcttatcaaactgtttcggctcatccaattaatacacttcacggcccccgaactccaccccactgcactcgtggctggcagatataatgaaactaattagcatttgacaaacaccaatctcatattatattcctcatatacagtgggcgttagtttgtacaaaagcaaacgcttcactgatgaaatttccagaaattttgagtgcaatatcacatgaaaacttgttgatattctgtaaattactccatgaaataagtatacacttggggttgtaggtaaattgctatagaaccaggcgctgttttatctatcattaaaacctgctcttgaccctatggacttcattttgttaccacctttgtattaacaagtaaacaaagtatggctgtgttgattatcaaatcgaataggttaataaaaataactacatttttgatctttagtccactactggggtagaccactgtaccaacaaagaatccgcaaaaacaggacccaattggctaaggcaaacttcagttgggaaaacaaattgtaagcccacaaataatgatttagtcacatggaatcgaaatcaagataaatgcgcgtgctatatggttgttttcttatttttttttcgctttgagcaatttgttcgatttgctaatgcgaacagcttaggcaaatattttggcataaaagtcagcaagtgacaaaatagtagctattaattgtttgtaagtcggctcgctaaacatggccagtgcgagtcaatagttgtttattgtttggctcacagcgaaacaaagcggcctgaaaatgttgttaacctcaaaaaccgccaagaacgtcagccagatcggtcggtattatagcggtgggaggaggaagaggaggatgagggggggggggtggctcagcctacagaaactagagaatcaaatgctatggtaaagcataagcccccgaccccccgcaaaaggttgacgtaacagctaggcagctaaactcttgagaaatggaagcaccactatactttcggcggtattgaaacagctgtctttccataatcgtagcatttgaatggtaaccacacgcgcgcatattaatatgaaaacattttcaaaaaccgaaaaaccaactcaccagcagacttctaaaacaacagatatccaacaaatcacagacacaacagtgctattttaattgacagtctttagatatctcataatttgccatgcactcggctatttttaaactctgattttgaatttatttttggttcctatttctgtggcctccacactttcatcactttcagatcggttctcttcaagtcgcgcgctgcaacggttaaaattcctgtccacacatccgattccactgcacttcttgggcacaggcactttggtttctggttatcacactgcgctggacgggcaaagaggcgtacaaaggcacaatgggaactaatttaaattgaattcgaactcagtgctcgcggccagtggaaaagtggaaaatagggaaactcaaaccgcagcagggcaataaggcgaaacagtcagcgacgacgttaaaattagcactgaaacgcgccgtgcgaatgcgcgcctatgatttctttacccactctcactgctcccaagcggaggtggcctcttttctagctagatatagctataaatataggtaagatcacaagaatatcgaaaaaaagcataagataattcttatcacctctttcgccggatttttgaagtaggatcatcagagataactgctttatatgaaacaaagctagtaagacattaaaaggaaatcgctcctatgagagcgttgacaacgttaaacttaaagcaaatataaactatcacaattgaacaccctttaaattgttatatatgtaagtgattttttttggtttatttattttattttgttgtttatttggtataattactttataagtagaactgttcaaaaacaagccaagtgagctcctctgtttccccaagtactctcacgctctttttttgctctctccagttggtgatgaccgtggggcctggcgctctcttttgaagaagatttttgtaaacaaaaccgcgacacgcattgttgctgctaatgtgattgttgttgttctgataaacgctaatttgcctattgatattgatgttaatgtgcctttgctcacacagtcgcggccaaggagataacactgccccttaatacatagatcgtttcaatctaaaatggatgcaaatttaacatttgggcataggaaaacgtatgggtagacaacgaatatttttgttaaatgaattgatcactttcgataagtgtgtaaatcataaattcctgaacttaagctattgacgtagtgggtgtgtcatgtttgtactttggtaactgcttaacacacagatttatttgcatcataatcactgttgaaagatttctacaggttatatacacaaaaagaaaatctatcatttgaggtagagcactacgtagaagaatattatattttatacagatggcatcgttgtttgttaattcaaa

SEQ ID NO: 13352 - DNA, 3337 bp, DROSOPHILA
ctgactgtttcgccttattgccctgctgcggtttgagtttccctattttccacttttccactggccgcgagcactgagttcgaattcaatttaaattagttcccattgtgcctttgtacgcctctttgcccgtccagcgcagtgtgataaccagaaaccaaagtgcctgtgcccaagaagtgcagtggaatcggatgtgtggacaggaattttaaccgttgcagcgcgcgacttgaagagaaccgatctgaaagtgatgaaagtgtggaggccacagaaataggaaccaaaaataaattcaaaatcagagtttaaaaatagccgagtgcatggcaaattatgagatatctaaagactgtcaattaaaatagcactgttgtgtctgtgatttgttggatatctgttgttttagaagtctgctgatcatcgctcggatcacgttcgtcttggaccagcccattcttaaccgcgtccacgggaaatccagtacccaatgggtcgctggggacggcagagtccggtgctggagccgccggacccacagatgcagacgacgcccccgccgcccactctgccgccaaggacgtttatgcgacagtcgagcatcacgaaaatcggcaacatgctcaacacggccatcaacatcaatggagccaagaagccagcaagtaatggagaggcgtcttggtgcttctcacagattaaaggcgccctagacgatgatgtcacggatgcagacatcatatcctgcgtggaattcaatcacgatggcgagctgctggccactggtgacaagggcggtcgcgtcgtcatctttcagcgtgatcctgcctcaaaagccgccaatccgagacgcggcgaatacaatgtctattcgacattccaatcgcacgagcccgaattcgactacctcaagtccctggagattgaggagaagataaacaagatccggtggctgcaacaaaagaatcccgtgcactttctgctctcgaccaacgacaagacagtcaaattgtggaaggtcagtgagcgtgacaagtcgttcggcggctacaacacgaaggaggagaacggactgatccgggatccacagaatgtaacggccctccgagtgccatccgtgaagcagataccactgctggtggaggcctccccacggcgcaccttcgccaatgcacacacctatcacatcaattcaataagcgttaattcggatcaggagaccttcttgtcggccgacgacctgcggatcaatctgtggcacttggaggtggtcaaccagagctacaacattgtcgacatcaagccaaccaacatggaggagctaacagaggtgatcaccgcggccgaattccatccgaccgagtgcaatgtgtttgtctactcgagctctaagggcacaatacgattatgtgatatgcgttcggcggcgctatgcgaccggcacagcaaacagttcgaggagcccgagaatccaacgaatcgcagctttttcagcgaaataatcagctccatcagcgatgtgaagctaagcaactcgggtcgctacatgatctccagggattacttgagcatcaaagtgtgggatctgcatatggaaacaaagcccattgagacctatccggttcatgaatacctgcgcgccaagctgtgctcgctgtacgagaatgactgcatcttcgacaagttcgagtgctgttggaacggcaaggacagctcaataatgaccggaagctacaacaacttcttccgcgtcttcgatcgcaactcgaaaaaggatgtgacgctagaggcgtccagggacatcatcaaaccgaaaacggtgcttaagccacggaaagtttgcactggcggcaaacgaaagaaggatgagatcagcgtggactgtctagatttcaacaagaagatcctgcacaccgcctggcaccccgaagaaaatatcatcgccgtggctgcgaccaataacctcttcatatttcaggataaattttagccaacactcctcacaagaaccacaccatacgccacaatcacacaagcaactatatctacagaaacaccaagaagtacgatcacgcctcattcttatgttaaattaatcggtttgcttcaaaatagttttcaaatttcacttgcaatcaaattgtttgcctaacaccattacctcaggccacccttatccctatccccatccatgttctccttcccgcccccaaacaaattacatcatacataatgccatagcaaaagctttgtaatgtatttctgcgctgtatgcgtataacgagaaacaataccagaaacttaagagatggaaacaaatttttatacattacatttataaatagtgaagcgtatatttgatttcatgtagcgcaattcaaaaacccacaataagagtaatatattatgttagctattgatttcgccgaaattttttgtataattagcgccagcgccgaagtatttgtaataaaagataataatatacaacataaaaaaaaaaatcataaaatgcatgttgtaacattttttctgttcgcttgttaagtttacgatgaaaagtcaagaaacatatgcgccctgtttgctctactttataaatatagactaaacacgaatttccgattgtttattcgtttgacaacgttcattccatgcaaaaagagacgataggccgcggagcttgtcgatcgactatgtgtctcatttttaatctcatcagcaacgtcagcaatcgaacagccggaagttgtctcagtcaaaccaatttaaaatgctcatttaaacacttaataaattcactaagaacccaatgctagctagaccagaaagcagaagtcaaagagatgaggcaaacgcggaagaagtataaaatagatgcattaataacgtatgcatcgcagttaattgatacctacatatacatataaaaaaaacgcagcctaagtttaaaatacaaattagtgttctcaattcgttttattgaaagtctatctgaaatgagagaaacaagaaaaaaaaacaataataagaaaatactatttttatacgctacatttaagctaagtattgctacttttagttcaactatgcgtgcgtgcgtccaagaccaattctcacatatagtctatttgccccttggccccgccccctttttcatcggtcaacaacttttccagcgtgtttactgttttgtaaagtttcttgtattcattgtcatgttttccataaagaactataaacaaaacaaccatttttataggttatctagtgtctagtgttaacaaataaaaaacaaaacaaacaaattataaaaacgcaaaccataaatgat

SEQ ID NO: 13353 - protein, 499 aa, DROSOPHILA
MGRWGRQSPVLEPPDPQMQTTPPPPTLPPRTFMRQSSITKIGNMLNTAININGAKKPASNGEASWCFSQIKGALDDDVTDADIISCVEFNHDGELLATGDKGGRVVIFQRDPASKAANPRRGEYNVYSTFQSHEPEFDYLKSLEIEEKINKIRWLQQKNPVHFLLSTNDKTVKLWKVSERDKSFGGYNTKEENGLIRDPQNVTALRVPSVKQIPLLVEASPRRTFANAHTYHINSISVNSDQETFLSADDLRINLWHLEVVNQSYNIVDIKPTNMEELTEVITAAEFHPTECNVFVYSSSKGTIRLCDMRSAALCDRHSKQFEEPENPTNRSFFSEIISSISDVKLSNSGRYMISRDYLSIKVWDLHMETKPIETYPVHEYLRAKLCSLYENDCIFDKFECCWNGKDSSIMTGSYNNFFRVFDRNSKKDVTLEASRDIIKPKTVLKPRKVCTGGKRKKDEISVDCLDFNKKILHTAWHPEENIIAVAATNNLFIFQDKF

SEQ ID NO: 13354 - DNA, 3316 bp, DROSOPHILA
tgcgttgcgtaagttggtaaataatctacagctacttacacggaaacctaaaggcactgggatgaagcaaccactttaaattgttttgaaagattaaggacttactctcattttttccatttaaagcgctggcaaagtcttggattattggattattttggcacctaggtgaattatccttcagtcttctaaatatgtagcgaatgagacagcacaagttcatcgactttcgtgaaactaaatttattgttttactgttaaaacgcttagtgcatttgcctgcaatgcctgccaattgcttcatctcgaaaaccccaccacccacatgcaaatgccttggcacttagtttatttcattagacacacacatgtgttttctaccctgtgtgtatatgtgtgggtgtggtgcataaaaattgtcattttcccagcgatttttatagagccccatgctcttatcgccaccccatttttctgttttcaccatcactctctgctgaatgccgttgacagctttacgttttgtgggacgcacagtgacttacataagtacagcgctacacacgcacacaactgctcctttgtgtgtcatttagcttttgtctcacgcgtgccaagtttccccgctcccgaccgcctctaccatccgaattttccccattttccaacttgtttgtgctcttaattttcttgccaagtttgcagttttcgcaacgtttttatatgatttttatacaaacgtgatatatttctctgatgcgcccgtttcgctcaatttttattaacgcagcaacgccccatgtgtgtgtgtgtgtgtgtgtgtgtgtgtgtgtgtgtgtgtgtgtgtgtgtgtgtgtgtgtgtgtgtgtgtgtgcgtgtgtgttgtcactctttgtccttcgtcctttgttctggcttattcaatttcacttattgatttccctgcttatctggcatctatgtatgtatgtgcgccagggggaatgtaatcacaagaaccctacttttgccagataaacgcaaactgacgggcatggacggccatgtgtcggtccactctgttccagaactccataatgatgccgctgtccgaatggcgctcggtgggcgagagagccagtgagtgcacctgcagcttggtcagctccgggcacatcggcgtattcctaaagtgcagatggaaggcgcagaccttgtggaagatggcggcggggtcagcgccatccggccagcccttgaattgccacttgggtcccatggcgaacacggcgaccacccgatcccattcgacgggtgttaggttggtcacgttgtcgatgacccggtagctaacaagctcgttctgaaatttgcatttcataaaggtaattaatctatcgatcaggcatgcacttattagaaattctaacaaccaataccaaggcatatacagctagccataactattagcgaagcacttagaatgaaaaattccttattctccaccgcatcagtggaataagtagaagagcgaagagaagcgtacttagtaactctgtaaatttacaaacttcaagctactatagttttttaacccacctgaaatcgatgctcgactatgacctccttgggccgacactcaggagggttagactgccggccgttacgctctggctcgtagtgcaactcctcgagcagtgtcttgatattgttcaggctgatcatgctggtcattgcatccggaaccacaatgatgggcattcgtgcgtaaagcttcgatgagcgacgatccttgctgttgcttctcgacctttcaatgctttccctactcacagatcggttgcgcttgtccttttgactttcgtgaaaagtcgcgcaattctccaagttgctgccctgcggatttatgccgaactcttgctgtgccttgaggaatttctcctggccatagcgattgtacttggtctttggccaaggcggctctgtcatgatctccggcgggggcggcatttccagctgtgataattccggcaccgtagagtccaagctacgcatcatggaatggtgagccagtttgaggtattcctgagcagtcgtcatctccttctcgcccagcagctgctcctcgaaaacgcggcacggtcgctcccgcttcatggcccgcctgcccagttccttttgcatgttatccaaattacgacccttctcccgctcctgggccctcatctgcatggcgttcttatcgacgctctgcttcatcgccaagcgcttggccttgatgattgcgatggcctccacggtcatggtctcggtaagggtctttagaataggatccatttcggttgtttttcacgcttgattcgcacactcaaatttgagcttgttaaaatttatatatttttttttttaacgatacgcactccgattctgacaacaccttgcagcaaatgattttatgactaaaacttgatacgattaaaagttcagagccaactattttcgattgccatatactattagtatgaccgtgttgctcgataaatgaaatgctgtcaaattctatgaattcaaattgccaaattgctccttgttatgagtttcactgtacaaactcgatttttcttggctcacctcctttgttggcacataaaaaactcataaatattcaaactttctcgctgccatcgtttattttttgtcaaagccattatttatttttattacattgccttggtcagttgttcgtcccgctcctcttcgttcctatttatatattttttttttatttttccgccccgagttgtttttatttgtaagctatttttatttgacaaagtttcaccctcacccacgtcctggtaaaagcatggcaaaaggaattgtcccggctttatgttattgactttaataacattttagctgcaaggcatgaaaatatttttataaattttgtttctgttttcctccgctcggctgtttcttgcatttttccacagcatcgctttgttttgccgccgaagcctgaaattgatttctgcaataggggtgatggggaggtggaggacactcgtgttcccatcataatttatgcatccatcgagtcagccagtcttccagccagcgagccagctagcctcaaaagctattagctggctggattccccagttatcgcagctatatatgtatttatgtatgtgtatatggcccgaaggggttgcccgtaattgctaaagcgaaatttcattaccaaaaacgaaaacgagcgggtggcattgtagacgggtttcgtttcgcgtgtgataaataccgtgaaaggtcgccgccattgccatcgcc

SEQ ID NO: 13355 - DNA, 1080 bp, DROSOPHILA
atggatcctattctaaagacccttaccgagaccatgaccgtggaggccatcgcaatcatcaaggccaagcgcttggcgatgaagcagagcgtcgataagaacgccatgcagatgagggcccaggagcgggagaagggtcgtaatttggataacatgcaaaaggaactgggcaggcgggccatgaagcgggagcgaccgtgccgcgttttcgaggagcagctgctgggcgagaaggagatgacgactgctcaggaatacctcaaactggctcaccattccatgatgcgtagcttggactctacggtgccggaattatcacagctggaaatgccgcccccgccggagatcatgacagagccgccttggccaaagaccaagtacaatcgctatggccaggagaaattcctcaaggcacagcaagagttcggcataaatccgcagggcagcaacttggagaattgcgcgacttttcacgaaagtcaaaaggacaagcgcaaccgatctgtgagtagggaaagcattgaaaggtcgagaagcaacagcaaggatcgtcgctcatcgaagctttacgcacgaatgcccatcattgtggttccggatgcaatgaccagcatgatcagcctgaacaatatcaagacactgctcgaggagttgcactacgagccagagcgtaacggccggcagtctaaccctcctgagtgtcggcccaaggaggtcatagtcgagcatcgatttcagaacgagcttgttagctaccgggtcatcgacaacgtgaccaacctaacacccgtcgaatgggatcgggtggtcgccgtgttcgccatgggacccaagtggcaattcaagggctggccggatggcgctgaccccgccgccatcttccacaaggtctgcgccttccatctgcactttaggaatacgccgatgtgcccggagctgaccaagctgcaggtgcactcactggctctctcgcccaccgagcgccattcggacagcggcatcattatggagttctggaacagagtggaccgacacatggccgtccatgcccgtcagtttgcgtttatctggcaaaagtag

SEQ ID NO: 13356 - protein, 359 aa, DROSOPHILA
MDPILKTLTETMTVEAIAIIKAKRLAMKQSVDKNAMQMRAQEREKGRNLDNMQKELGRRAMKRERPCRVFEEQLLGEKEMTTAQEYLKLAHHSMMRSLDSTVPELSQLEMPPPPEIMTEPPWPKTKYNRYGQEKFLKAQQEFGINPQGSNLENCATFHESQKDKRNRSVSRESIERSRSNSKDRRSSKLYARMPIIVVPDAMTSMISLNNIKTLLEELHYEPERNGRQSNPPECRPKEVIVEHRFQNELVSYRVIDNVTNLTPVEWDRVVAVFAMGPKWQFKGWPDGADPAAIFHKVCAFHLHFRNTPMCPELTKLQVHSLALSPTERHSDSGIIMEFWNRVDRHMAVHARQFAFIWQK

SEQ ID NO: 13357 - DNA, 5404 bp, DROSOPHILA
ttctagttttgtgcaggcggatttaacaactaaagagcgaattaaggtaggaccttccttataaacaataaactttaaaatcgaattaatctaattactgattcgaactcattcattacgttcaatgcccatttaaagtgttattataaattatcacttttgaaaaatatgtcatgttggtgttgataagctagaactttaattaatgtcaaactaatagtgctgtaaatagtgctgtcataaatttgttgtaaagtgctttaatgtgttgtcataaattgatgaaatcatgtttattattttgatttttgctcacagaaacatcaggattggctcagagagcaccgaaaacctaaaacgaaaaagaaaatctcaattaactcatattatgagctggcaaacttgtggcatacgagaaaggatctatcatcacccaagcaaaaaccgaataataaggaggaatacttggagaacgagacaactagtaaaatatccaataaatccgatgaaaaagtattaaagtcatcaacgataatatcattaaatgccaccaatccaagtacatcgactttcaaatccgttctggaaaccactacattaccaagtgtgactaccaaggatctctttgaaagtggcaatgttgcgaccacaagacagactccgaaagtcgaggaggtgttctcgtctcccaatccaccgcaagaagcaacttcgtcaacttcaaaaaaggcgaaaaagaaggtgtatccatatccacgttgggacaaatggagtgactggagttcctgctcccgaagttgcggtggtggcgttaagtatcaggttaggaaatgcatcaatcggtgagttatactaatactactgcttaagatatataggttattggttatatatatatatatatatatatatgcgctcataaccctacagtttgccttcattagcatgttttgggataatatctctaagcactctactcttttaccgatttcagtaacctattgacgaataatcagcttacgagtaatgcatgtgtcggttactttaaacgctatcaactgtgcaatgatgtgccatgcgacgaacaatccccagattttcgggcctcccaatgctcggcttacaacgataaagagtttcatggtcatcgatataggtgggaaccttatgtcaagggtatgtgcatttatgatctgtaatatggttttattcgaaacaaagtaaaagaactagatattagctcaccaaaaaatatctagatataattcattttaagtcccacaatctattaacaagtttaaacactttgaatttgtttataataatttatagatgacgctgaatgcgaactgaactgtatgccattcggaatgaaatcatttgccacactaaacgaatccgtaattgatggaactccatgtggacatccagctgaatattttagatcgcaattttgggagcgcgctgtttgtgttgatggagcttgtaaggttagtaaatttaaataaacaataataatgctagaataatacagcaatgatgacttgatcttatagatttttttaaaaatttttattgaaatttaaaataagataattgtgccaccaccagcaacagagcaactaacgatcgcacattaaaagcactcatttttcgatactagagctttttcaagtacaagaatcgcattgaaaacttagtattggttttacattgaatcaaaaagcacgcagcatataaagtgattcgtaatgaaattcaaacaatcaatataaagacatttcgacgtaaataaagtgttaaggcaaacttaattttaaccttgatttatgttttcagtctctcaaactataagcttcaaagactgcatatttaaatggcattgaaactgttaatcagttaatgaaatttgtgatatatcaaataaaagatataattgatcgtttccctttttttttacttgatttgcgttacaatttaatttgcattactgattgaaacccttttaacctgttttatttaattaagtatagtttttgcaaggctctaaatttcaaattgattcttgagaagcggaataggtcagcaaatcaaagtggaaataattttgtgaaagcaaaaaactggaataagtccaatgagcttaatttcaatgaattattttagtaaacacattgccgcagttgtgcgtacagaaagtcgatccaaaaagcaattgcttatagaacatatgccccttaatatggctgactgaatgtattttgtactcatttattttgttgtttatcttgtatgcttaataagtggccaataaataatgtttttgcaaagcccacgaattccactcgtacgaatattaccctgaacttaccatatataaaggcgtattcttagtattcccctgcagaagctgtagatagtttttgtggattggatcgatataaagaataatcaatgttttaaatatatatgtagataaagtagttgaaaaattaacagatatgatagcattattgcccttgctgttgctggtgagtaagcattatagttataacgatctataatatggattataaaaactatatttaaggcagtgcaagccagtggcgaaatcgatggattgtatgcgcacagtggatccgtgagctgtggtggattactttgccggccagttacgggcatctttaccagaaatcctctgccggaacatgcctatatacatgttaccacattgccagtgggtgcctccaatatttcgataactgaacttaagaatagcatcaacttgctgggtaatacatattttgatattgcataataatacgtttgattatcaaatctctttcgtggaattccagtcctgcgcacctccaatgagctggccattttcaatggagagaacactgtctcggagagcggatcctacgaagcggttggtgctgtcttcgattatcatcgaatcgacggagctgaggacagcaatggggtgaccgagtggataacgagtattggacccattcgggattcattgcaacttatggtagagccccacatataaatctcttaatagacttctatataatttaaatactttcctttaggttttcaccaagtcagccaataatactggcgtgaagtacgagtacatgctgcccatagtatccgagtccgaggagaacgagatgtcgctggagagcagcgatggcctgttgagatccggtatggaggacaccagttcatccagtagctcgcgggcgggacgcaaacgtatttttaattggaaagtaattgggttcagtagttgcacgaaatcctgtggcggcggcacgcagacacccatcatccgttgcattcgaaagaatccattgcggtattactcgcagcgacgttgcacgcattccgtgaaaccggtgttgaacgagaacctattgcactgcaacacgcaaccctgtccggcgtattggagatttgacgattggggcgagtgtcgctgctcgtcgagcggcggtctgcgtcgcagggaggttagctgtgtccaggaattggcttccggactggtcatacacgtcgataaggccgcctgcatggaggatcagccacccatgcagaaacagtgcgaatgtcccaagaataggcgacgcaatttatcccgataccgcctgtctggtccttcggaatcctcatcgaatagcagccaagtgaagaggagcaaaatcgatggcagcgacgccacggccatttggttggtgtccgattggaatcagtattgttcggtcacctgcggttcgggcgttgagtatcgtaccgtattctgtgatcgctccaaggccggcgagcagagatgtgatcctagcaccactccggaaagtcgtcgtccctgcgagaagcccgcctgcgagttgggtgattggttcactggtccgtggtcatcgtgcaatggcgattgtttcgacctgacacgcacccgcgaggtgctgtgcatccgtagccagctgattacggagcacagcgagtgtacgccggagctgaagccgcaatccgttgagaagtgctcccacgaggaggtggagtactgcgctgcccgttggcactactcggattggtcggaggtagccagatacttgatttgatttgtgatgcagttactatatccgcttgcattcgtttattgcagtgtaccaaaccatgtggcggtggaacccagcgacgcagtgtgagatgcttggagtacgacatcaagatgaacgccttgcgggaatcaacgcattgtcggtacaccaacagggagcccatatatcgcaattgcaatgtgcaagcgtgtgcaggtgggtttctacttggaatatttagttaaatttatatatttactatattatttacttttacagaagttccgaaaactgaagtgactccagtctgtgcggataagttctctaattgccagtgggcttcgcaggcaaagttatgtagctacgattattatcgcgataattgttgtttttcctgcacgggtggcatttaaagttcgtagttcgtaagactcttaattaatttataaaacgattatttaaccgccgtgcagaatagctaaaaaaacaaatattatcaagctttaccccacgcatttgacattttgttaactctagaacttagtatttctgacactaaagctcaaaaaaaaagcttgcagggaaatgcaaaagttaaaaaatatcgatcgaaaagaatgtattaacgcaaatcaataacaacatactaaagtaaactagataaagactaaaacatattatttagtgaaattatcatattcttaaacgtaacattaagaaacgagaaacgatgttgtttcatacgcaaccatatgaatttcaataaaacagagattaaatgaaggcctttactttattaatgttgtaaatattaaacaaagcattagtttattcttacagggtgtaacccaatatttgaaagactattctaattgtaaagaagtatataacttcaacaaagcccagaacactaaatcccaggaaaagtccggctgttccgccaatcgaaactaataattaaattaattaaaaattaaagaaactattaaactatgtaattagttacccaaaagatcggtcagtgagaatataacttgtcgtcttagtcgactttgtggccaagtttttactgaaacagcgcttccaattcctcccagtaattgttttgctccggacatgggctaaaaaatgattgaaatatatgtttaatgttttttttatttattaaatatagttaaatgtgagacctacattcatggacttcattgtaactactgaatcatggcagttctgttcgcagtaacaaatagctggattctcgtgtttgccattttcctcgtacaactttagaaaaa

SEQ ID NO: 13358 - DNA, 1727 bp, DROSOPHILA
attgacgaataatcagcttacgagtaatgcatgtgtcggttactttaaacgctatcaactgtgcaatgatgtgccatgcgacgaacaatccccagattttcgggcctcccaatgctcggcttacaacgataaagagtttcatggtcatcgatataggtgggaaccttatgtcaagggcagtgcaagccagtggcgaaatcgatggattgtatgcgcacagtggatccgtgagctgtggtggattactttgccggccagttacgggcatctttaccagaaatcctctgccggaacatgcctatatacatgttaccacattgccagtgggtgcctccaatatttcgataactgaacttaagaatagcatcaacttgctggtcctgcgcacctccaatgagctggccattttcaatggagagaacactgtctcggagagcggatcctacgaagcggttggtgctgtcttcgattatcatcgaatcgacggagctgaggacagcaatggggtgaccgagtggataacgagtattggacccattcgggattcattgcaacttatggttttcaccaagtcagccaataatactggcgtgaagtacgagtacatgctgcccatagtatccgagtccgaggagaacgagatgtcgctggagagcagcgatggcctgttgagatccggtatggaggacaccagttcatccagtagctcgcgggcgggacgcaaacgtatttttaattggaaagtaattgggttcagtagttgcacgaaatcctgtggcggcggcacgcagacacccatcatccgttgcattcgaaagaatccattgcggtattactcgcagcgacgttgcacgcattccgtgaaaccggtgttgaacgagaacctattgcactgcaacacgcaaccctgtccggcgtattggagatttgacgattggggcgagtgtcgctgctcgtcgagcggcggtctgcgtcgcagggaggttagctgtgtccaggaattggcttccggactggtcatacacgtcgataaggccgcctgcatggaggatcagccacccatgcagaaacagtgcgaatgtcccaagaataggcgacgcaatttatcccgataccgcctgtctggtccttcggaatcctcatcgaatagcagccaagtgaagaggagcaaaatcgatggcagcgacgccacggccatttggttggtgtccgattggaatcagtattgttcggtcacctgcggttcgggcgttgagtatcgtaccgtattctgtgatcgctccaaggccggcgagcagagatgtgatcctagcaccactccggaaagtcgtcgtccctgcgagaagcccgcctgcgagttgggtgattggttcactggtccgtggtcatcgtgcaatggcgattgtttcgacctgacacgcacccgcgaggtgctgtgcatccgtagccagctgattacggagcacagcgagtgtacgccggagctgaagccgcaatccgttgagaagtgctcccacgaggaggtggagtactgcgctgcccgttggcactactcggattggtcggagtgtaccaaaccatgtggcggtggaacccagcgacgcagtgtgagatgcttggagtacgacatcaagatgaacgccttgcgggaatcaacgcattgtcggtacaccaacagggagcccatatatcgcaattgcaatgtgcaagcaagttccgaaaactga

SEQ ID NO: 13359 - protein, 566 aa, DROSOPHILA
MHVSVTLNAINCAMMCHATNNPQIFGPPNARLTTIKSFMVIDIGGNLMSRAVQASGEIDGLYAHSGSVSCGGLLCRPVTGIFTRNPLPEHAYIHVTTLPVGASNISITELKNSINLLVLRTSNELAIFNGENTVSESGSYEAVGAVFDYHRIDGAEDSNGVTEWITSIGPIRDSLQLMVFTKSANNTGVKYEYMLPIVSESEENEMSLESSDGLLRSGMEDTSSSSSSRAGRKRIFNWKVIGFSSCTKSCGGGTQTPIIRCIRKNPLRYYSQRRCTHSVKPVLNENLLHCNTQPCPAYWRFDDWGECRCSSSGGLRRREVSCVQELASGLVIHVDKAACMEDQPPMQKQCECPKNRRRNLSRYRLSGPSESSSNSSQVKRSKIDGSDATAIWLVSDWNQYCSVTCGSGVEYRTVFCDRSKAGEQRCDPSTTPESRRPCEKPACELGDWFTGPWSSCNGDCFDLTRTREVLCIRSQLITEHSECTPELKPQSVEKCSHEEVEYCAARWHYSDWSECTKPCGGGTQRRSVRCLEYDIKMNALRESTHCRYTNREPIYRNCNVQASSEN

SEQ ID NO: 13360 - DNA, 3417 bp, DROSOPHILA
cgaatcttgttctgcgtggccaggaacatggacagattctgcgactcctgcaaggtgtgcgagtccgacatcactttgaggaactgcgcagctcgcctgtaggtggagtaatcgttcttcacgctggacttcatgttcttcagctcgtccagcacggcaaacatgttgataaacttgcctagcgtcaataggtacgcctcggacacgaagtccttgcgcttctcggcgtggcacaagcgcttcacctcgccggagaaggcctcgatggccttgcgttggaagtacatgaagttgagcagcttgttcacctccggggctagcacctcgaccgtcttctcgtagatctccacgcgattcggctgctcattggacttgggctgcggaatggcgcgcgagcagcagcgccaggtgtagagcattactgcgtgtttctgcccctcgtccaggagcacattctgcgggcggagagaaggggttcagagctgtgagtaatgctaatgcgataagccggatacgctaactcaccaagttggcatgggtggtggcctcctcgatgtacttggcgatacccgtgacaaatccattgcgatcctcgaaattcgtatcgaagtttgccttgtagataatcgagcagggctgcgcctcgatgcagggctgctcgtccggcagggatagctcgtccaacacctccacgttggacagcgcgtcggctagcgtaatcttctccgtcatgctgggctgcttatcatgctccagcagcgcgaaatggttaaattctaacaaggcggggccccaatccaatcgacacaaatttttttcgccacaaatacaacacgacttttaccattcgcctgggtgcgtggacacgtggccataattagcacatttttgctggcggttggcgtctacgatgtgcttatgcttatatggctgcgcaccgctaatttcgataagagaaagataatcgataaatacggcgcattggcggcacatcacatcactagcgtctgtggttccgtttcgttttagcgaactcaatttctcctattttatattgcattttccgttaagagtagcctacaattctgcaagatgtcgatgttttggggtaagtcgaactgatctcacttgccccctccgggctggttgtgccaacgagctcttgggtgctccgaccgcgcttttattgccaccacgtgcttgccgctcgatttaccggcagcgtggagcggcgccatttgcacgccgatgtaaagtaaaccatgtttttgaccaactgtgtcctcttccaggtttgaacatgaagcctgagcgcaagtactcgcagacgatcatcaagtcgttccacatctcgggcgtggcactcgacaagggccaggaggccaagttgtacctcgctgccgagaagcaggagtacatcgtggccaccgtgaccaaggccattccacaggttgcgctcgacctgaacttcagcaagggcgatcgcatcatgttctacaccgccggtaagaccttttatgtccactatgttcgcatgtttatccgtttctgacgctttcgttcgtttcacaggcgacgccagcgtttctctgttgggctacttgcacgacattgattccgaagatgatgaggatgacgatcaaatgacgatcgagaatttgctgaactccaaggcgatcaagaatagcaaaaagtctgaagatgatgaggatgagaatgagagcggcgaggaggacgaggaggatactgatgacgatagccagataatcgaggaatacgagtccttcctcgaaaatggtgaggaggaagatgacgacgatgttgatgaggataacgaggagagtggcgaggaggatgaacaggacagcgacgactccgaagctgaagaggaacagccaaaggccaaggttgccaagctctctcctggcgctagcgccaagaaatctggcaaggagcagaacggtgtggccaagaaggaggaggccaagcagcagcaaaagaagaaggagaagccagaggccaagaaggaacaacccaaggccaaggagccagccaagcagcaaccagcttctaaggatccacgtactatcaccggaggcgtgaagattgtggatcaggtcgtcggcaaaggcgaagaagccaagcagggcaaacgcgtatctgtttactacatcggccgcctgcagtcgaacaacaagaccttcgacagcctcctgaagggaaaaccatttaagttcgccctgggcggcggagaggtcatcaagggctgggacgtgggagtcgccggcatgaaggtgggcggcaagcgagtcattacctgccccccgcacatggcgtacggcgcacggggagctccaccgaagatcggaccgaactccactctcgtcttcgaagtggaactgaaagctgtgcattagtgcactatattaacatcatatagacttgtaatcctaagtaagtatccacgtcgtacaacttgataaaaatgttaaataaactctgttttccggctgttcataaatcaacagttttgtaacaatcgcatgtatttggtatggggtctctaaggggttttttcgggtgaacatacatccagcaggggctcagactggagtttccagtgctcgagtacgtaaggcagccgttcgctgggatctgtgctccagtggtgcagacgacacttgagtcgcgcctgttccagcttgtttatggtcacagtgcagtagaagtccttgttctccttcttcaggtcgggtccctcgatgcgctccttgggcagggtaatgcactcctcgcgacaatagaacccagtcttgcgcagcgaggccttgatgtgccagggctcgagcacccatggctcatccttgttcatgaccaccgccagcacaatggtctccagcatgttgaccgtgcgctgggcgtagggggagctgtgtttaacagtcgatttttcagcctctgtcttggcgtacttggccacattctccggcgtattgtacgcggccaaacccggcagcaggagcttattgtagacaaagtgcggcttcattgacaccacgtcgcccttgtcgccaacgccctcgacgaaggtctttagcaccacctcgatgttgggccgctttttgaccagcgtgtcgtccacgagctcgtagatgaagttcttggccctcatccggcggggtttctcgttggttttgtgcagcggcgggtcatatttgcgcttcaggacgaacgtggtctggaagcaaattggtggtgaatggggatcgcttccctaatccaggagagcacttacccgcacttgctgctgcaggctggtggccgatttaagcaaatttaacggcgttacgtagatgttcttcaacatttttaccaccaatatgtctgcgttgccagactactcagccagtttgcagt

SEQ ID NO: 13361 - DNA, 1158 bp, DROSOPHILA
ctagcgtctgtggttccgtttcgttttagcgaactcaatttctcctattttatattgcattttccgttaagagtagcctacaattctgcaagatgtcgatgttttgggatgaagcctgagcgcaagtactcgcagacgatcatcaagtcgttccacatctcgggcgtggcactcgacaagggccaggaggccaagttgtacctcgctgccgagaagcaggagtacatcgtggccaccgtgaccaaggccattccacaggttgcgctcgacctgaacttcagcaagggcgatcgcatcatgttctacaccgccggcgacgccagcgtttctctgttgggctacttgcacgacattgattccgaagatgatgaggatgacgatcaaatgacgatcgagaatttgctgaactccaaggcgatcaagaatagcaaaaagtctgaagatgatgaggatgagaatgagagcggcgaggaggacgaggaggatactgatgacgatagccagataatcgaggaatacgagtccttcctcgaaaatggtgaggaggaagatgacgacgatgttgatgaggataacgaggagagtggcgaggaggatgaacaggacagcgacgactccgaagctgaagaggaacagccaaaggccaaggttgccaagctctctcctggcgctagcgccaagaaatctggcaaggagcagaacggtgtggccaagaaggaggaggccaagcagcagcaaaagaagaaggagaagccagaggccaagaaggaacaacccaaggccaaggagccagccaagcagcaaccagcttctaaggatccacgtactatcaccggaggcgtgaagattgtggatcaggtcgtcggcaaaggcgaagaagccaagcagggcaaacgcgtatctgtttactacatcggccgcctgcagtcgaacaacaagaccttcgacagcctcctgaagggaaaaccatttaagttcgccctgggcggcggagaggtcatcaagggctgggacgtgggagtcgccggcatgaaggtgggcggcaagcgagtcattacctgccccccgcacatggcgtacggcgcacggggagctccaccgaagatcggaccgaactccactctcgtcttcgaagtggaactgaaagctgtgcattag

SEQ ID NO: 13362 - protein, 349 aa, DROSOPHILA
MKPERKYSQTIIKSFHISGVALDKGQEAKLYLAAEKQEYIVATVTKAIPQVALDLNFSKGDRIMFYTAGDASVSLLGYLHDIDSEDDEDDDQMTIENLLNSKAIKNSKKSEDDEDENESGEEDEEDTDDDSQIIEEYESFLENGEEEDDDDVDEDNEESGEEDEQDSDDSEAEEEQPKAKVAKLSPGASAKKSGKEQNGVAKKEEAKQQQKKKEKPEAKKEQPKAKEPAKQQPASKDPRTITGGVKIVDQVVGKGEEAKQGKRVSVYYIGRLQSNNKTFDSLLKGKPFKFALGGGEVIKGWDVGVAGMKVGGKRVITCPPHMAYGARGAPPKIGPNSTLVFEVELKAVH

SEQ ID NO: 13363 - DNA, 6811 bp, DROSOPHILA
ttcagtgtgttcactcttccggcgtgcgagagtatgatctgcgactgtttccgcgtgcgcatgtcgtagacgaagatcctgtcgtcggtaccgccactggccacccaaggccactgcacggccaccgatgtaatggatcctgcatgggagctgtctgcaaaagtctgtttcagctcaaatttgacggaatcggtcaagccgtcagtcggcgatttgatgagcttgaagcccagcaggacctcctcgtaggtgcccactatgatctccatttccggcggcatggcagcggtttgaaatgaaaatggaaatggaaaattaaatggatttgtcgaataagtcactaaattctattcaagaatttgtttctgctggcaaaacgtgttccaacgacaacgactattcaaagttagaggcggaaaaacattttaggccaacatcgatgtcttcgaaatatcagaaacatcgatgttttcggtgaatcagcgatgttttttcatctctattgctcatcggagaataaaagcgtataaattgtaagtataaattaatttttatatattctaatacaattattaatggcgtattgcaaatttaatgtgacttgttggctggcgtcgtggctgtataaatgtattagtctcgttcacttttccattgaattgcattatttggtatgatttccaatatgtatgtttatatatgttttctaagaacaattactggaccagcgaaaaatgggaaggtggacaccaaacgcagcatactgcaatattaaaaaagaaaattatcttttaatccttaaaatatccttagataaaaatagattaaagataaaaaagatagtttatattttataacaacaacgatgtttctcgccaaaaacatcgaaaacatcgatgttcgccaacagtctgcttgcagtcactagcagtgacggaccgcaccgtaacagagctgttaatgctgtaatcgataactttgattggcacttgtgcgatatctgacgtttaataagtagtattttgtgatatgttgcgaatgaaaattcgctaatatctgtataaaaacaattgcattctactgcgcgccgtgtccgggtaactaagggcagtgggaatcgcgcatagccagcaccgaccgtcatttggaggcgttgcatcgtcaaaccggcgaacagaaatccaaagaaagcgccatgtcgaaaagttccgggtaagttttgcctcatcaaattgtttgaaaacagatatactaattgctttattttcccgcaaaaggcgcgatcgagacagggagcgcgaccgggagagagagagggagcgcgaccgtgagagagagcgcgacagggatcgtgagcgggacaaccggcacgacagtcgcagtcgcgactatgatatgggcaagtccaggaacggtggaggcggcggagccggtggtggctcccggaacatgcgcgaagaccggaagcgcggaaaggacatgatcagcgatcgtggaaaacgcgacgataagcggaggaagtgctccaggtcaaaggattacgagaaggacaagtgagcatgcgtttttctctacaaaaatactgccttcaatgtgtgtctgtgattgaataggttaaaatacttcaaaatgtcgaaggttaatgttaacacatttataaatgattgggttatgtgtgaaaacgtcacgttttcaaccatatgagatccaatttggtgtgtctgcttttatttgcttaaaagttaaaatggttcccaaatatttaattatcctcatcccaaacttccttagggaatttcattttaaactgctgaaagattccatgtggaatggattgaaagaaggctaacttggacatgcatcctctaaagacaaacttttttttagttcgccccactacaggcgtctggacaaggatcgtgaccgtgatcgggatcgcgatcggcagcgagagaaggaacgagagcgcgagaaggaaaaggagcgcgagaaggaaaaggagcgcgagcgggacaaggatcgggagcgagatcgccagcgagaaaaggaatccgatagcagacgagcggccgcagctgctccgctgattataccattgctctcgaccagctgctccgaagaggaggtggaggagatcgacaaggaggagcagcagcgtcgtctggagcaagagatgattaagcggcgcgagcgaatcgaacgttggcgcgcggaacgcaagcgggacactaaggcggctgtcgtggcgccgtcgctggtcaattccgcaaagaaatggagtctggaggacgagtctgaggaggacgacagcaatcccgctccgccgctggacagtgggaaaaaggacgccgaaccggactcgccgccttcaaaattccacagcatacgcaagcgcttcgacgatgacgtggtcgagtcgaagttctcgcccgttaagcgtcccacctttagcaaatcatttggcaaattgggcattggcctggccaccaaagccgaggcggatatcaagaaggagccaccgccggtggacaccaaaaaggagatcaaaaagaagcccgaaccagtagcggccaaaatggagatcgttgaagagcccaccgtcgcagcaggggagaagaccaagaaggagccggaacagccgcatgtgggtgctaaatcggagccggaagtggaagacaagccgcaacccgaagccgagccagaagacgaaatcgatccactggatgcctacatgcaggaggtcaacaacgagatgcggcgtgtgaacaattttgtcaatccacccgccaaatcgcagggtgtcgtgatcctcacgggagtggccaaaaagaagacgacgacgttgaagaagggcgaggtgatagaacaaaatatggacagcttggagtactctagcgaggacgaactggaggacatacgtgacacggccgttaatctggcgatgaagcaccgcaaggagctggccaagattgatcattcctcggttacgtatgcgcccttccgcaagaacttctatgtcgaggtgccggaactgactcgcatgacggccgccgatgtggagaagtaccgctccgaccttgagggcatccaggttaagggcaagggctgtccaaagcccattaaggtgagttccaactagatacagattatgtgcgtgttttgaagcatttacatgttgtgctgtattcaattatttttggtcatttctgcttgccaaaatcaaacctacctttaataataatcctctttatgcaatctactccagacttgggcacagtgcggcgtcagcaagaaagagatggaagtgctgcgacggctgggcttcgagaagcccacgcccatccagtgccaggccataccggccatcatgtccggacgggatctgataggtattgctaaaactggcagtggcaagacgttggcattcattttaccaatgtttaggcatattttggaccagccgagcatggaggatggcgacggcgctatcgctatcattatggcgccaactcgcgaactctgcatgcagatcggcaaggacatccgcaagtttagcaagtcgctcggcctgcggccagtttgtgtgtacggcggcacggggatctctgagcaaattgccgagctgaagcgtggcgccgagataattgtatgcacgcctggccgcatgatcgacatgctggcggcgaattctggacgtgtgacgaacctgcgtcgcgtcacctatgtcgtcttggacgaggcagatcgcatgttcgacatgggcttcgagccgcaggtgatgcgcatcatcgataacgtgcgaccggatcgccagacggtcatgtttagcgctacgtttccacggcaaatggaggcgttagccagacgcatacttaagaaacccatcgaggtgatcgtcggcggtcggtcggtggtgtgcaaagaagtcgaacagcacgtagtcattctcaacgacgatgccaagttcttcaagctgttggagctgctaggcatataccaggaggcgggcagcatcattgtgtttgtcgataagcaggagaacgctgacatcctgctgcgcgaccttatgaaggcatcgtatccgtgcatgagcctgcacggcggcatcgatcagttcgatcgcgactccaccattatcgacttcaagtcgggcaaggtgcgcctactgattgccacctcggtggcggcgcgcggtttggatgttaaggatctcatactggtggtcaactacgatgtgcccaaccactacgaggactatgttcacaggtgagcgctctacttcatatcttcgagggatctacctaatattgtttctatgatttccacagatgtggtcgcaccggtcgagcgggcaaaaagggcagcgcctacacgtttatcacaccggagcaatcgcgctatgccggcgacattatccgcgccatggacctatcaggcacactgattcccgccgagctgcaggcactgtggacggagtataaggcgctccaggaggccgagggcaagacggtgcacacgggcggcggctttagcggcaagggcttcaagttcgacgagcaggagttcaatgccgccaaggagagcaagaagctgcagaaggcggccttgggactggccgattccgatgatgaggaggacatcgagcaggatattgaccagcagattgagcaaatctttgcggccaagcgcacggttaaggatacatcggccgcggccacagccgcggcggcagcagctgctgcggctgcagccgcagctgcggcagtttctggagctaatccggcactggcctcggcggcggctcaagcggcggcagctgcggctgctgccaatattgccattgctgcggcttcggcgcccgcagccgcgggtggagctccaagtgtggccatgggcggtgctctaagctctgataagctggagctagccaaacgattggcctccaagatcaacagcagcaagaacctggacaccaagggcagcgtggtcactgtggagcccatgatcaagggaccgcatgtcacgggagctgccgcgaccctgctgaccgctcgcacggtggccgagcagatggccgccaagttgaacaacaaactgaactatcagcccaaagaggatgaggaaggactgggcccgctggtgggtggcacaaccaacccgtttaccaaatacgaggaggaactggagattaacgatttcccgcagcaagcgcgatggaaggtcacgtccaaggaggcactcgctcagatctctgagtactcggaggcaggtctcaccgtacgtggcacatatgtgccgcagggcaagaatccgccggatggcgagcgcaaactctacctcgccatcgagagctgcagtgaactggccgtgcagaaggccaagcgcgagatcacgcggctaatcaaggaggagctgctcaagctcagctccgctcatcatgtctttaacaagggtcgctacaaggtggtctagacctagatctagatcccccaccaatcctctcgctatgctaagatattctaatgttctttagagcgcgatcagataggcataaggattagtttgtgagcatttgaagcaggacaaatgcccaaacagatttatcttaataaatttattggatacacgcactttgtttacaacgtggtctagacctagatctagatctagatcccccaccaagcctcttgctatgctaagatattctaaagttctttggagcgcgatcagataggcataaggaccagtttgtgagcatttggagcaggacaaatgcccaaacggatttaactcaataaatttattggatacacgcactttgtttacttgcagctattaatctgtggacgaaagagtctactttttgccaatcaaaagttcgataggctagtttttctgttcaaacggctgacatttactggaataatcgattttccttatcgagcaaagagcacagttgtttcgatagagagtcctgtttcccaagaagagctttcaacccatttagaactcagaattgtttttcttataatttttgtttgcttttcgctgcatttttattatttacttatttatctccgccagcactcgagcgctgcaatcaattgattttcatgctacagtatttcttgtgtctagaaactactaaaattaaatttaaatgtagttatgagcttgggcatgttccgttatcaatggtatgtattataattttttataaacattattatgcgcattttgttttggtttgatgaaaaaaattttacgttttttaattggtttacattgtttatgcactaatttgtcggcaaaatgttggggttttctcgatttagtgttccattcccattcgatacaaaactatttgttattttattttattttatttagctttcatttaaaattattattgaatttcgcgcttgagtttggttttttcgtgttttttttttggtttttctttatggctactcattcaaaatcactcacacgcacgctatatatatatatgtgtacatatatatatgtatatatatatatatttattcgatacctttatatttcttcctttttatatgtacaagtctagttaaaactatgaaatgtgctaaattatacaataaaaaaaaacaaaaaaaaaatgttatgtatagtatataatttttttaaaattctttatatatatactatatatttatatgtaattcatagttgtcatagagttgtttgcttttatatttatatatgcttttaggtttcccattctgcattagtttagtttagtttggcaacattttaaattcgttgcaat

SEQ ID NO: 13364 - DNA, 4209 bp, DROSOPHILA
ctgacgtttaataagtagtattttgtgatatgttgcgaatgaaaattcgctaatatctgtataaaaacaattgcattctactgcgcgccgtgtccgggtaactaagggcagtgggaatcgcgcatagccagcaccgaccgtcatttggaggcgttgcatcgtcaaaccggcgaacagaaatccaaagaaagcgccatgtcgaaaagttccgggcgcgatcgagacagggagcgcgaccgggagagagagagggagcgcgaccgtgagagagagcgcgacagggatcgtgagcgggacaaccggcacgacagtcgcagtcgcgactatgatatgggcaagtccaggaacggtggaggcggcggagccggtggtggctcccggaacatgcgcgaagaccggaagcgcggaaaggacatgatcagcgatcgtggaaaacgcgacgataagcggaggaagtgctccaggtcaaaggattacgagaaggacaattcgccccactacaggcgtctggacaaggatcgtgaccgtgatcgggatcgcgatcggcagcgagagaaggaacgagagcgcgagaaggaaaaggagcgcgagaaggaaaaggagcgcgagcgggacaaggatcgggagcgagatcgccagcgagaaaaggaatccgatagcagacgagcggccgcagctgctccgctgattataccattgctctcgaccagctgctccgaagaggaggtggaggagatcgacaaggaggagcagcagcgtcgtctggagcaagagatgattaagcggcgcgagcgaatcgaacgttggcgcgcggaacgcaagcgggacactaaggcggctgtcgtggcgccgtcgctggtcaattccgcaaagaaatggagtctggaggacgagtctgaggaggacgacagcaatcccgctccgccgctggacagtgggaaaaaggacgccgaaccggactcgccgccttcaaaattccacagcatacgcaagcgcttcgacgatgacgtggtcgagtcgaagttctcgcccgttaagcgtcccacctttagcaaatcatttggcaaattgggcattggcctggccaccaaagccgaggcggatatcaagaaggagccaccgccggtggacaccaaaaaggagatcaaaaagaagcccgaaccagtagcggccaaaatggagatcgttgaagagcccaccgtcgcagcaggggagaagaccaagaaggagccggaacagccgcatgtgggtgctaaatcggagccggaagtggaagacaagccgcaacccgaagccgagccagaagacgaaatcgatccactggatgcctacatgcaggaggtcaacaacgagatgcggcgtgtgaacaattttgtcaatccacccgccaaatcgcagggtgtcgtgatcctcacgggagtggccaaaaagaagacgacgacgttgaagaagggcgaggtgatagaacaaaatatggacagcttggagtactctagcgaggacgaactggaggacatacgtgacacggccgttaatctggcgatgaagcaccgcaaggagctggccaagattgatcattcctcggttacgtatgcgcccttccgcaagaacttctatgtcgaggtgccggaactgactcgcatgacggccgccgatgtggagaagtaccgctccgaccttgagggcatccaggttaagggcaagggctgtccaaagcccattaagacttgggcacagtgcggcgtcagcaagaaagagatggaagtgctgcgacggctgggcttcgagaagcccacgcccatccagtgccaggccataccggccatcatgtccggacgggatctgataggtattgctaaaactggcagtggcaagacgttggcattcattttaccaatgtttaggcatattttggaccagccgagcatggaggatggcgacggcgctatcgctatcattatggcgccaactcgcgaactctgcatgcagatcggcaaggacatccgcaagtttagcaagtcgctcggcctgcggccagtttgtgtgtacggcggcacggggatctctgagcaaattgccgagctgaagcgtggcgccgagataattgtatgcacgcctggccgcatgatcgacatgctggcggcgaattctggacgtgtgacgaacctgcgtcgcgtcacctatgtcgtcttggacgaggcagatcgcatgttcgacatgggcttcgagccgcaggtgatgcgcatcatcgataacgtgcgaccggatcgccagacggtcatgtttagcgctacgtttccacggcaaatggaggcgttagccagacgcatacttaagaaacccatcgaggtgatcgtcggcggtcggtcggtggtgtgcaaagaagtcgaacagcacgtagtcattctcaacgacgatgccaagttcttcaagctgttggagctgctaggcatataccaggaggcgggcagcatcattgtgtttgtcgataagcaggagaacgctgacatcctgctgcgcgaccttatgaaggcatcgtatccgtgcatgagcctgcacggcggcatcgatcagttcgatcgcgactccaccattatcgacttcaagtcgggcaaggtgcgcctactgattgccacctcggtggcggcgcgcggtttggatgttaaggatctcatactggtggtcaactacgatgtgcccaaccactacgaggactatgttcacagatgtggtcgcaccggtcgagcgggcaaaaagggcagcgcctacacgtttatcacaccggagcaatcgcgctatgccggcgacattatccgcgccatggacctatcaggcacactgattcccgccgagctgcaggcactgtggacggagtataaggcgctccaggaggccgagggcaagacggtgcacacgggcggcggctttagcggcaagggcttcaagttcgacgagcaggagttcaatgccgccaaggagagcaagaagctgcagaaggcggccttgggactggccgattccgatgatgaggaggacatcgagcaggatattgaccagcagattgagcaaatctttgcggccaagcgcacggttaaggatacatcggccgcggccacagccgcggcggcagcagctgctgcggctgcagccgcagctgcggcagtttctggagctaatccggcactggcctcggcggcggctcaagcggcggcagctgcggctgctgccaatattgccattgctgcggcttcggcgcccgcagccgcgggtggagctccaagtgtggccatgggcggtgctctaagctctgataagctggagctagccaaacgattggcctccaagatcaacagcagcaagaacctggacaccaagggcagcgtggtcactgtggagcccatgatcaagggaccgcatgtcacgggagctgccgcgaccctgctgaccgctcgcacggtggccgagcagatggccgccaagttgaacaacaaactgaactatcagcccaaagaggatgaggaaggactgggcccgctggtgggtggcacaaccaacccgtttaccaaatacgaggaggaactggagattaacgatttcccgcagcaagcgcgatggaaggtcacgtccaaggaggcactcgctcagatctctgagtactcggaggcaggtctcaccgtacgtggcacatatgtgccgcagggcaagaatccgccggatggcgagcgcaaactctacctcgccatcgagagctgcagtgaactggccgtgcagaaggccaagcgcgagatcacgcggctaatcaaggaggagctgctcaagctcagctccgctcatcatgtctttaacaagggtcgctacaaggtggtctagacctagatctagatcccccaccaatcctctcgctatgctaagatattctaatgttctttagagcgcgatcagataggcataaggattagtttgtgagcatttgaagcaggacaaatgcccaaacagatttatcttaataaatttattggatacacgcactttgtttacaacgtggtctagacctagatctagatctagatcccccaccaagcctcttgctatgctaagatattctaaagttctttggagcgcgatcagataggcataaggaccagtttgtgagcatttggagcaggacaaatgcccaaacggatttaactcaataaatttattggatac

SEQ ID NO: 13365 - protein, 1224 aa, DROSOPHILA
MSKSSGRDRDRERDRERERERDRERERDRDRERDNRHDSRSRDYDMGKSRNGGGGGAGGGSRNMREDRKRGKDMISDRGKRDDKRRKCSRSKDYEKDNSPHYRRLDKDRDRDRDRDRQREKEREREKEKEREKEKERERDKDRERDRQREKESDSRRAAAAAPLIIPLLSTSCSEEEVEEIDKEEQQRRLEQEMIKRRERIERWRAERKRDTKAAVVAPSLVNSAKKWSLEDESEEDDSNPAPPLDSGKKDAEPDSPPSKFHSIRKRFDDDVVESKFSPVKRPTFSKSFGKLGIGLATKAEADIKKEPPPVDTKKEIKKKPEPVAAKMEIVEEPTVAAGEKTKKEPEQPHVGAKSEPEVEDKPQPEAEPEDEIDPLDAYMQEVNNEMRRVNNFVNPPAKSQGVVILTGVAKKKTTTLKKGEVIEQNMDSLEYSSEDELEDIRDTAVNLAMKHRKELAKIDHSSVTYAPFRKNFYVEVPELTRMTAADVEKYRSDLEGIQVKGKGCPKPIKTWAQCGVSKKEMEVLRRLGFEKPTPIQCQAIPAIMSGRDLIGIAKTGSGKTLAFILPMFRHILDQPSMEDGDGAIAIIMAPTRELCMQIGKDIRKFSKSLGLRPVCVYGGTGISEQIAELKRGAEIIVCTPGRMIDMLAANSGRVTNLRRVTYVVLDEADRMFDMGFEPQVMRIIDNVRPDRQTVMFSATFPRQMEALARRILKKPIEVIVGGRSVVCKEVEQHVVILNDDAKFFKLLELLGIYQEAGSIIVFVDKQENADILLRDLMKASYPCMSLHGGIDQFDRDSTIIDFKSGKVRLLIATSVAARGLDVKDLILVVNYDVPNHYEDYVHRCGRTGRAGKKGSAYTFITPEQSRYAGDIIRAMDLSGTLIPAELQALWTEYKALQEAEGKTVHTGGGFSGKGFKFDEQEFNAAKESKKLQKAALGLADSDDEEDIEQDIDQQIEQIFAAKRTVKDTSAAATAAAAAAAAAAAAAAAVSGANPALASAAAQAAAAAAAANIAIAAASAPAAAGGAPSVAMGGALSSDKLELAKRLASKINSSKNLDTKGSVVTVEPMIKGPHVTGAAATLLTARTVAEQMAAKLNNKLNYQPKEDEEGLGPLVGGTTNPFTKYEEELEINDFPQQARWKVTSKEALAQISEYSEAGLTVRGTYVPQGKNPPDGERKLYLAIESCSELAVQKAKREITRLIKEELLKLSSAHHVFNKGRYKVV

SEQ ID NO: 13366 - DNA, 7811 bp, DROSOPHILA
ctgatccaaagtgcagcattgcttacactgaggcctgaaatgttaaaaatgttttggatgaataaaaaagagcaatgggctcaagcagaaactataaaaagttaatataatttttgttattaaaaactgaaggaagaatcatatttagtcagtggtatggaggagcttactaagtcaagctaagcatttttggttggaatatttaaaatgaggtatgaaatttaacctgatctaattagattaacatattaattaaacaattttcaggtcttcttatggaatgattatagcatagttcatgggtatctttacaactccaaagctagattaattaaatgttattgaacccacttgatggtatccaatccgaaatcatccagtttttcgcaactggaacacattaactgggccttaataaaacccaacgcccggcagtcggcggccgtcaattcggcttgaatttgctggcactgtagggtataaaatatatattaaaaacatgtcttagcttcagacataacttacacttaaagccagtagaagaaatatagcacatttatgcatttttgtggctaaattctaattaaatttactacgtccacgtcgttgtttacaaaattttcttagcttagtgatgagtagaagggaaaataacattatttaggcttatcgattatattcgggttgcttgtcttttcatcgtttagggtattccgtatactgtttatgaattagacaattaatcaaacttttgaacagctttaataaacttattattattatttcttgatattttttcagcaatttgaaacttttgtcactataaaagtgtacaaaataatttcaggtttttatattcaagtacgcaagtttattttccgatgttaataactaatttcatgtgattcgatagcttatcacgcttacatccctacaatcgatacggactgcccagcagctggccaccactagctcagaaatcgaagattattcgtggtggtgcatttgtttttttcgcttcgctcgcgaagtgagcccagttttaaattatttaaattgcgtatagtgaagccacttgaaagcgaaacgcctactgtcgcagttctgccaaaaaaccaacagtattagctgtgtgcgtgtttggcaacaacaagtcaacaaaattcgaacaaaatcaataaaacggaaacgtgagagagcgctgcgcaaaagagaaaagcgaacgcaatcgcaatcgaccaacgcatagaagaaaacaaggtgaataaatagaacatggcatagaaaaggcgaactagaatcaaatcgaattaaaatcgggtacagaaatagacgtgaaaagaaagggcgaagaaagggaaacaaataaccgttacaggagcactcctggagatttaaggctctctctccccctcctcagcactttagccccagttgtgcgtttgtgtgtgtacatgtgtttatgttttgtttagcacattaataatcttaattctgctagatttcgccactcaggtgctaaacgctaaaaaaaaaagtgcacactccgataagtctacccctgtgtcggtgtacttgtttatttaattcatatttactcaagtaaattaattcatttgcccttgtacaataacaacaagcgccgtttgcttggaaactcgttctcgcagtcgaccgcctcccctcttcgctcctaatcttattctttctctattccactgcaataccactgcagctgtcggtgcctgtgtgtttttcattcaatccaggaaattgccccttgagagaccttccattcagacagctccatctgcatcttcttcagcttcttccgcttgcatcttcatcctctctcttgtgctcccggtcccgtttaactggtttactttatgctttattccactgatgcctcctctatcgccctctcccttgcgcacacctgctgcttggcagctgtccacgcgctcaaatttcttatcaccgaacaaactccggctgaaacccaaaacctggcccaaactgcgttgttacttttccacggcaattccctaatttccaacgccttttgtcacggccctgttgctttctccctctcgagagctctaactccctctccaatcctatttttacatacacgcatacgcagtaaaacttggctatgacaaaccacatattattctatagataccaaatactgtttttttaatactgtatattgttagatacaaaaacacttttggaattacaaatccagatggaattattaaaaaaaaatatgtatatattttgcacaaaatttctcatctgtttcaaaggtaattccatatgtgttgacatttagaaatgtaaaagcttttctatttattttaaagattcaaaaattatttttagccgaatgcatacgcattaaaagcaaatcgatttattcggtttaaacatctattgtttttcaatggaaaaaccagtgtattttccagagaaccttacctaagtttttatatgtatatattacattgaaaataattatatgccagctttgaagcatgttaacgataagtgtacttgagcccgattgttagtgaattcttaaaaaataagaatgagcaaagtcgctttacattgggattgattgtgaaatcctccaaatctttgtgtgtcactatagagtcttatttaaaatgatattaccaaatgtattggcaaaacgcagataagttcaactgtacaatgtgcaatctctcggtttcgtgcaattttgcaatttttcaaatgcccgcacatctgactcatccacaggtaactgtaattactgcctagcatccacttgctttccgcacctgtggatggtatttgtcaccttatcaatacggtttctctgtgttgactgtgattttagatattcctgcgcacgaaaaaaattggacacctctaaatttaattatacaaatagtactgtttatgttttcctatatttattgaagtattttaaagtgtgtatacaaaagtaattattgagtgcatatgaaaccaaagtcttttgtattctgatacaaaaatcatatcatatatgatatcaaaatttatttctgtgtactctgctgtttgtgaggtcaatttttgataagccaccaggtgctcatttagctcgttggcgcctattagctcattattcaagcttacgtccggctcacccacatacccacagatataaaaaaaaactatacaaaaaacccatatatgcactcgcagaaattagggccaacttaagcccactcacgcagtttctttattggcttgaactatttttgttttgctcgtttggctccgtttatatttcaattgaccgaaaggtcatcttaattgcatttgtgttttgcgactgtcgcactgtcctactcgcactcgcactcgcactcttctcctgccatttcagctgtcaactttcactcgtgagctttgttgttgttatttttagacgtaggtgcgtgccacacatgtgatgggaggaaaggggaaattttatggggcttagggctccgttgagctttacaaagcaattggacacggtttagtccaaggactcgcgactgtggattgagattccgactagtgacgagagtcctagaaaataaaagctaaatgctatcttatatataattgactgtttgaaataaagtacaaatattagatttaatgtgctaacatccaaacaggtgacgaaagcaaaactttttaaaacgaagtgtatatttattataattgcaactgtttcgctcttctttccttcacttccaagtagaagaatataactttagttttgattaataatgtaatattgcatgtttgaataaaaaaatagttcaatttcactgacatatttcctaatataaatttagacagttaagttggcatgactagcgtttattgaaagcacttagaaagttttaatttacgttaagtggaattccgaaaattagtgtttctgaaaacgacactgttattgtggatcacaactaaggcgagcactaatttgtttatgttttttacgcccactcaaatggtcgccactcaaatgttgcttacaaatgatgtatttgtttcagcagaattactcaacatcgttgtttctgttgatcattcgaattattttgtttatatacgcaacgggatcagttacattctaatgaagctcattctttctccggaaaagatcttgtttataacaaggcgtttcgaaatcctaaggttaaatcaattttttatacgtttaaatacatcttgtattaaacagtttttatatattgaagtgcctgaagtgttcgctatgttaagtgagagtgtaaacagaaaaaccaattgataatgaatgcaggctgtgcaaatgccacagccgcttgggttccgctcgcgattccggccaggtaaataaacgatgtcatttttttgttaaaaatttatgaaattcgattttctgtttctcgttctcacttaggtcgaggagcataggttgtaattgtgagaaggaggcggctggcggtgctaggcaggcaattaacccacacagacccgaacacgagcttacatttttgatttgtttttaattgcacttcgtttttgttttgcagccgcctgccagccaaagccaagaattccacattacaaaacaccttaaactgcattgccacattcccaagtaagctgccatgagttaagatcaagatgcgagcccaggatctgctgctgcttgccaccgctttaatcggcgcttacctaccgctcaccgccgcctgttcctcgcgtgccatcgctaagccgcggccaacagctgcaccgatcctgccgccggataatgtggaaatatccacaacgccgagaccgaatgtcaccttcccgatcttcgcctgtccaccgacctatgtcgcctggtattgcctgaacgatggcacctgctttacggtgaagatccacaatgaaatcctatacaactgcgaatgtgcgctgggatttatgggtccgaggtgcgagtacaaggagattgatggctcgtacctgccaaccaggaaccgtgtgatgctagagaaggccagcattgttagcggagcaacgctggcccttctgtttatggccatgtgctgtgtggttttgtatctgcgacacgagaagctgcaaaaacaaaagctgcacgacagcaccacaaccacaacgaccgacggtggctgtcagaacgagggcatggacgaggtggatggcttgcgacccttacgtccagtgagacgtccctttggaccctgccgcatcctatcgctggaggaggcccaccttcaagcgaaagcctccaatcgccccaggcattgcaacgaacttttgcgctaactaattagcctggctgctcatttgtttttaaatgtctaacatgtccaactgtttattttaactgctaaacgaaactattatttttgccatctgattgagatggcgaatgccgtagttctaagtgcctactgacgtgcctataacacatttagatcaagtattaacgaacgaaaactgattgctcagagagagataaaaataaatctagatataattcaatgcaattttggcagctagccgcccatttatttattatacacctaattttattaaaaaaaaaaacgcgtgaactaatatcgtcaataaaagcgagaactaaatcaccagctttactttcaatttagataatgcaaatttcgaatacctttagaatttgattgggaatagtttgcacaaaattcaccatggccttgattttccttttatttcagagatgcatgtaaatactaaacagttgatctgttaagctacacgaaaataaggatatcttaaatttagtatgtaagaaagaaaagaatttcttaagaatcttcttttctgagacgtcaccttaggctgtcaaaaaaattcatatgctttgtaaccccttaagcactgaattaattttcccgttttccgtttgtaatttccagtcatgccgcacaacaaccagccgtctcccggggatgatcagttgggaccgccaaaggcggacttcagtgctccgccaccgtacgaggcgaacgttggccatggccagcaggtagcactgccggctcagatgccaccgctggccttggccacacccgatcccagtcagatcccgatacagatgcaagtgcagctgccgagccaggcggaccttatgaatgcacaactgccgccagaaatacacgggaagttgcccacgtacgaggaggttcaaatggaaaagtcgctgaacggagagctgccgcccgcctttttgactttaccctcctcgcagcagctaccgccgccgccgaatccgctactgccgccaaatccgctgcgcgatggagccgctgctgtgcgatctgcccagccggcactcacgttcatcgccatcgatgccagcgatccggaaaatagtctgtccaccaccgacaacttgctcggcacggacatcatgttcatcacggccttcattgtggcctttttgtttaactggatcggcttcctgatgctcacctgtttctgtcacacaatcgccgcccgatatggagcattgtcgggattcggattgtcgctggctaaatggacgctgatcgtgaagcactcgacggacttggcctcgcacgaaaactcctggctctggtggctgatctgtgcctttggcttcctgatcagcatacgcgctttaatacagtatgtcagcatcaagcgatcgtggcgcctcctttccgcctctgcccaggaacggctgctattcttttactaggtgcacctggaggctttccagtggtcgtcttgtaaatacgttgtgggtggctaggaggctcgaatgctaccaaccaaccgatcccaacaccctctattccccagacccagcacacgaaaaatcaacgcgaacttattttgcagagttctcgaaatcactatggacttgaaagtattccctcaaatgtattagtcaatcaatttctttaaaatagaagtaatgttattcaaaaatatactttgtatatccgtttactacactttcaagtcacaaacttattgggatatctcgcaagtccaaaattgcattagctttcaagaaagtttcaattttcttttaaatactaaatgtattgaacagttttacattaagccaattgtaaattgtaaacggtgcagcggcttagatgttgcgaagaaaattcgatttcgagagctatccgagttgtgggttatcattttttgtagtttctgtgttaactagagacgttaaaaatgtgtgttaaaaagtgaaaggcgaatgcatcttcgcatctgctctcccccaatcgattataattgtaaatgtatgtgaaatgtgtatggatatataaatatctcaccctaattgatccctctacacccccacaaaatctccctaggccttttagtggcgcccatgcacttgaaacaaagacacaaaacaaaccaaaaaataaatgggatacaaaattataaagggtcgagatagaaaagtatgccacccatatcttttgttgagcccattttacgctgtggtacttaattaattaactacacaagagccagcagtaatacgaatgctaaacacacacaaacaactattgctagaacatatgattattgcctattataacgtttaattactatgtttaatccctttgtatgtaaatcaaacgatgcttatgcattgcaaagggtgcagagtcgcattatctgcgccagttttatgcaaattcaataaaatcgaatgatgtcattca

SEQ ID NO: 13367 - DNA, 1066 bp, DROSOPHILA
tgcatttgtttttttcgcttcgctcgcgaagtgagcccagttttaaattatttaaattgcgtatagtgaagccacttgaaagcgaaacgcctactgtcgcagttctgccaaaaaaccaacagtattagctgtgtgcgtgtttggcaacaacaagtcaacaaaattcgaacaaaatcaataaaacggaaacgtgagagagcgctgcgcaaaagagaaaagcgaacgcaatcgcaatcgaccaacgcatagaagaaaacaagtcatgccgcacaacaaccagccgtctcccggggatgatcagttgggaccgccaaaggcggacttcagtgctccgccaccgtacgaggcgaacgttggccatggccagcaggtagcactgccggctcagatgccaccgctggccttggccacacccgatcccagtcagatcccgatacagatgcaagtgcagctgccgagccaggcggaccttatgaatgcacaactgccgccagaaatacacgggaagttgcccacgtacgaggaggttcaaatggaaaagtcgctgaacggagagctgccgcccgcctttttgactttaccctcctcgcagcagctaccgccgccgccgaatccgctactgccgccaaatccgctgcgcgatggagccgctgctgtgcgatctgcccagccggcactcacgttcatcgccatcgatgccagcgatccggaaaatagtctgtccaccaccgacaacttgctcggcacggacatcatgttcatcacggccttcattgtggcctttttgtttaactggatcggcttcctgatgctcacctgtttctgtcacacaatcgccgcccgatatggagcattgtcgggattcggattgtcgctggctaaatggacgctgatcgtgaagcactcgacggacttggcctcgcacgaaaactcctggctctggtggctgatctgtgcctttggcttcctgatcagcatacgcgctttaatacagtatgtcagcatcaagcgatcgtggcgcctcctttccgcctctgcccaggaacggctgctattcttttactag

SEQ ID NO: 13368 - protein, 267 aa, DROSOPHILA
MPHNNQPSPGDDQLGPPKADFSAPPPYEANVGHGQQVALPAQMPPLALATPDPSQIPIQMQVQLPSQADLMNAQLPPEIHGKLPTYEEVQMEKSLNGELPPAFLTLPSSQQLPPPPNPLLPPNPLRDGAAAVRSAQPALTFIAIDASDPENSLSTTDNLLGTDIMFITAFIVAFLFNWIGFLMLTCFCHTIAARYGALSGFGLSLAKWTLIVKHSTDLASHENSWLWWLICAFGFLISIRALIQYVSIKRSWRLLSASAQERLLFFY

SEQ ID NO: 13369 - DNA, 4546 bp, DROSOPHILA
ctcatgtgaaggatgcatagtaattaaaccaaaaccgttgaatagaatacacttatctaaccctatacatatatccaaaacagaactggtataaatatatgacgcactccttttttcacaataaatatataaatatataatgaacggaattgcttggtttcttactcaaaatcattatcacaagtcagccctgacaaacattaaaatattgtatataaatatatatccagatgttatgtcgacaatctcaagggaaatcttgaaacatttcattaaagattttttgttcaattcccaaaatattgtgccttaaaagcgctaatattttagtccccattatcgattcttccattaagcgcaaaatgtcgttatataattggataaatgaagcaaacatgagtatatttccgaaattaaagacgccagaaaagagcttaaaaagtcggcattaattgattttcctttgtatattttataagtggttctctaactttaaataattattatcagtttgcttaatggctctcatttgcttaaagatcaaactccaaaatagaacattcagatactggcctaagcagtatcgcatttatgtacatgaaggtatgaaaaactcttaagataagtattcaattggttgtagttaagtgattttgtgccgcttaagtgttaactatacgattccatttttatacacaatcagcattttggaaaaacagcaattttcgatcgagttaaatgtacatctaagccctaaggtgactaccaactagagtaggtatatatatatatacgtatatataaaattataagggtacactctatacataagtatataagaaaaggcttctgcatactgagcacaaatgttgcaggcaaccaactggccgtcgaatcgagtttgtctggatcccagccaggatccctacggtctgggctcttaggatctaggcgaaattggttagctaaactacgaactactaggacggggtggcgcccctcagtgattggcgtccttcagggcctgttcctcgtgatcggcgtcgatcaaggactgcttgcgtttcccattcgagcaggactccatctgcatctgcttggcgtcgatcagggagtgcttccgcttgtacttctccagctcggattcggactcctcgtcgtcgtgcttgttgtgcaagcacgggaagtcgaacattcgctcgccctttccgaacacctcgccctcctcgatggtcgtgggcaggctcctgcaaggaaacaggaagagttagtaagatatgcacatcatcaaccaattataataattatttaatcaattccgattcaaattataccgattgcatgattctctttcaaaaactgattaccaaatggcaattatctttattactatcaaacttgatctaaggcattactacttataattctttgtatgaaagccattcatcgactagatgtgctcattagaatgaagactcatggaatcttgatgaatgataactgttggaaagcagagttatggattcatcaatcacttatcaattttgaagacctgattaacattcacttgaggtgatgcatttcgtttattaatcaaatctgcgtaattactaacctgtttagcgtctctggcagcagcaggcagacaaaggagcctgcaaagaagaggacacccaggatgatcgagggcgccgccttaaagaaggtgcccagccagaggatgtagggcgccaggaaggaggccgcgaatccggccacgtggactgccgccacgccctgacccctcacgcaggtggggatcagctcggtggcgtactgagatccgctctcatacgagatggccactccgaaacgggcggcgatggtcaggcaggccagcagaatggcattgtggttgtgctgctggtacgcgatcgcaatgccggcggcggcggtgaagagtccgcccaccagcaaggaacccgaggccatgcctttgcgaccaatgcgatcctgcagcaggaccagcaggacactcgagggcagcactgccaaggcactcagcgagaacatgatgaagggggaaatgcccatgccctccacgttgcgagagacggcatcgtagcacagagtgatcaccatgctgtggatgagagaaatagcagagtaatataagtaattaacatctttgacaagaagtactaactacaactcacctcttgaaaaacagaatgagtgtgttcttgcgcatgcgtggcgttctgaacatgtccagcagagtggcctgcttcttgtcatcgccacccagcatttcgtgagtcatttggcaatggcgccggaactcgtcgaagtccgcctggctcacccggcaaccattgaacttggccacccgcttcagccttacgatggccccgtcgatgtcattcctggtgaccagccactgggcactctcctgcaccacaaagtagtacagcaccaccagcagaatgggcagcgacgtgcaggccaggtagatctgccagtgacccaccagaactgccagccaaggagtgaaaaccaggcccaggcagtagaacagacccacggccatgttgagacccagggttctcatgctgggtcgaatatattcgagaactattcgggagaaagtaaatcaatcggaagatcagtcaaaggcttgcatgttcaatcttttaacacgttttacaaataataataacaaatattatcattcaaatactcgctggacattctaactttaagggcaaatatgacaaaggaaccagcattcactaataaataaaaatagtctatttgcctaatgaattgaaccatttcatatttcctattttgcttacctataatgtacatcaggtagaagtttgtgtccgctgccaggccggaaataaaacggcagagggtgaaagtggccacgctcttggtgaaaatggtagagaagtcgccggcaaagccgcagaagttggacaagatgagggcgggaacacggccaatcttatcggaaagcagaccgtagaaaagtgtgcccaccacggagccaataaagaacagagactggccaatacgtgccttgtacgccgagtcgcagacccagttaagctaaatacgatatgatcgttagattttatatccagctttattgttcagtaaaccagacatacctctgtgttcatgcttctatagccgaaatcatagttgtagatccatttctcgcaggctttgctgctaacggtgacattgtggccattgatgtcatccagtcgggtgcacgagggattctcgaactgagcgtagatctcaccgatctccttatatgtcatattcacaagcttatcatgatagcaccagtgatctggcacaaaactaatgacagtctgcgtaaagtaatgctgaaattccaagaaaatcagtaagtttgctgaggcaatagaatggaaatcaagaactcaccatcgatacgatgatattaatgaacccgaagagggcgagtatcatgaactggtagcgattaaagtcgccacatttggccaggatctgatcgaagtccatgttgtatgagtgtaattggagcttagtgagctgggtttctgtgtgggtattgtttttgtactatatatggttgtgacttggttctatgaacgctgatttgtttgggaaaggaggaggcaagcccagtttccagcggagttcacatgcgatgtatcacaatttattgttagttgtcacatttgttcctttggcttggtctgaaataagaaagtgtgtttggatcgttaatttgagtcaatgaacttctctaagaatacatttggataagattatctttttggaccatatatcacagtgaacagaaagcaaataaattaaataaatattttcacaagcacagggaagcaatttcattgttaaaatttcaaagtattttagtagacttttgtcacaactaatataaatatatttagcaatgatgctacaaattactttttgtaacaaagtcggggggaatttcgtaatatgagcaacaatcttgtttaagtaacccccgttttttttttttatcaacttcggggaccgacgagattttagggctctaattttattattgtctagccacgttctgtcatcaaatcccgtttacttttccctctaattgtttttaaataatcgtaatagacaaataaatggattcacttagcacgttgggcgtagttaggcgagaaaatcgatcatgaaaacaacatttccactcgatgctaaccatattgaacatgattcgctgccaggcgagataagcaattgactaccgttgagcacttcgcagagcaaagataactgcgatcagactttggccaaacatcgttcggcgtgttggacgtaccgaaattaaggtcaccagagcggattccacaggctagttacatggggacttatcgctggcaaaatatttatataggcgttcatttagataaaaccccgaaaaaagtgctagttggaggcctgactaatgcgagggccataactccgcccagagactgttgtcaagtacgag

SEQ ID NO: 13370 - DNA, 1743 bp, DROSOPHILA
atggacttcgatcagatcctggccaaatgtggcgactttaatcgctaccagttcatgatactcgccctcttcgggttcattaatatcatcgtatcgatgactgtcattagttttgtgccagatcactggtgctatcatgataagcttgtgaatatgacatataaggagatcggtgagatctacgctcagttcgagaatccctcgtgcacccgactggatgacatcaatggccacaatgtcaccgttagcagcaaagcctgcgagaaatggatctacaactatgatttcggctatagaagcatgaacacagagcttaactgggtctgcgactcggcgtacaaggcacgtattggccagtctctgttctttattggctccgtggtgggcacacttttctacggtctgctttccgataagattggccgtgttcccgccctcatcttgtccaacttctgcggctttgccggcgacttctctaccattttcaccaagagcgtggccactttcaccctctgccgttttatttccggcctggcagcggacacaaacttctacctgatgtacattatagttctcgaatatattcgacccagcatgagaaccctgggtctcaacatggccgtgggtctgttctactgcctgggcctggttttcactccttggctggcagttctggtgggtcactggcagatctacctggcctgcacgtcgctgcccattctgctggtggtgctgtactactttgtggtgcaggagagtgcccagtggctggtcaccaggaatgacatcgacggggccatcgtaaggctgaagcgggtggccaagttcaatggttgccgggtgagccaggcggacttcgacgagttccggcgccattgccaaatgactcacgaaatgctgggtggcgatgacaagaagcaggccactctgctggacatgttcagaacgccacgcatgcgcaagaacacactcattctgtttttcaagagcatggtgatcactctgtgctacgatgccgtctctcgcaacgtggagggcatgggcatttcccccttcatcatgttctcgctgagtgccttggcagtgctgccctcgagtgtcctgctggtcctgctgcaggatcgcattggtcgcaaaggcatggcctcgggttccttgctggtgggcggactcttcaccgccgccgccggcattgcgatcgcgtaccagcagcacaaccacaatgccattctgctggcctgcctgaccatcgccgcccgtttcggagtggccatctcgtatgagagcggatctcagtacgccaccgagctgatccccacctgcgtgaggggtcagggcgtggcggcagtccacgtggccggattcgcggcctccttcctggcgccctacatcctctggctgggcaccttctttaaggcggcgccctcgatcatcctgggtgtcctcttctttgcaggctcctttgtctgcctgctgctgccagagacgctaaacaggagcctgcccacgaccatcgaggagggcgaggtgttcggaaagggcgagcgaatgttcgacttcccgtgcttgcacaacaagcacgacgacgaggagtccgaatccgagctggagaagtacaagcggaagcactccctgatcgacgccaagcagatgcagatggagtcctgctcgaatgggaaacgcaagcagtccttgatcgacgccgatcacgaggaacaggccctgaaggacgccaatcactga

SEQ ID NO: 13371 - protein, 580 aa, DROSOPHILA
MDFDQILAKCGDFNRYQFMILALFGFINIIVSMTVISFVPDHWCYHDKLVNMTYKEIGEIYAQFENPSCTRLDDINGHNVTVSSKACEKWIYNYDFGYRSMNTELNWVCDSAYKARIGQSLFFIGSVVGTLFYGLLSDKIGRVPALILSNFCGFAGDFSTIFTKSVATFTLCRFISGLAADTNFYLMYIIVLEYIRPSMRTLGLNMAVGLFYCLGLVFTPWLAVLVGHWQIYLACTSLPILLVVLYYFVVQESAQWLVTRNDIDGAIVRLKRVAKFNGCRVSQADFDEFRRHCQMTHEMLGGDDKKQATLLDMFRTPRMRKNTLILFFKSMVITLCYDAVSRNVEGMGISPFIMFSLSALAVLPSSVLLVLLQDRIGRKGMASGSLLVGGLFTAAAGIAIAYQQHNHNAILLACLTIAARFGVAISYESGSQYATELIPTCVRGQGVAAVHVAGFAASFLAPYILWLGTFFKAAPSIILGVLFFAGSFVCLLLPETLNRSLPTTIEEGEVFGKGERMFDFPCLHNKHDDEESESELEKYKRKHSLIDAKQMQMESCSNGKRKQSLIDADHEEQALKDANH

SEQ ID NO: 13372 - DNA, 2302 bp, DROSOPHILA
agtcgttggcagactcatccgagtcctgcgagaattcccaacggaaacgacgatcgctgatcacatcatcacccttgtccacaacatccgaggagagactggcggcgatcaccatggcgatgatacctaaattggatagacttggatgatttggtatccttttcgtcggcttccttttcctaactcaccaaagaacacgaagaaaaccttgttagactgcatatttgatgattgattgtagcttgagatgctttcgatgctgagtgagcttttggcttcggcttatatactaaaattttggcaagtgccttgcgaatcgtctctgacccagcagactgtgtttgactaccccaagatcaacgaaatgccccaaaattctacatagaaacaactaacaaaatattagcatagctattgagtttgagcgatcaaggtcagagctttcggggtttgctgggtgatttgtgttgttagaaccacgcttcaatgctgtaaattgggttgcaaattaggtggcagtaaaatatcttagagatacactaattgaatatacttaatattaatataaaggtccatacaaatccacacacatgccttctaaatcggtaaatgagtgttttttttagaaaaaaaaaacaaatattatagacattttaattacagtcatgcttttcatttaaaagggtagaattttggaaatataagtacattttccaaaactgaaagcttattttgtagcaaaaactatttatgatcctaactagttttaatattgtgatttgttttttattcatttaattttagttatataaaatgtaaggtcacagctcaaaagtatgcagcagaaacgtatgtatgtaaaatattttgtataatacacgcgtataagtagaattccgtgtatatttgaagtataagagcagtttgcttaaggctttctgcttataagttttcaaagtgttttcacatgcttttaaagcgtattaaaaagtgtaaatggttagttctcctcctcgcaagcatcaatccaatcgttgaacacatcaattgcctccgtgagatagtttatatgtgtttgaaaaaattcttggcacacggtacaggtaattcttcctatttttttcgccttatctctatgaatactatgaaattagcggagtaaaaccaaattttgattcctactcacagtttcgcttcacatgactgcttgtgattgcagaatggacaatcgaaaagaatgggcagcggctgaatatttttctttcttggggctcctttgcgtttggacttgcgacgacccatggcagaagatcagaagatacgatatattttaatattttaattgcaattttttaattaatatgctcttgcacacttctgactccactttcgtcaaattatatttttgacagtcgttactgcgggttcttttattatgattacattttagctagaaaaaagctgtttagctaggttgtaaaaaatcaacggagatataaatcatttatttgatgtttttaattccatactcaaaaagcgtaataatgattttattacacgtaatatataataataatacattttaaaatacgtaataagataataatacttttgggaatttatataaatataattttaaaattatatccgttcaaaactaaaaacatcctaatgtgaactcactgatttgtaataatctgtttaatactcctttgccgcttctctgtttttgtgtggggtttccagttgaataatttcaatgttgatattgatccgtttggatagcgaggatcttcaattgattgagcccacataagttgagcatctgtctagagatccttttaagaaataccttgggatccctccttttacgtaactcaatgtagcagaaaatccctttgtcgccgccattgtatctcagcaatcgatcgtgagcctgcttttggggcaaagtatcgattacgcaattcgattgagcaggcaaaataggtaattcggtgcccaaagatgtgggtcaagtgtttgggcagagagtagatttccgatgaaacgacaacagatatggacatgttcccacatcgcatagccaaggaataacgcagtgaagcgctttcaacataccgaatttgctctggctaaagcgccgcaggacaaaactgtgcgatgacagccaaatctgtttggagtgttaagggatttctctgctcgcagcgtgaattgtgagatggtccggtttttcgggatgcctgctgcttaccatattagcaccaggacatcaaaggacagctgaatgtgtcaacag

SEQ ID NO: 13373 - DNA, 249 bp, DROSOPHILA
atgggtcgtcgcaagtccaaacgcaaaggagccccaagaaagaaaaatattcagccgctgcccattcttttcgattgtccattctgcaatcacaagcagtcatgtgaagcgaaactagataaggcgaaaaaaataggaagaattacctgtaccgtgtgccaagaattttttcaaacacatataaactatctcacggaggcaattgatgtgttcaacgattggattgatgcttgcgaggaggagaactaa

SEQ ID NO: 13374 - protein, 82 aa, DROSOPHILA
MGRRKSKRKGAPRKKNIQPLPILFDCPFCNHKQSCEAKLDKAKKIGRITCTVCQEFFQTHINYLTEAIDVFNDWIDACEEEN

SEQ ID NO: 13375 - DNA, 3236 bp, DROSOPHILA
gtggggaagttagggcgagagcgaaagaaaggcgaagaaagtggggagcatgatggcgaggggagtgtctggaagctgccagaagagacaagagagcgggagagtgcgcatcctctcgctcttttcaccttctgttcggtgtttctgttgttgttcttgtttttggtgtggctgcagctgcgaagcaacaataacaaccacaacagagactcgaaaacagctgcacacgaaaacggtggctgtcaaactgttttgcaaaatttaaaatgtaactgtacttggcaaaaacaatacattttgctgtatttctgtatgtcgtaaaagatctttcgacctggaagctggagaacactttttccagccacttggccaccaccccgcctttgaacaaaccaaccaatcgattggccagcttattgatttttctattcgaacattttgcatttgttgctcgtttcggtcttttgcttagtgtgtttggttcgaaaaaagtattggcaatcatgtgggcatcgacatacacactttttttttatcacacccacgcgaaaaacacgcggcgccagccagactaaaaggatacaggcagcatatcctgcacacacacacacacacgcgcgcacaaaaaagctcgccaggatcgagtggtgcagttgaccagcaaaccgcagctgctgacagccaattttgagtagcggaaacagttggagctgctgccccgaaatgggtactcacttgatcagcagcactttttcgaatcaatatacccgtctattcaatttttttttaagcgggacgaagtcgcgcgcaaccaccggcttgctgggtttgttagagatgtgccgataactcgccactgcgatagctcgagttgctactttttgttgtacgccacgcgcttgggattttagcgaaatatgcgtgccacaacttagcttgtgccgcaaccccacacagtgctgccacctgtgggcgaaaaagttacgtctacatggtgttctggtcacactgcccccgccgtgacaaacaaaatagaaaaaaaaataaaacaaaagataaaattttagcctcccccctttgagaaataaagggtcatttgaggcagtttaaatcgaaaagaatccataggcacggagagcccagcacacatagaatgttccacttcagcggcttcaacatgatgttcccggagggacgcaattttcatgccaactacaagtgcttctccgtatccatgttgccaggaaacgagcgaaccgacgtggaaaagggcggaaagagtgagttacgagtgtaggctggacagaaattatgtgaacaacacattccatccacagttattatgcctccctcggcgctggacacgctcacccgcctgaatgtcgagtatccaatgctgttcaagctgaccaacgtcaagaaatcgcgatcctcgcatgccggcgtactcgagtttgtggccgacgagggcaaatgctatctaccccactggatgatggaaaacctgctgttgggtgagggcgacatactcaacatcgagagtgtctcgctgccggtggccaccttctcaaagtttcaaccgcacagcaccgacttcctggacatcaccaatcccaaggcggtgctggagaatgcattgcgcaactttgcctgcctcaccaggggcgatgtcatagccattaagtacaacaagaaggtctacgaactgtgtgtcctggagacaaagcccggcaatgcagtcagcatcattgagtgcgacatgaatgtggaatttgaggcgccagtcggctacaaggatcactccgaaacgcaggcatcgggctctgggcagcagggtgctgctggaactgttggcggcgaaatcgctggagccaccaacgccatactcgaagaggtcgtggagaccttcaagggttccggcgtacgtctcgatggtaagaagaagaaggaaagccagttggaaacgccggtcgttaagaaggtgctagcccgcggcgttccagactatgatttccagtttggactcatccgtttcgatcgcaacattcggcctatcagtgatagaagccaagaagatgatgccgtagctggcaatgcggacgcttccgatgcggagagcttccacggcaccggtttctcgatgaagaaaacgcgcaaatagctctgtatctctagttctagttatatattgtgtgacacatagaaattaaaggaaaaacctcacaggggcagcgtcaacttgatggcctcctccttgggcggagccggtggcgatatggtggtcatgggcggcaatcggcgtatcttgcgtccgtgtttgccttccttgcgcttccacagaccggaacgtggtcgattgcccatctcccgcatccgctgggcactgcccacatgctccttgttgtgttccgggttggacaggcgaccaaccgtcgccatgcaggtgcgctggaaggcgaactcccgcttcgagggcagctgcaccaccaccttttcgtcgaacttgcgcagaatggtgccgaaggtgccggcggcatggatcaggtggcacatctggccggggttcttctccagacagtgaatgcgtgtgcccacgggcaaggcgcccaatggataggcatcgccttcgttgggacgcactatgggatcatacaaaaaaaaaaaattatattggcataactggttgtttcagagccagtaaaatttctagattccatgctcagtttaagactatactcagaggattacttagaaaacgtttaatactcccgatgagtaacagtaagtaaatttacccggaatcctaggaataaagcgcgaggtcttgaggatatcgccagccttcatgttctcggtggccaggatgtacttcagctcatcgccgacggcaaccagggccactttggcggtgcgacagccatcgcgtagcacctcgagtaccagttcctcctgggcgccctccgtgggaccatcccgcacccatttaacccagcgatactgctgtttgatgcctccgccaatgcccttggccaccaagcgaccggagacgggatcccgaccagccaaatgggtgatcttcagcggctcaacggtgtacttctccggaaagtgcacggttcgtcggaattgctgtccggcaccaggttttggtttctccaccactttggttttgccgcgcaattgctgcagaaacgccggcgccgtgcgaaacggcgtttgtatagtcagcgttgtgc

SEQ ID NO: 13376 - DNA, 1179 bp, DROSOPHILA
tggtcacactgcccccgccgtgacaaacaaaatagaaaaaaaaataaaacaaaagataaaattttagcctcccccctttgagaaataaagggtcatttgaggcagtttaaatcgaaaagaatccataggcacggagagcccagcacacatagaatgttccacttcagcggcttcaacatgatgttcccggagggacgcaattttcatgccaactacaagtgcttctccgtatccatgttgccaggaaacgagcgaaccgacgtggaaaagggcggaaagattattatgcctccctcggcgctggacacgctcacccgcctgaatgtcgagtatccaatgctgttcaagctgaccaacgtcaagaaatcgcgatcctcgcatgccggcgtactcgagtttgtggccgacgagggcaaatgctatctaccccactggatgatggaaaacctgctgttgggtgagggcgacatactcaacatcgagagtgtctcgctgccggtggccaccttctcaaagtttcaaccgcacagcaccgacttcctggacatcaccaatcccaaggcggtgctggagaatgcattgcgcaactttgcctgcctcaccaggggcgatgtcatagccattaagtacaacaagaaggtctacgaactgtgtgtcctggagacaaagcccggcaatgcagtcagcatcattgagtgcgacatgaatgtggaatttgaggcgccagtcggctacaaggatcactccgaaacgcaggcatcgggctctgggcagcagggtgctgctggaactgttggcggcgaaatcgctggagccaccaacgccatactcgaagaggtcgtggagaccttcaagggttccggcgtacgtctcgatggtaagaagaagaaggaaagccagttggaaacgccggtcgttaagaaggtgctagcccgcggcgttccagactatgatttccagtttggactcatccgtttcgatcgcaacattcggcctatcagtgatagaagccaagaagatgatgccgtagctggcaatgcggacgcttccgatgcggagagcttccacggcaccggtttctcgatgaagaaaacgcgcaaatagctctgtatctctagttctagttatatattgtgtgacacatagaaattaaaggaaaaacctcacaggggcagcgtc

SEQ ID NO: 13377 - protein, 316 aa, DROSOPHILA
MFHFSGFNMMFPEGRNFHANYKCFSVSMLPGNERTDVEKGGKIIMPPSALDTLTRLNVEYPMLFKLTNVKKSRSSHAGVLEFVADEGKCYLPHWMMENLLLGEGDILNIESVSLPVATFSKFQPHSTDFLDITNPKAVLENALRNFACLTRGDVIAIKYNKKVYELCVLETKPGNAVSIIECDMNVEFEAPVGYKDHSETQASGSGQQGAAGTVGGEIAGATNAILEEVVETFKGSGVRLDGKKKKESQLETPVVKKVLARGVPDYDFQFGLIRFDRNIRPISDRSQEDDAVAGNADASDAESFHGTGFSMKKTRK

SEQ ID NO: 13378 - DNA, 4705 bp, DROSOPHILA
cgattcggcgttatgcagcgcccatagttgggcacctgggccgcctcgttggggaagtagaactctggaaatccagactttaggttcagagagcttaccaatattgtgaatacataaattaggtcattagctatggaagtacggaaacaggtttccagcgacttgtgaaggcccgcggcaaaaaaaaacaaatacgttaagctagtcatgtccagcagatgagcatcttggcagtcttctatttacttacggcccgccgatgatttcgccaaaatgcccaaaaagaggcagataatcgatggctttagcattttcgttgcgcaatcggacctcgttagtcctttctcaagacgtcgtcagtggtttgcggataatgttttgcctaaaaacaatattacagaccgaccgcagaagcagttatcaaaataaacggcgcgataatatggacgataccaggtgccacagcggagcggagtgaaacgaagaggccgaagctgagcttggcgcacaactgaatcttcggacggacgcggttctcggcctgcgagctttgtcgcaagctttttggcgagtctccaaatcagatatgaagataatcgtgggagcagatctttatctctcttccaattattattcttagtaattgtcagttggcttatttaactttggtactaatagaatttactttgtcacatgctgagtgtaagtaaagtactcggcaaatttaagggagtatctaccattatttaatccccgcctaagttcgattgtatcacatggtgttttgatagcaaaaagcactatcattaacgataagctaacggtatatttcgttctacagcaaactgaaagttctaccgactttaaatcggacctaaagcaaagtttaaagtcgcagtttaaattgcagcggtcgcgttgccaaacaacacagtatgaccgaattcgcaatgttgtttgccactgttttggcaactcgcatatagcggtacgtcgcagctggtgataagttaaatgtttaatttaaaaaatgagcgtggatatttagtaaaggtcgaataggcggcaagtttggagatcggcagtggtgtaagtagtacgtcgcttgagtgccgagtgagtgctgtatgtgcagcaataatgcgaatgcaagtctcatgtgtctggtccgatatttgcagctcataatttattcaaaatgcgctttgtgcggcggggaactgtccccaagattgcagcatgttgctgtgtggtggtcctgctggtcacctggtatgtgttgaacgtggagcgggatctggataagagcctcaaaatgtaagtatgtctagttgtgcgtcacagcggcttgggatattgattgtacgatgtttgtccatacatatgtatatgtacatatgcgcatatttgtgataaagagtatttatcttttgcaactaattcaattttgtatttaattaaagcgaaatcatcgagcgctccataagatcggctgtgaatcgtggcgagtgccggcatccccatctgccgctggacaatccggacatcatgaagttctacaagccggttgagcgaataaactgcggcgagggcatggactgggtcatgtgtgaggttggttgggactgggccccttctacaagagctgattgcttaacttaaacctcgtttcccccaaagaaatccatttgctttgtgcgaccagagattgcgtccagccacgaggatgtgatctgctcctacacggacattattcgcaagtcggactacaaggttcgctttgggcagtcactgcgcatgaaggagccctatgtgctgcaggccagcgactttgtcaaggtggtctgtcgatcctccagcggcgagaggtgaccattatcttattttatagttatgcctatactttaaagaatgatcttcatgtacttagttggtttggcatggcccacggaatacgggatacggtgccccgtccaccggcctccaatttctccccgaacttggccgtcctaccacccgaggcggttgcgcaggcccagcagcagatgcaggatggggccacagctcccatctacaatgtcctcatgtttggcttcgattcgctgagtcgcaatgccttcattcgcaagctgcccaggacctacgagtatctcacccaacagttgggcgccaccgttctcaaaggctataacattgtgggcgatggtacgccacaggcgctggtgcccctactgacgggtttcacggaactggagctgccggagacaaggaagcggttgtccggggcaggcagcgtggattcgtatcctatgatttggaaggattttgcccgcctgggatatatgacctcctttaatgaggatttgcccaatgtgggcactttcacgtaccgcatgacagggtttgaggcccagccggtggaccactacctgcgtacctactatgtccaggcggagcacatggccgccgagagcaagcccaactgcattggccaccagcctgatcacatcaccatgctggagtacacaaaaaacgtatgttctctttcgaaatgtgcttggaaactaactcattgtataattttcgtacagtttatgcttaagtatcgcgatgcaccgcgctttgccttcagcttccatggcggcttgtcccacgactccatcaacttagtgggagcagcggatgatgatgtccatgactggctggtggcgctcaaggaacgatcgctgctagacgacaccattctcatcatgatggccgatcatggcaatcgatttgccgaggtgcgagccactctgcagggaaaacaggaagagcgtctgccgttcttcagtttcgtatttcccgagtcgtttaagaagcgctttccgcaggagtacaaaaactttctggccaacgagcatcacctgaccacgccattcgacattcatgccacgctgaaacacgtaatacgtatgtacgacagagcgttagacatctacaagataataatgctggatttttcacagaactgcaaaccgctgtggatcaatttggagaaataaacgatccgaaaactgaaacaagcccgcctgggattcgcatctcggagttagcccgtggacgtgccatgtcgctgttggatccaattccgagcaatcgatcctgtgcggatgcctacatagagcctcactggtgtgcctgcctcaattggctgccattgcagctgaacgactcccggtatacgggcatcattctcaaggctgcccaaagtattgtaaatgccatcaacttggccacagtcgagcaacgccaatactgtgcacctctggaggttcgaatcatcaatttaatgattacatttccagataagataaagatcatacttccatttgtttcattgttcaacagattcaccgtgtaaattgggcgctgcgtctgcagccgcacaaggagctgctgcaattcaggacaaacagcgaccgcgacggcttcctggcggacatgacgggtcagacgctggtccgcgatgagatgtaccagctccaggtggtaacgatgcccggcgagggactgtttgaggcgagcgtggcctatagcctgcacacgttcagtgccacaacgaaactcacggacatctcgcgcgtcaataagtatggaaatcaggcccggtgcatatacgaccgggatccggagctgcggaagtactgctactgtcgcgattgatttgtgcacaaaatgacaagtccaaaacatagaaactgctaagcaatcaactggaatagatttctgcactgattgtagattttagattactccttccaaagaatattgtcactggctccttaagttaaaagatctgcctcagtttgtaatatacgttcctttaatcaacgatagtaatgagttaataaaaaaatgacatttttgtatgtgtaataaaaaaaagtagtcttaattagatatgggtacagatcgcctggttaactgggggtagcccgaagttatgtatgccaactcggggaatttaagttatagttatatgtatgcatacagtgcaaaatatcttttcttatacttacgattaccaattaaatagagcatttgtgtcgttccatatatatatcctcatatatttcaaggctgatgctaatccctttcttaagtaagaacttaatatttctgtttggatcgcttaggcagattaaccatagactaaaatacactgcgcacattatttggttatataggcctcttatcttatataggttaactataatacttgaaactatgatatattgagtaaatgtaggaggaactaaaaacaaataaaaagtaagtacgtaaatatcgtacaaaagtagttgtttattcgcaagattttagcactagtttacaaactttatttttttggtgagtaccttaaaacctttaacataaaataagggcagctggctgtgaagctgtcattaaataaagataatatttataattattgcatagaattcagtaaacaatattggcatatgtgtgttatagagttcaagatctctatgaggggaacaaggttttagagaggtacactcttggtgtaaactagtgtacttattaaattaatacaaattattattaaagagtagcaaatgcgtagaacgttaaaatcgtcgcgttagtgtataattgcaaaataatttaagattggtcttaaacgaaacgagtcttaaca

SEQ ID NO: 13379 - DNA, 2176 bp, DROSOPHILA
tggtgataagttaaatgtttaatttaaaaaatgagcgtggatatttagtaaaggtcgaataggcggcaagtttggagatcggcagtggtgtaagtagtacgtcgcttgagtgccgactcataatttattcaaaatgcgctttgtgcggcggggaactgtccccaagattgcagcatgttgctgtgtggtggtcctgctggtcacctggtatgtgttgaacgtggagcgggatctggataagagcctcaaaatcgaaatcatcgagcgctccataagatcggctgtgaatcgtggcgagtgccggcatccccatctgccgctggacaatccggacatcatgaagttctacaagccggttgagcgaataaactgcggcgagggcatggactgggtcatgtgtgagaaatccatttgctttgtgcgaccagagattgcgtccagccacgaggatgtgatctgctcctacacggacattattcgcaagtcggactacaaggttcgctttgggcagtcactgcgcatgaaggagccctatgtgctgcaggccagcgactttgtcaaggtggtctgtcgatcctccagcggcgagagttggtttggcatggcccacggaatacgggatacggtgccccgtccaccggcctccaatttctccccgaacttggccgtcctaccacccgaggcggttgcgcaggcccagcagcagatgcaggatggggccacagctcccatctacaatgtcctcatgtttggcttcgattcgctgagtcgcaatgccttcattcgcaagctgcccaggacctacgagtatctcacccaacagttgggcgccaccgttctcaaaggctataacattgtgggcgatggtacgccacaggcgctggtgcccctactgacgggtttcacggaactggagctgccggagacaaggaagcggttgtccggggcaggcagcgtggattcgtatcctatgatttggaaggattttgcccgcctgggatatatgacctcctttaatgaggatttgcccaatgtgggcactttcacgtaccgcatgacagggtttgaggcccagccggtggaccactacctgcgtacctactatgtccaggcggagcacatggccgccgagagcaagcccaactgcattggccaccagcctgatcacatcaccatgctggagtacacaaaaaactttatgcttaagtatcgcgatgcaccgcgctttgccttcagcttccatggcggcttgtcccacgactccatcaacttagtgggagcagcggatgatgatgtccatgactggctggtggcgctcaaggaacgatcgctgctagacgacaccattctcatcatgatggccgatcatggcaatcgatttgccgaggtgcgagccactctgcagggaaaacaggaagagcgtctgccgttcttcagtttcgtatttcccgagtcgtttaagaagcgctttccgcaggagtacaaaaactttctggccaacgagcatcacctgaccacgccattcgacattcatgccacgctgaaacacgtaatacaactgcaaaccgctgtggatcaatttggagaaataaacgatccgaaaactgaaacaagcccgcctgggattcgcatctcggagttagcccgtggacgtgccatgtcgctgttggatccaattccgagcaatcgatcctgtgcggatgcctacatagagcctcactggtgtgcctgcctcaattggctgccattgcagctgaacgactcccggtatacgggcatcattctcaaggctgcccaaagtattgtaaatgccatcaacttggccacagtcgagcaacgccaatactgtgcacctctggagattcaccgtgtaaattgggcgctgcgtctgcagccgcacaaggagctgctgcaattcaggacaaacagcgaccgcgacggcttcctggcggacatgacgggtcagacgctggtccgcgatgagatgtaccagctccaggtggtaacgatgcccggcgagggactgtttgaggcgagcgtggcctatagcctgcacacgttcagtgccacaacgaaactcacggacatctcgcgcgtcaataagtatggaaatcaggcccggtgcatatacgaccgggatccggagctgcggaagtactgctactgtcgcgattga

SEQ ID NO: 13380 - protein, 680 aa, DROSOPHILA
MRFVRRGTVPKIAACCCVVVLLVTWYVLNVERDLDKSLKIEIIERSIRSAVNRGECRHPHLPLDNPDIMKFYKPVERINCGEGMDWVMCEKSICFVRPEIASSHEDVICSYTDIIRKSDYKVRFGQSLRMKEPYVLQASDFVKVVCRSSSGESWFGMAHGIRDTVPRPPASNFSPNLAVLPPEAVAQAQQQMQDGATAPIYNVLMFGFDSLSRNAFIRKLPRTYEYLTQQLGATVLKGYNIVGDGTPQALVPLLTGFTELELPETRKRLSGAGSVDSYPMIWKDFARLGYMTSFNEDLPNVGTFTYRMTGFEAQPVDHYLRTYYVQAEHMAAESKPNCIGHQPDHITMLEYTKNFMLKYRDAPRFAFSFHGGLSHDSINLVGAADDDVHDWLVALKERSLLDDTILIMMADHGNRFAEVRATLQGKQEERLPFFSFVFPESFKKRFPQEYKNFLANEHHLTTPFDIHATLKHVIQLQTAVDQFGEINDPKTETSPPGIRISELARGRAMSLLDPIPSNRSCADAYIEPHWCACLNWLPLQLNDSRYTGIILKAAQSIVNAINLATVEQRQYCAPLEIHRVNWALRLQPHKELLQFRTNSDRDGFLADMTGQTLVRDEMYQLQVVTMPGEGLFEASVAYSLHTFSATTKLTDISRVNKYGNQARCIYDRDPELRKYCYCRD

SEQ ID NO: 13381 - DNA, 10090 bp, DROSOPHILA
catttgaaagccaaatttaaattttaagccacgcctcaaacaagcgcacgcatctcacacacacacccatacactgacaacaatggagcccacgagcgaaccacaaacgaggtagcccccaactcacacactcacaagctaaattttaaagcgcataaaatgtgtgtgttagtttacaattcactcgcagtcaagagagcgagagcgagcgcaagaacttctcctctccactccaattggattgtgaatgtgtgtccgtgtgagtgtggaacgcagagctccaaagctctctctctctctctcttctgccagcgattctgccttttctgcccccaagttccaattcaactgcagtcgacgcgcaaaagtggaaccagttaaacgtgtggagcgctaagtcgcgttttttatcacgtatacgccaccatttccccagtcggttttttaccccctcatcgtacacgtgtgtgtgtgtgtgtgtgtccctctgtatttgtgtgtgtgtgcgtggtaaaaaaagggaaaatcaacccttaaggcttttttaggggtgcaacgtacacaacacagcagcacaacagttttcaaactcaaaatcccaaacgccggcaaagagagcgagtgcgagagaaagagccagagctgccacagagcgagaaagagagagcagacagaggcagtcatcatcatcatatcatcatcgtcggaacgcaaacattcaggcctagagcgattatccgttagttcgctgagagctatcctgccgctgcgaccgcttctctgttgtcagtttcacacgagacacgaacgcgtccacacgaaagcggcgcttccaagaaatcagaataaatctacaagatactaacaagaccaacaaacgaataagaaacaatcagaacagaaacagatatttacagtgctcaagtgaattcacagtgcttaagaaacattaaacatatcgcatataaacactttgcatttgcaccattgagttgtgaaaatggttatgtcggagctacgttggcacaccgctagtcccgaggataataagaattccttgaagcgcgatttgctcaaatccacaccaaccagtgcccgcgaggccgccgttcacataatgcagaatcgatgtaagttaatgtcttccaaacacgttaagaacagtttaaattcttgcagttctaatcataaaaattccaaaaagatttataataaaacaaatataccattttggtttctaggtgtttcattaaatgcacctaaaggtgttacttctacttagattttgtagttattttttacaatacattttcttcatatggggttctagcctacaaatattaatttgtttgttaataattacacacgtaaagtaagtcattgaataacaaaaggattcctcttaatttgagccatgtcatctatattttatagtatcttttccaccatttggttagggtcacagtttttgacaaaattagtcttgcgattactcttctaaagttctcaagtttatagatacatttcgtgtttcataggattgtagtacattttaagttttatttggttctgtaatcagcaatccccaataagaaccatcctacagagaatcctgccaatagtttctcaaatccaaacatccaaattaaattttcaaaagtgtttgttacaatttttcctttcaccgctaagttactaagccagacctcgtgaaaattaccatggttgagtcagtcaggtgctctgcacatatcatactaaaaacccaagactcactgctccaatagccagaacaaagaaaactgcaatctgcttattgaaaataaacaccggcacaggtgtctccgtcataaatattaactcccagcgacccacttaaagacgggtctcaagaccactcaagactggcggtgccaggcgagaactactattgtactatgtacaaaacgaatagactaacaaacttagtagccagccaatgggtattacaaatgccggaccataaaaatatttattaaagacgcatttcttgcacaaccagcccacaaatatgaccatgtaaataggtgcaccaccgatactgatggcgatgggcactcaatggaaccgcttggccgttgtaaacaatacttttaatttgttgccttatcaattatcgtttttcgaagcgcagcgaatgcggtgcaataaaagagctcatttcgatgacaaatgtagtaaagaaaagaaaagaaaatcgtcgcaatatgcgtaataattccgatgagccatacttgaggtgcaccaagtggtacgggctttcgtatggactatgattgattatgtaaaacttctccaaatgaaaagtgagtaactgtcgtatgcaagtcaccagataagcaggcgacaatggagcatgctaattagattggcgctagatgataagttttggggattttttttacgttaaacaaatttccatagcctcgtacaggagtacttatgtggagcacgtgacgcaagtgactcgcgtaatctaaagaactaacgatagctaatatatgtctcatgatattcctataagagtttaccttgtacaatatgatttgcttatcgtcgccgcttatcgctcagaaaccaaaatcgagctaacgttttgcacacctgcacaatagccactgaaagattccaagaagtccagcacgtatagtaaacaagtatcgtcatcttttgatgattttaataaattaatcgaggcccatagaaaaatggttttaagttctgctcgcccaatcagttttaaattaatatatttggccgattacagcgagcggcaattgacgacaatgtccaacttgaataataaccttatttttagtcattgagctcatgcacttctgttcctcttttttttgtcgctttactatatcgcgttatcacctatcgccgctataaaagccgatcaagaaagagggcgtgtggccgctttttatgggtatttcttggaactcataggaaataaatgaagagtcgattaagatttacaattcgcaaaacggaaatcgatttaaaatgcagttaatatgattttgtaatgcaggctaagtgataagcaaacagtcaacaaggtttgtttactcttcaaagagctcaaaagagtgcgcagaccccaacttgcaattacattgccttaaaaacttacaaaaggctagttgcatatttaattagcatttattataatatttttagacaacaatggcttgcatgttagttgattcgaaggcctattaactagctagcctactgaaagaagtgagaataacatttaaataattccaaaggaccctacgctcctttatagttatcgcactctctcgaatcctttaatcaagctttcatttcgccgcattcgaagctttcgctcctggcgactttgccagttttgttttgctacgaatatacaggcagagacaaaggcaaaggagcacgcacattatgtttgctttcccttcactctattatgttttattttatttatttatgttatttttttcggctacttttcgggctgcccagcccagtccgcaatggaggggtcaagagttcaagacacgcagcttccgccgccgccgacgacgacgacgattcaatcgatagtcagtctcagtctgcgcacgtgatgaccatatagcattcatatatagaaagtcggttggttgcctcgcctgtggttcgtctgtgtattggttttagccacccccagccagccaactgtcgaggtcattgactaattgtgtgcgccacacaatctcctaccccttccccttccatcgccacgaacatcatcataagccgccacccccgctgggtgattctgaaaaattttattttatttccttcccggccgcctcaatttttgggggtggccgcctgtggttttcgcaaatttctctgccaaaaactgtaaaattctggaaaacctttcgaatgcggctgctcatttcactcgtgctggacacgcgctagggtgttaaatttcccgagcactcccacctccaccggagttacataatttatgtggcatttaaacgccgggtttctgtaaaatgctcatctacctaactctagccgatatatacaacatatacatatatatgtttgttggatcctcacatatgccgcaccacttgaacgaactggcagcagttgtgccgcttaattagcggctcaaaggcgtggccaaaagggcgacagaagtgtgccagaagtgagaggaaagattgtggttgcataaggaaggaaatcgagctcagataaactgattcacggagaatagggtcttaggtagcgaaatcgaagaaaggcacattaatagatatgcggttagaacaggggcattgaaaaatgttagatggaatgactaaaagaataaagtaacttatattcttattcaatgccttcagctttattgtttagtaatcttatatcccaaaaacacaatctgctgatagaaaccttgaaatttccttaaccccaacccagaaccctagtgtcatacaacacccaaacaagcagagcactcaatttctaatgcatttcggaggggtcagcacgctgcactcgtaaattagccatcgagttcaaaacgaaattcaattgcttccgaaataaaaatgcaacacaaatgccgtccgtgttcgatggcaacttcaaaaattcaaatcgtacacggaccaggtggttccttgaactccagtttggctgcccctcgacgaggttcataaaaatatccttttataggcaaccgtgtggatgtctggactggccatttggtcagttctggcttagaatgtatatcggtatcgattttgtgtatcgtaaactttggagcatttgcttcttggaacattttatgtttgcgacgtgtgttattttacttttagctttaagtggtctcaatttggctagtctcaaatttgtgttttcccttttattttcagatatcagtcgcctgtcgcgttcgccatcgccacttcaatcgaatggtaagtgtattttcctattttacccattttccacattttagagcatcagctgttgtccgaaaacgatttacgagatttgtccacttcatacagatagacatggatgtatgtgccactatatatgtatttataccaggtctgaaacatctgctttttggggcaagcggcatgaggcatctcggtttcactaaatcactcgcatgttttgggttcgaaacaaaagacaataaaccggagggaatatcaaactatatattcaacccttgcctgcgacagccacgcgttaggcactggatatacatatagggtatatagatgaatggttcggtttttagggttgattgggctgtttcgctaggcagggtcgcccctcctcacacaatggcatgtcaaaacttttgtcacagcccctgcgactgtgatttagtcgagaaaatggagaggggcgtctttaagttgattttgatgtcttattaaatgggtgtttcgacttaacagcttcttaagtagttgctgaggtgacaattgggcctgtcaattcaccctaattgttcgttcgcctaactgaggagctgggacaaccattgtcgagtgcggtggtctttgggtgcactataaatatttgatagattcataaaaaccttcgattattattcataactcgttgctcgcagaaggctgcgttcaatttgcaattcacacttttcaaatttcatggacttcgttagtcacggtccgaacaaaaagccaacttcaaccttttctggctccctttcgatattcccccctccctcctttttttgaccacattattgacagcatttcgcttgatttgaattcgaatatgtgtgagggaggctgtctggtcgtgtgtatgtgtgtgtgtgtgtgtgggactggacacagttgctgtgatttctttcacgaacatgaacatatatatttacatatattttatgcaaaaattattccgttatgccggccgtatgtgggagcgcttttggggtagctcaatgtgcagtcaaactgaccatttggctttttattattggttgtgctaaatggagcagaggcgtgctgaaaaggggtttccttgtaggacttttaaatgtgtcttaggctatgtcaaaactttacttacggaaaccccttcagaaggtctggaaaatgcgatatttcatgtttaaataaattccgaataatgtaatgtagctataattgtagattccttagaacccctttcataaagataaagacacagatctccgcctatgccgatagctattcacacaacacatacaaatcgaatttgcacatcatctgaataccaaatggacgcacgtagcccatccaaggaggagagaaagaaatcgttcctggccagggttcggtcgcatatgtaaaaaggatgaccatgtggtcggtgggtcgcccacttgggcgaataagtcatcaaattcacgtagcaccagggatcggggattgaggattgggcattcggtattgggggattggaaatcgggcatcaggaggcgagcagaagtcataaagtagcccaggcaaacatatgcaaaaattgccagcagtggacaggatgtggaaattggttggttcggggcttggttcggatgcggtatgggaatgcgaaattctggatgccagaccaggggccacttcaaagggtttaactcctttgattgccccctttgtgaggggggatgtctggtcgtctagttctagcagttttagctcaaaaataaactctcgtcgtgtatttaaatattattgcaaatcaattgggccgagacgcaaccctcctccactccatttcccatcgccttgttgtataaataaaatgcatacaaatagcaaatttatacaaatcgcctggccgggcatttgaaatgctaaaatgccacttaaaagcagctaaaagcgtcagccaaaatgaaaagaaaacatgagaattccatttgatgtcaaggtggaactatgtaaactatggaccgatggtctcgcagggggtgaacgaaagagtcgaagaaattttcgcataataaatccatggcgctgggtgggtggtggtcacgtgaaaggctttcactcgaaaccgaaaaacaacggactatgaaattgaacgaaaattatacaaaacgcttgtgtggcctatgctaaatttatgcaaaaggacattcgaatgggtaaaacggtcaggagctcgagatacccacagggtgactcattttgcatggcatcagtggatgggaaaatacattcaccatggggcttggccatttggttacgccttcttttccctgactttttcagaaatgtaaaactgatgaagtagttggatatgcttactgacatatttttaccatttggaatttttgtacttgtattttcctaaccccgaaatctttctttacttccagcttccgattgcgatgataacaactcgagtgtgggcacctcgagcgatcgctgccgatctcctttgagtcctgcgctctccttgagccaccagcaggccaaacgccagctgatgtcgctgcagccccacccggcacaccatcatcacaatccgcaccatttgaaccacctgaaccaccatcagtacaaacaggaggaggattacgatgacgccaatggtggggcattgaatttaaccagcgacaatagtcgccacagcactcagtctccatcgaattcggtgaaatcggccacagcatcgccggttccggtaatttcagtgccctcgccagtgccgcccatgatctctccggttttggctccctcgggttgtggctccaccacacccaattccatggcagcagcggctgcagccgccgccgctgtggcatccaccatgggtagtggcatctcgccgttgctggccctgccgggaatgtcctcgccacaggctcaactcgcagcagctggcttgggcatgaacaatccactgctgactggatcactgtcgccacaggattttgcccagttccatcagctattgcagcaacgtcaagttgcgttgacacagcagttcaacagctacatggagctgctgcgaagtggttccctgggcctggcacaggacgatccggcactgaccgcccaggtggcggcagcccagttcctaatgcagagccaactgcaggccctcagtcaggccagtcagcaattgcaggcactgcagaagcaacagcagcgccaggtggatgagccactgcagctgaaccacaagatgacgcaacagccacgcagttccacaccgcactcgatccgcagccccatcgcaattcgcagtccggccagctcaccccagcagttgcaccatcaccaccaccatccactgcaaatcacgccgcccagctcggcggccagtttgaaattgagtggtatgctgacgcccagtacgcccaccagtggcacccagatgagccagggcaccaccacgccgcagcccaagacggtggccagtgctgcagctgctcgggcagcgggcgagccatcgccggaggaaaccaccgatctagaagagttggagcagtttgccaagaccttcaagcagcggcgaatcaagctgggcttcacccagggcgatgtgggtctggccatgggcaaactgtatggcaatgacttctcgcagaccaccatttcacgtttcgaggccctcaatctgagcttcaagaacatgtgcaagctgaagccgctgctccagaagtggttggatgacgccgatcgcaccatccaggccaccggtggtgtcttcgatcctgccgccttgcaggccaccgtcagcacaccggagatcattggtcgccgtcgcaagaagcgcacctccatcgagaccaccattcgcggtgctctggagaaggcctttctggccaaccagaagcccacctcagaggagatcactcagctggccgatcgtctgagcatggagaaggaggtggtgcgcgtgtggttctgcaaccgtcggcagaaggagaagcgcatcaatccctccctggacagtcccacgggcgccgatgacgacgagtcctcctatatgatgcactaagagatcaaggatcgtctatggactgcaagggaggtcacgtttagggacaaagacagtgcaatgtgcgggataaatcgaaggaagcttagcaacagcaggtgtgtactcctctaaaagatatatttataaatagatacatttattgctttaaatccaatggttaaataacgtaattgtttttgacaatattccgtttcatttcttaaatatttcatatatttttcaaagttgataatggcttgaaaatttaactaatttttattttattttcaagattagatatttcttaatgattatctcaactaacgttatctatttctttgcttattatcttgcaggttcaaagtcgcaaacacatcaaatactagcataattctgtactacggataggtatcgactccaaaacaaaacggggtttgcttgtgttaactattaatggtatttattttaatgtaattctattatgaagattattcaaaatattgctgcttaagtgaaccgctactcattcggcattcaagttcacttgctcaacaacattttgtggatgcataaggaaatggtatttatttgccttgataagcaaatgaattcgacttctttataagtctttttggcgtatgtgtattactaatatttaagtacactctttgcacaattttcaaagtcaaaataatgaattcctagcgaataattagaaagtttaccactttccacgtaattacgtatgtagattacattgtaagcatatttatttttcgcgtgaatactgtgataatcaatttgaatgattttaattttaataaatgaaaaagaaaacaaagaaaaacaatataaacataaactaactgtactttgtatgttatgggctagtaaactaacacaaaaaacattaatttaaacctatcgtatttatgtgtaaaaaccgattgaatttatgaaacacgaaaatatttacaattgtaaaacatgaaatactagaatttttaaatgtataaca

SEQ ID NO: 13382 - DNA, 1761 bp, DROSOPHILA
atggttatgtcggagctacgttggcacaccgctagtcccgaggataataagaattccttgaagcgcgatttgctcaaatccacaccaaccagtgcccgcgaggccgccgttcacataatgcagaatcgatcttccgattgcgatgataacaactcgagtgtgggcacctcgagcgatcgctgccgatctcctttgagtcctgcgctctccttgagccaccagcaggccaaacgccagctgatgtcgctgcagccccacccggcacaccatcatcacaatccgcaccatttgaaccacctgaaccaccatcagtacaaacaggaggaggattacgatgacgccaatggtggggcattgaatttaaccagcgacaatagtcgccacagcactcagtctccatcgaattcggtgaaatcggccacagcatcgccggttccggtaatttcagtgccctcgccagtgccgcccatgatctctccggttttggctccctcgggttgtggctccaccacacccaattccatggcagcagcggctgcagccgccgccgctgtggcatccaccatgggtagtggcatctcgccgttgctggccctgccgggaatgtcctcgccacaggctcaactcgcagcagctggcttgggcatgaacaatccactgctgactggatcactgtcgccacaggattttgcccagttccatcagctattgcagcaacgtcaagttgcgttgacacagcagttcaacagctacatggagctgctgcgaagtggttccctgggcctggcacaggacgatccggcactgaccgcccaggtggcggcagcccagttcctaatgcagagccaactgcaggccctcagtcaggccagtcagcaattgcaggcactgcagaagcaacagcagcgccaggtggatgagccactgcagctgaaccacaagatgacgcaacagccacgcagttccacaccgcactcgatccgcagccccatcgcaattcgcagtccggccagctcaccccagcagttgcaccatcaccaccaccatccactgcaaatcacgccgcccagctcggcggccagtttgaaattgagtggtatgctgacgcccagtacgcccaccagtggcacccagatgagccagggcaccaccacgccgcagcccaagacggtggccagtgctgcagctgctcgggcagcgggcgagccatcgccggaggaaaccaccgatctagaagagttggagcagtttgccaagaccttcaagcagcggcgaatcaagctgggcttcacccagggcgatgtgggtctggccatgggcaaactgtatggcaatgacttctcgcagaccaccatttcacgtttcgaggccctcaatctgagcttcaagaacatgtgcaagctgaagccgctgctccagaagtggttggatgacgccgatcgcaccatccaggccaccggtggtgtcttcgatcctgccgccttgcaggccaccgtcagcacaccggagatcattggtcgccgtcgcaagaagcgcacctccatcgagaccaccattcgcggtgctctggagaaggcctttctggccaaccagaagcccacctcagaggagatcactcagctggccgatcgtctgagcatggagaaggaggtggtgcgcgtgtggttctgcaaccgtcggcagaaggagaagcgcatcaatccctccctggacagtcccacgggcgccgatgacgacgagtcctcctatatgatgcactaa

SEQ ID NO: 13383 - protein, 547 aa, DROSOPHILA
MQNRSSDCDDNNSSVGTSSDRCRSPLSPALSLSHQQAKRQLMSLQPHPAHHHHNPHHLNHLNHHQYKQEEDYDDANGGALNLTSDNSRHSTQSPSNSVKSATASPVPVISVPSPVPPMISPVLAPSGCGSTTPNSMAAAAAAAAAVASTMGSGISPLLALPGMSSPQAQLAAAGLGMNNPLLTGSLSPQDFAQFHQLLQQRQVALTQQFNSYMELLRSGSLGLAQDDPALTAQVAAAQFLMQSQLQALSQASQQLQALQKQQQRQVDEPLQLNHKMTQQPRSSTPHSIRSPIAIRSPASSPQQLHHHHHHPLQITPPSSAASLKLSGMLTPSTPTSGTQMSQGTTTPQPKTVASAAAARAAGEPSPEETTDLEELEQFAKTFKQRRIKLGFTQGDVGLAMGKLYGNDFSQTTISRFEALNLSFKNMCKLKPLLQKWLDDADRTIQATGGVFDPAALQATVSTPEIIGRRRKKRTSIETTIRGALEKAFLANQKPTSEEITQLADRLSMEKEVVRVWFCNRRQKEKRINPSLDSPTGADDDESSYMMH

SEQ ID NO: 13384 - DNA, 10298 bp, DROSOPHILA
aggtgcagttggctagacgccagccccagattgagcccattaacgatgcctcctcgtcggcagtctggtcatctattggtaagtgctcagtgtttctctataacttaaaaacgaaatcaaaccttatgtactccccaaatagccgccagcaaatcacaaaagggtagccacaaggaccaccgcgagatggttcaatacgatgaagacttcttgctctagagcgcaataattagtttctacgtttagctttctacttactttatcccttagtaacagaacacatttcagtttattttaaataattttgctttattgaaaatacgcttctatatatatgttcactttctggctaagtactcgcatttcaagttataacgttcaaatgaattcaatgaaaaagattgtatgttttgtatattaattcctacgttttgatctaaattaaacaacaatatgtttaacaattgaatctctcgctttgccttacgtggtagaaaagatgagcaaacaaaataagttcttattagtggtcctcgccccctcctcgcaagaaacagagaacgtcgtatgtatgtacatagcatgagttaagtaaatagttaatacatgatcgttgcttctgttgctatgctctgccatatagatttctatatcgttggtagacaacgttgaaaaatgttccctctatatttctggttagtacaagttagatgtcggtatgtgtgtgatgatgggtcattgaactgggattctggtttcgattgttttgtgtgactagtagcacgggcacgcccctgcccaacgccgcccccattggcgcacctcattcctaaagtaatttcttgttagtatcattaaggccttcaagtttcgagcggacacctggccgcgtttaaattcgtttcttcatcccgccaagtatcttggccagattcgatgctccaaaatgcaataccgctccaaaggataacaaaaccaggatgggactgcccacagtccctcacgtctgccttccatgatcgttcccgggcggattaaagtagtcccaatgatgggtgtgcacctgccgccccgttaacaggaataccaaaactgcgagcgtgatcgcgatgaagaggatcaccagtgctgatatattacgtgtcgcctgttgaggctccattgcttcacctcgaacatagtgcgtcagctggttgataatgttaaccagttccaggctgcaggcggaggcaaaattccgtcctgcttgagcaaccgtcttgggctgatcgtcgtcgtagtcttcatccaatggctgggtagcactgcgggtacgagagcgacgcgatcgcgagcgtggtcgctccaccaagtgttcctctggttcggaacctgattccggttcgaggggttcctggacatgacgacgtcgacatttgtgcggtgcctttcgctcgactgatttcaagtcctccgcttcctccgcctctgcgcttcgctgcagattaaagaaggctagtggggccaaggactgaaggtactcaacactgggataggctgtcggcggtggaggtagtggcaacaaaccggcatccgtctgggtctgctcgtccagattggatgcgggtggcacttgctcggtggtcttgctgtgacgaggtggcttaacgggcagctccttctcggaggtggcgggttcgctacttgcctgccgactagtctgggtttcagtggtaagcaaagatggacgctgctctcgctgcacccgctccacaatgtcatcaataaaaccaggcgggagttcgatattctgcaccaccagttgtccggacttgcactgcagatcgtctgctttgacttgattgccatgcagttgcgatacttgaatctgaccagcctgcagggcatggacgcgcagacgttccacctctaattcggccaggcgactggggaattgcggttctggcgcagattgcaccgtctggatgggcgtaagctcgcggctgtactgttcggctatggtcagggctgtggtggcaatggtttctagggcggtggtggacttgcgacgtggtggtggaagaggaggctcctctggttcctcctctttgtctccaaaagctggttcggtgggcaaagtggcaacgaattttagctcaacttcggcctcggtgggttcgctagctgtggatttgtgaatggtttcctcaactttctgggtttcgggctcagtcggggtatgttccgtgtcggataaagtgtgctcctcctcggagagaggctgttcaccatcggataagggatgctcatcctcagatgggtgataaccgacctcggaggtggcttgctcctcttcagattggtggtaatcaatctcggaagcagccaattcctcctcggagaaggcctgctcttgctctgattcttgctccttctccttttggcggtagtcagatagctccttctccattgcttcctgtagctccttctccagagcctcctccagttcctgctcagttagttccttttccaatttcgttgtttcctgctcttcctcctgctccgaaaacttttcctcctcatactcgctgtccctgagggttcgttcaacttcatcgtcctccagtttactctcgtagtcgctctccagctgagcctgctgtagttgctccaccgctgcgtccaaatctgccgtgctggcggcgtagtcactcaatgccacctcaccgtgctcatcctccacgtcggatttactttgcaccgagctgtcagagagcaagccctcacgacgcagttcctcctcctcccgtcgcagatcatcgtcaatcaaatcggcagcactaatgggtctaacgattagtgaggcctgcaccgtggcatcatcctcgccaacagttaggctgggagtgggcacacggcgttcgatgatcaccgccgatgaaggcgtctgcggccggctcagcgacttggaacgatctgcttgcgatgaagcccgtgatcgctccgacatgctgcgctgattggcgtcccggaatctctgcagacctttagccagctgctcgtcctcggacagaactcgagctccatctacctcatcctgctcctgagctgcctctacgctgcgcaacagatcctcaagggttttgttagccgatccattggagcgtcgcggttcgatgatcttcatgtcctcagtgatctcgaactcctcgcacacaaaatcatcgggcagcggatccgtttgggtggacacctctacctcaaactcaccctggtcataactatccgcctggctggaactggccacctgttcactgtcctcgtaactctcgtgagtctggcttcctgctctcgtggatcgcttctcgcgcggaggacgcggtggcggcggcagtggtcggaacttcatcttgttgatgactgcgcccgactgcaaattggagcgatccaaagcacccggctcctcgtagtcatcctcctcttccggctgcttcgtcttctccttctgcgactcgtagctagggaaaagggtttgaggatcattagacagaatcttgggtttgggttggggttcgcaactgagcaaaagccaaaggcaaaaggcaaaaagagctgtgtctgttgtgtggtgatcggctttattgtgtgtatggagtgcgtgtctcgggaggatcggattagttgcttattgcctagcctagtctaaaacttaacaacaaaggaatattaaatagaaacttaacaaaaatgcattcgaaacaagttaacggcaaccaaaaaaatgtaacaactcaattggtcaaagctcaagaggctatactcttacttcgacttgatcatcagcggtatctcgtccaggctggccgcggatctgcggcgtggcaccaccggagagtcctcagtgggcacgtattgctgtggtggcggtggtcgttcgggtggcggtgatccccgagagcctcgaatgctgggcaacgtggcgaaccgctcacccggcgatcgtatgaacttcttccggcgggcaggtggcgttggcttcggaagcggttccttgcggaccaccgcatagctggaagcgggcaagaaagcaactcctggcattcttttgttggcggaataggggccttgtacttacccatcactctccagcatatcgatgacgaacttctcatcgctccttgtccgtggtcccacatcttcgttgtcatccagctcggcgcgggactttatgtgcccgtccagaatcagggagtcggcaccacgggaagtgcggtcgtcctcggaacgctgtgtgcgcgcagaggtggcatccgtaaatctgtccggcgtggctagcggtatgtgacgatattcgtgttcagtgcgataaacaattacctaaacagaaaacattgtggcttattaagtagatgcagtcatcagttttcaatagtttcatatattgattatgctctggaaaatgactccctgaattcaaattctactcacatcttcgtgtggctgcaaaaaggtgttcgatactgatctaccaccgaagccgttaatgaaggagtctgcatccttgtccacggatgcgtcgtcccttgtgcgtttcttctggcgcctcggtgcctgcggacggggcttattctgtagctcctgctccatctcctcctgaatcatcgccgctgccttgccgccaagatcgaggttattgagtgcctgctcggaatccgtgagcggttgatctctggccggcggccgtaggtactcctcgtcatcttcgaagtactggatactgctaccaccatcctgggggatgtcctggctgccctcaatcgagtatttgctgcgactgcgagccttacgaagtggtcgctttggagtgaactcactgccattttgtgacatggatagatcgtcgccgtaatcactgcgttgaaactcctgcgagtcgaagtcaggctggtagtttcggtggaggcgacgcggcttggccggaggcacatcgtagtcaccatattccgccggaacctgctcggctgagtagcccacatgcttaagggcattgggcatgtcgtaaccctcgcgaatagcttcactgatgtactgtcgcaactggatgttatcttcggaaattccacgcttgcgaaggaagaactcatcatcatcgattgtctccatgaccactttcttgccagaactggctgtggattgagcatcctgtaagtcgtggaacttgtaaaagccagcctccgcctccaattccgccttcctcagtagcttgttcttctgtatatccttctccgtccagccttcagcatctctgctatcctccgaacgcaggtcagaatcttgatgaaccatagggcggcgcttgaactcccgggatctcttacttgatatctcgtgaatggcccggttttcctcgtcgaattcggcaaactgtttgttatcggccaccacgcccaaaatgcccatctcctgttggggctgtgcctcactggccgtatcttcggtgccttccagatcctccttcatgcgtcgctccagagaggattctctgtcgaagctttctagttcgctgccgtagcgtcggtaacgtgatccttcgctatcgttgtagctcacatcggagaacttatccgcccagcgggaacgaacgggtccgggtccacgatcaccttgcggagagctggtagaggtctgcgacggttgcgtctccgtgctgggaatcacactaaggccttcagttcccaatgatgactcagtggccaccgcaactggttcctctaccggcttcttcttacgaaaagcacgtgggtaggtgccaaagttgaactcgaacttcttctttggcgccggctgagttggggacgctgtgcctccagtgccttccggggtttcatccgaaaccacttcaccttcgttttccttgaaacttttgctacgacgcagcttcagagtggagaacttctctggcaacttgaacttggacatgtccggcttgttaaacttggtgaactcgggtcgctttagctctttaagcttggacatatccggtcgcctaatctcaggcatcttgatcttcgagaactcgggagccttaaagcgtcgtcgctccttggccttaccttttggactcccggaaactggttttggtttcggcttggtttggagtcgtgtgcgtaattttccagcttgcaaacgtatgccatcctgcatcttcttggtgcgatcctgtgccgaagccatgaaacccttgcgacgattctccggctgcaacggcaactcctccaaggcgcttgagtccacttgactggtgtggatttcataatcagtccgggattcagtgcgtggtgtggtcccggcggaactaagcggtaagtcgatgtccatgggcagctgcagttcgctttgggggctaggtgctggcgaggattcgtgcgccggcgtcacgcccacgggctcgtattcatgatcactggaaaatagaagcggaatttaagattagttcaaggaatttacaagtggattactttcgtgtgtgaggaatgcgtagctctgtgggattgaatttgacaatattatttacaatatttacctctttaataacttatcttcataatttgcaaccattttcgttccccattccaaaattataaataggctcaaatttgtttatgaggatcataattctattacctcccaggctgacttatgatatatgattttaagtttcactaatttagtcaatttcaaaaatgctaattgccttgttttgcgtttctaaaaggggaagtgatattttgcacattgaacgtgtggtgtaaaagcggttggtaggttggttggttaaagaaggcctgctgcttgagtgtcgaggtcggtggctcaggatggggtcagaataggtgtcgatggcttaccgagtgaaataggtccgttcgagaaagtctctgtgttctaattgcttttggttcaggggcgagttggactcgaattccgcgaggcgcgatttgcgttcgtcaaaatggaaactaaccgtctttgtcatgcggcccaccccatagagctgctcctgggatcgccccaaatgggagttacggtcgtgtgactgggtgcgcggttcccggaacgacgtcttcctctgaaccccaaagccgcgctgctcggagggagcacgatgttggagcggtcggtagacgtgactgccacttccggatatctgaatgggcaccgagatgagtggtcgactgcctcccaacgaaatatccctgctggccgagtccctgtgtccgtagccaggatccggcatctcgatctcgctggagtaaaggttcctgtttccggccataaagcttccaccgcttatgctcatgctagcactcacacttccaccacgcggcacagcggacaccaccaccggtgcaaaggcctcactgatgtccaccgatgccctttccgaggcggcgaaatcctcgcgactgctgtacatggtctgagcattaggcggcggagccagtggctttgttggccgggcacagtactgatccatgtcgtccactttgagggaaaacgtctcagtgactcgcactgccagtggttctgcttcttttcccttgactgccgccgaggaagtggtcaccacggacatggcctgtggtttactgcgcgaaaacacggatagcagcttaacgggtgatggcgacttctcgtgcctctgcatgctgggactaggcgttcgggaacgctgtgcagccggagacggtgatttctggcgcggctccttggcgccaaacattgatttaaaacgcgatgtataggaactctttacttctgatgaggcatcttgtagattgatggcagtgggagctggagtggggctcagcgccctttcttgttggggcagccattgggttggtctttccggcgagagttgcctctcaggcgtatgctgacgcttcagattttgaaggccagctgatgccaccggtggttccgctggagtgggactggttgtacgactggagggcaactgaagagtggccattacgggcggtgactttggcctccttggcgaaggtcggggacttcggctgcggtgctccgctgccttttcctcctcatcccgtaccagctgatcaatatccaccactggtatgtcgtggattatctcgattttcgtatgttctcccactttcaggggagcaacacttaagtctccaccaatggatggtggtcgtctggtctctgcttggatgttgtccctgatttgcacaatactgtgctcctgggcaacttgttccagctccgccactgttttggccaatggatcaatgggagtgactgtgggctgatagggcgattgcagctgctgaaaatcggattccacaaggaaagaaggacgcactgcatcgccaccaaagcgggatacatcgatgggtcgattctggggaagcgtattgccgggtaactggttttccttgttcacctcgcttggccgcatataatccgttgaaagtggcggcttggcaatccggaaatcctgctgcgacggagctggcgaagcttggtgtgatgggaagagtggtgggtggtccatcaatcccggagtagctgtggctggtataaggttcagctgcggtggctgcagtgaacccggcactatgctcgcctggaagaggtcggcattggatgctcgacgactagtgctggccgatcgacgtcctccagtaggttgactactgggtatgtttatgtccgcacagtaaagatccgtctttgagttcccggctgagatgcggcgtagagatggaccactccgcatggaaagggtatcgggaaaacggcctacgctgcccgaggacaagccacccattgacagttgtcttcttcttccagccacaaaggctccacctactccctgatggggagcagaaaactgatccggttccgtggcatccgagatgctgcgcactaccaatcctcgcgagcgcgcagtctgctccagctccggatagcgttccatgaagctaaggtccaccgagggtgccacatccgcatgactcaccacttcgaaactgtgagtggacagatcatcgcgcattatattgaggtggctcggtggaaactgctcctcggcatgtccacttagacgggagccaggacgcgaatcaactggatttacacgctctgggagcagtgaatcgcacatgaagtactggcaggcgcagcggacgtccaaggaggcaccactggcgctctcctggcgcgacacaaagtgacgcttctcggcgggcagggcgcccacggaggcggatcgtcgggagttcaacatggtcaccaactattacttgctcactgtccccggacgtaattcctccactgcttcgcctccacctccttcgtttctttgccaatttcagtgcttttgttcgttttcgttgtgtggtcgtcgtagtcggtggctatttttaagcaccaccagagcagacattgaatttattttctgccccgaattcgaaattcttgcggggccccaagaatttttgctctgcggtgttgcaaattgcaatcgtttgaattagttattcagctacaagggattaataatcgtttatcgataccgggctttggaatcactcaattgctgtccctatcgctcgcatttgagatgttgttttgggtcccgttatgtatgcgtgcttgtttatgcgtgcgcgagcgcgtctacatcgttgcgattttcggccaggactgacgaatgggagagcttttcgccatttgggcgacacaaatttttcaaccgaatttcttgttcgaaagatgaaaatgttgttctttaaaattagcaaaaacacacatagtcgcgacacggattaggcgcgtgattgtgtgagtgtggtcacaaagcaacttgactgatcataattgcgatcgtggtgagctttgcacagaatgtggtgggttggggcgtggtggggcagaggataatcggaagatgaataaggagaagtaacaattagtcgctcggcctgcactttatagttctatttttgggggccttttggcctgcctgccggaaatcttcttgtcattcgtcgacctttagcgcgctaaatatatagtcttcaatttgccgtttaatcttcgccagtctcgcgtcgttagttcctggcctatccatgtaattatatgttgaattgcgacctcgagaaacggacgagacgagacctttgggagtagttttcagatgatcaagaagtcaatgaatgaatccaccctgttcctttaccacctcaaatccacttgagtccagcccaacacttcagtattta

SEQ ID NO: 13385 - DNA, 7320 bp, DROSOPHILA
atgttgaactcccgacgatccgcctccgtgggcgccctgcccgccgagaagcgtcactttgtgtcgcgccaggagagcgccagtggtgcctccttggacgtccgctgcgcctgccagtacttcatgtgcgattcactgctcccagagcgtgtaaatccagttgattcgcgtcctggctcccgtctaagtggacatgccgaggagcagtttccaccgagccacctcaatataatgcgcgatgatctgtccactcacagtttcgaagtggtgagtcatgcggatgtggcaccctcggtggaccttagcttcatggaacgctatccggagctggagcagactgcgcgctcgcgaggattggtagtgcgcagcatctcggatgccacggaaccggatcagttttctgctccccatcagggagtaggtggagcctttgtggctggaagaagaagacaactgtcaatgggtggcttgtcctcgggcagcgtaggccgttttcccgataccctttccatgcggagtggtccatctctacgccgcatctcagccgggaactcaaagacggatctttactgtgcggacataaacatacccagtagtcaacctactggaggacgtcgatcggccagcactagtcgtcgagcatccaatgccgacctcttccaggcgagcatagtgccgggttcactgcagccaccgcagctgaaccttataccagccacagctactccgggattgatggaccacccaccactcttcccatcacaccaagcttcgccagctccgtcgcagcaggatttccggattgccaagccgccactttcaacggattatatgcggccaagcgaggtgaacaaggaaaaccagttacccggcaatacgcttccccagaatcgacccatcgatgtatcccgctttggtggcgatgcagtgcgtccttctttccttgtggaatccgattttcagcagctgcaatcgccctatcagcccacagtcactcccattgatccattggccaaaacagtggcggagctggaacaagttgcccaggagcacagtattgtgcaaatcagggacaacatccaagcagagaccagacgaccaccatccattggtggagacttaagtgttgctcccctgaaagtgggagaacatacgaaaatcgagataatccacgacataccagtggtggatattgatcagctggtacgggatgaggaggaaaaggcagcggagcaccgcagccgaagtccccgaccttcgccaaggaggccaaagtcaccgcccgtaatggccactcttcagttgccctccagtcgtacaaccagtcccactccagcggaaccaccggtggcatcagctggccttcaaaatctgaagcgtcagcatacgcctgagaggcaactctcgccggaaagaccaacccaatggctgccccaacaagaaagggcgctgagccccactccagctcccactgccatcaatctacaagatgcctcatcagaagtaaagagttcctatacatcgcgttttaaatcaatgtttggcgccaaggagccgcgccagaaatcaccgtctccggctgcacagcgttcccgaacgcctagtcccagcatgcagaggcacgagaagtcgccatcacccgttaagctgctatccgtgttttcgcgcagtaaaccacaggccatgtccgtggtgaccacttcctcggcggcagtcaagggaaaagaagcagaaccactggcagtgcgagtcactgagacgttttccctcaaagtggacgacatggatcagtactgtgcccggccaacaaagccactggctccgccgcctaatgctcagaccatgtacagcagtcgcgaggatttcgccgcctcggaaagggcatcggtggacatcagtgaggcctttgcaccggtggtggtgtccgctgtgccgcgtggtggaagtgtgagtgctagcatgagcataagcggtggaagctttatggccggaaacaggaacctttactccagcgagatcgagatgccggatcctggctacggacacagggactcggccagcagggatatttcgttgggaggcagtcgaccactcatctcggtgcccattcagatatccggaagtggcagtcacgtctaccgaccgctccaacatcgtgctccctccgagcagcgcggctttggggttcagaggaagacgtcgttccgggaaccgcgcacccagtcacacgaccgtaactcccatttggggcgatcccaggagcagctctatggggtgggccgcatgacaaagacggttagtttccattttgacgaacgcaaatcgcgcctcgcggaattcgagtccaactcgcccctgaaccaaaagcaattagaacacagagactttctcgaacggacctatttcactcgtgatcatgaatacgagcccgtgggcgtgacgccggcgcacgaatcctcgccagcacctagcccccaaagcgaactgcagctgcccatggacatcgacttaccgcttagttccgccgggaccacaccacgcactgaatcccggactgattatgaaatccacaccagtcaagtggactcaagcgccttggaggagttgccgttgcagccggagaatcgtcgcaagggtttcatggcttcggcacaggatcgcaccaagaagatgcaggatggcatacgtttgcaagctggaaaattacgcacacgactccaaaccaagccgaaaccaaaaccagtttccgggagtccaaaaggtaaggccaaggagcgacgacgctttaaggctcccgagttctcgaagatcaagatgcctgagattaggcgaccggatatgtccaagcttaaagagctaaagcgacccgagttcaccaagtttaacaagccggacatgtccaagttcaagttgccagagaagttctccactctgaagctgcgtcgtagcaaaagtttcaaggaaaacgaaggtgaagtggtttcggatgaaaccccggaaggcactggaggcacagcgtccccaactcagccggcgccaaagaagaagttcgagttcaactttggcacctacccacgtgcttttcgtaagaagaagccggtagaggaaccagttgcggtggccactgagtcatcattgggaactgaaggccttagtgtgattcccagcacggagacgcaaccgtcgcagacctctaccagctctccgcaaggtgatcgtggacccggacccgttcgttcccgctgggcggataagttctccgatgtgagctacaacgatagcgaaggatcacgttaccgacgctacggcagcgaactagaaagcttcgacagagaatcctctctggagcgacgcatgaaggaggatctggaaggcaccgaagatacggccagtgaggcacagccccaacaggagatgggcattttgggcgtggtggccgataacaaacagtttgccgaattcgacgaggaaaaccgggccattcacgagatatcaagtaagagatcccgggagttcaagcgccgccctatggttcatcaagattctgacctgcgttcggaggatagcagagatgctgaaggctggacggagaaggatatacagaagaacaagctactgaggaaggcggaattggaggcggaggctggcttttacaagttccacgacttacaggatgctcaatccacagccagttctggcaagaaagtggtcatggagacaatcgatgatgatgagttcttccttcgcaagcgtggaatttccgaagataacatccagttgcgacagtacatcagtgaagctattcgcgagggttacgacatgcccaatgcccttaagcatgtgggctactcagccgagcaggttccggcggaatatggtgactacgatgtgcctccggccaagccgcgtcgcctccaccgaaactaccagcctgacttcgactcgcaggagtttcaacgcagtgattacggcgacgatctatccatgtcacaaaatggcagtgagttcactccaaagcgaccacttcgtaaggctcgcagtcgcagcaaatactcgattgagggcagccaggacatcccccaggatggtggtagcagtatccagtacttcgaagatgacgaggagtacctacggccgccggccagagatcaaccgctcacggattccgagcaggcactcaataacctcgatcttggcggcaaggcagcggcgatgattcaggaggagatggagcaggagctacagaataagccccgtccgcaggcaccgaggcgccagaagaaacgcacaagggacgacgcatccgtggacaaggatgcagactccttcattaacggcttcggtggtagatcagtatcgaacacctttttgcagccacacgaagatgtaattgtttatcgcactgaacacgaatatcgtcacataccgctagccacgccggacagatttacggatgccacctctgcgcgcacacagcgttccgaggacgaccgcacttcccgtggtgccgactccctgattctggacgggcacataaagtcccgcgccgagctggatgacaacgaagatgtgggaccacggacaaggagcgatgagaagttcgtcatcgatatgctggagagtgatggctatgcggtggtccgcaaggaaccgcttccgaagccaacgccacctgcccgccggaagaagttcatacgatcgccgggtgagcggttcgccacgttgcccagcattcgaggctctcggggatcaccgccacccgaacgaccaccgccaccacagcaatacgtgcccactgaggactctccggtggtgccacgccgcagatccgcggccagcctggacgagataccgctgatgatcaagtcgaactacgagtcgcagaaggagaagacgaagcagccggaagaggaggatgactacgaggagccgggtgctttggatcgctccaatttgcagtcgggcgcagtcatcaacaagatgaagttccgaccactgccgccgccaccgcgtcctccgcgcgagaagcgatccacgagagcaggaagccagactcacgagagttacgaggacagtgaacaggtggccagttccagccaggcggatagttatgaccagggtgagtttgaggtagaggtgtccacccaaacggatccgctgcccgatgattttgtgtgcgaggagttcgagatcactgaggacatgaagatcatcgaaccgcgacgctccaatggatcggctaacaaaacccttgaggatctgttgcgcagcgtagaggcagctcaggagcaggatgaggtagatggagctcgagttctgtccgaggacgagcagctggctaaaggtctgcagagattccgggacgccaatcagcgcagcatgtcggagcgatcacgggcttcatcgcaagcagatcgttccaagtcgctgagccggccgcagacgccttcatcggcggtgatcatcgaacgccgtgtgcccactcccagcctaactgttggcgaggatgatgccacggtgcaggcctcactaatcgttagacccattagtgctgccgatttgattgacgatgatctgcgacgggaggaggaggaactgcgtcgtgagggcttgctctctgacagctcggtgcaaagtaaatccgacgtggaggatgagcacggtgaggtggcattgagtgactacgccgccagcacggcagatttggacgcagcggtggagcaactacagcaggctcagctggagagcgactacgagagtaaactggaggacgatgaagttgaacgaaccctcagggacagcgagtatgaggaggaaaagttttcggagcaggaggaagagcaggaaacaacgaaattggaaaaggaactaactgagcaggaactggaggaggctctggagaaggagctacaggaagcaatggagaaggagctatctgactaccgccaaaaggagaaggagcaagaatcagagcaagagcaggccttctccgaggaggaattggctgcttccgagattgattaccaccaatctgaagaggagcaagccacctccgaggtcggttatcacccatctgaggatgagcatcccttatccgatggtgaacagcctctctccgaggaggagcacactttatccgacacggaacataccccgactgagcccgaaacccagaaagttgaggaaaccattcacaaatccacagctagcgaacccaccgaggccgaagttgagctaaaattcgttgccactttgcccaccgaaccagcttttggagacaaagaggaggaaccagaggagcctcctcttccaccaccacgtcgcaagtccaccaccgccctagaaaccattgccaccacagccctgaccatagccgaacagtacagccgcgagcttacgcccatccagacggtgcaatctgcgccagaaccgcaattccccagtcgcctggccgaattagaggtggaacgtctgcgcgtccatgccctgcaggctggtcagattcaagtatcgcaactgcatggcaatcaagtcaaagcagacgatctgcagtgcaagtccggacaactggtggtgcagaatatcgaactcccgcctggttttattgatgacattgtggagcgggtgcagcgagagcagcgtccatctttgcttaccactgaaacccagactagtcggcaggcaagtagcgaacccgccacctccgagaaggagctgcccgttaagccacctcgtcacagcaagaccaccgagcaagtgccacccgcatccaatctggacgagcagacccagacggatgccggtttgttgccactacctccaccgccgacagcctatcccagtcgaagcgcagaggcggaggaagcggaggacttgaaatcagtcgagcgaaaggcaccgcacaaatgtcgacgtcgtcatgtccaggaacccctcgaaccggaatcaggttccgaaccagaggaacacttggtggagcgaccacgctcgcgatcgcgtcgctctcgtacccgcagtgctacccagccattggatgaagactacgacgacgatcagcccaagacggttgctcaagcaggacggaattttgcctccgcctgcagcctggaactggttaacattatcaaccagctgacgcactatgttcgaggtgaagcaatggagcctcaacaggcgacacgtaatatatcagcactggtgatcctcttcatcgcgatcacgctcgcagttttggtattcctgttaacggggcggcaggtgcacacccatcattgggactactttaatccgcccgggaacgatcatggaaggcagacgtga

SEQ ID NO: 13386 - protein, 2439 aa, DROSOPHILA
MLNSRRSASVGALPAEKRHFVSRQESASGASLDVRCACQYFMCDSLLPERVNPVDSRPGSRLSGHAEEQFPPSHLNIMRDDLSTHSFEVVSHADVAPSVDLSFMERYPELEQTARSRGLVVRSISDATEPDQFSAPHQGVGGAFVAGRRRQLSMGGLSSGSVGRFPDTLSMRSGPSLRRISAGNSKTDLYCADINIPSSQPTGGRRSASTSRRASNADLFQASIVPGSLQPPQLNLIPATATPGLMDHPPLFPSHQASPAPSQQDFRIAKPPLSTDYMRPSEVNKENQLPGNTLPQNRPIDVSRFGGDAVRPSFLVESDFQQLQSPYQPTVTPIDPLAKTVAELEQVAQEHSIVQIRDNIQAETRRPPSIGGDLSVAPLKVGEHTKIEIIHDIPVVDIDQLVRDEEEKAAEHRSRSPRPSPRRPKSPPVMATLQLPSSRTTSPTPAEPPVASAGLQNLKRQHTPERQLSPERPTQWLPQQERALSPTPAPTAINLQDASSEVKSSYTSRFKSMFGAKEPRQKSPSPAAQRSRTPSPSMQRHEKSPSPVKLLSVFSRSKPQAMSVVTTSSAAVKGKEAEPLAVRVTETFSLKVDDMDQYCARPTKPLAPPPNAQTMYSSREDFAASERASVDISEAFAPVVVSAVPRGGSVSASMSISGGSFMAGNRNLYSSEIEMPDPGYGHRDSASRDISLGGSRPLISVPIQISGSGSHVYRPLQHRAPSEQRGFGVQRKTSFREPRTQSHDRNSHLGRSQEQLYGVGRMTKTVSFHFDERKSRLAEFESNSPLNQKQLEHRDFLERTYFTRDHEYEPVGVTPAHESSPAPSPQSELQLPMDIDLPLSSAGTTPRTESRTDYEIHTSQVDSSALEELPLQPENRRKGFMASAQDRTKKMQDGIRLQAGKLRTRLQTKPKPKPVSGSPKGKAKERRRFKAPEFSKIKMPEIRRPDMSKLKELKRPEFTKFNKPDMSKFKLPEKFSTLKLRRSKSFKENEGEVVSDETPEGTGGTASPTQPAPKKKFEFNFGTYPRAFRKKKPVEEPVAVATESSLGTEGLSVIPSTETQPSQTSTSSPQGDRGPGPVRSRWADKFSDVSYNDSEGSRYRRYGSELESFDRESSLERRMKEDLEGTEDTASEAQPQQEMGILGVVADNKQFAEFDEENRAIHEISSKRSREFKRRPMVHQDSDLRSEDSRDAEGWTEKDIQKNKLLRKAELEAEAGFYKFHDLQDAQSTASSGKKVVMETIDDDEFFLRKRGISEDNIQLRQYISEAIREGYDMPNALKHVGYSAEQVPAEYGDYDVPPAKPRRLHRNYQPDFDSQEFQRSDYGDDLSMSQNGSEFTPKRPLRKARSRSKYSIEGSQDIPQDGGSSIQYFEDDEEYLRPPARDQPLTDSEQALNNLDLGGKAAAMIQEEMEQELQNKPRPQAPRRQKKRTRDDASVDKDADSFINGFGGRSVSNTFLQPHEDVIVYRTEHEYRHIPLATPDRFTDATSARTQRSEDDRTSRGADSLILDGHIKSRAELDDNEDVGPRTRSDEKFVIDMLESDGYAVVRKEPLPKPTPPARRKKFIRSPGERFATLPSIRGSRGSPPPERPPPPQQYVPTEDSPVVPRRRSAASLDEIPLMIKSNYESQKEKTKQPEEEDDYEEPGALDRSNLQSGAVINKMKFRPLPPPPRPPREKRSTRAGSQTHESYEDSEQVASSSQADSYDQGEFEVEVSTQTDPLPDDFVCEEFEITEDMKIIEPRRSNGSANKTLEDLLRSVEAAQEQDEVDGARVLSEDEQLAKGLQRFRDANQRSMSERSRASSQADRSKSLSRPQTPSSAVIIERRVPTPSLTVGEDDATVQASLIVRPISAADLIDDDLRREEEELRREGLLSDSSVQSKSDVEDEHGEVALSDYAASTADLDAAVEQLQQAQLESDYESKLEDDEVERTLRDSEYEEEKFSEQEEEQETTKLEKELTEQELEEALEKELQEAMEKELSDYRQKEKEQESEQEQAFSEEELAASEIDYHQSEEEQATSEVGYHPSEDEHPLSDGEQPLSEEEHTLSDTEHTPTEPETQKVEETIHKSTASEPTEAEVELKFVATLPTEPAFGDKEEEPEEPPLPPPRRKSTTALETIATTALTIAEQYSRELTPIQTVQSAPEPQFPSRLAELEVERLRVHALQAGQIQVSQLHGNQVKADDLQCKSGQLVVQNIELPPGFIDDIVERVQREQRPSLLTTETQTSRQASSEPATSEKELPVKPPRHSKTTEQVPPASNLDEQTQTDAGLLPLPPPPTAYPSRSAEAEEAEDLKSVERKAPHKCRRRHVQEPLEPESGSEPEEHLVERPRSRSRRSRTRSATQPLDEDYDDDQPKTVAQAGRNFASACSLELVNIINQLTHYVRGEAMEPQQATRNISALVILFIAITLAVLVFLLTGRQVHTHHWDYFNPPGNDHGRQT

SEQ ID NO: 13387 - DNA, 3691 bp, DROSOPHILA
cacccgcagggcgtcctgatccatcacacagatggcggtcaaatggtcgtcatccgggtggacagccgccttcagctgcgccagtcgcccgcgcacaaaactgcgattcaggaagcaggcgaagcgcaccggcgtatcggtggtgaaacacatgcgccggtacaccccattgtcggtatcgtcgtcatcgttgacgccttgtgtccacaccaccgtgttccggttcacatagagctcctcctcgttgttaaccatatagtcgcacattggctccacgcgccgcaccagcggtggattgagcagtctgttcggcagcgaggtggcctggagaccacatcgctttgtccgctcggtcaacttgcgtcgcagggcggcgcgctcctcggatgcctcgtagtcatcgtacagctctcggactgtccacgactcctgtccgcccgaagggcagtcctcaccggccgacgagatgttcacattctggaggcgctgcagcagcagatgctccgtggtgggcagttggtggcgcgccattggctggtcatgtgggcccggatgctccgcggacgtctgacggccgcgcggcacaaactccagcggcggttctgcgacggcgatcatgtccgcgtcgccaggtgcatccagaattgcgattgacaagttaattgattacaatttattattagcaaggaatttgcacaattatttaaaaactgtcatcgaaatcgggtggcgataagtgcctgattctatcgggcctgcagtacttcgatatgaggagagctatcaaaaggccgataacgataggaagaccagaatcgcgacaaacaaaacaattaccagtatatgccataaagtcataccgaaagaaatgctagagaaatggctttgcctatttttaaaaatataaaatataacagttcgattgcttttactatcgattacaatgccggttggtcacttgtagcaaccagctttggtccgctggcgtaccggttattttcccggtctggcagcacagtgcgtttgttcggcttttccaattggatttcggagtctggattttgatttgagcagacaaacggaaccggaaatcctggccagaatttggcaatgagcagcggcaccgccggctgcaagcgcgcgcacagcatcgaggttgagcagccgctgacgtcggagcgcctggagcacagcctgctgttggtcaagggacgcctggtgcccaagtgttccacggcgcgtcaactgaaggcgatcctcgatctgcccgagcacctgtcccaggagcagctcacccagctgtcggccggcggcgagtttaagctcctattcgacttggaacaagcgaatcgcgaggaggaggaggaggagagcgcctgcctcctggagttgcgatcctgcacggccacccgaacgattagcttcagttaccggccccgccgcagctcctaccgggtgcagccgctctacctgctctgtcaggacgaggagaagacgctggcgcagcagcacgaggtgcactccctcatcgatcttaatttgcggctggtgcagtccatctacgcgcacaaactgcacgcggcgggctttcccaaccgcaccttcacgctcaacggcaagtgctgcgccttccgcagccagttgacccggaaacaggcgctggcgaagagcgaggacgagctgtggcagcatttcgccggcgagattatcgcctgtccgcagtggggccaccagttgctcctcaagttcgtcgcctttgtgggctgcacgcgctacgacggcgacgcagtggtggccagcggtgactcctcgtacgccaacatccggcggcatctcaagggacacgcagcactcggtggcggcggcttggcgctctttggtagtgcccacttctacgcgtggcccacgagcttcgcggagatcggcgactgtgtgcgcagcgcccagcgggtggacatcgcccgcctgccggacgagagcaactatcggcggacgtacggcggcgtctatgccagcaccttgggcgccgtgtgccacgaactgggccactgcttcgatctgggccacaccagcgagggtgtgatgggccagggcttcgactacttgaatcgcgtgttgaccgtggaccagcccacggagcatttgccgcagcgaattgtggacgcccgcaggggctcacttgccaatactaattcatccgagggcggatcatcctcatccagctccacctcctcctcctcctcgtccgccggcagtggcgccgcaacgggcaaccgcgcccgcctcaccaaactgaaattgcagccaagcagccaactgctggacaactaccacaaccagcgacgccacgatagcttctattttgcacgcaactgtgccgtaatcctggcccatcatcgctggctgaatttggagctggagcagacggctgccgtcgactttgaggcggccagcatacaattgaaccgcgacacgcgtgagattcgctccagcaggcccatccgactgatcgagctgcgctgcaaccagaacagcctggtggcccactacgaggagttcgaggagccgtatgtgcaccgcttccagctgcccgcttcgctgtggcatctcctcgcggagcagtgcacccactacgttttcgtgctgaccaccagtggcgacaccaagcggctatcctgcgattcctcctaggattgccgcagcgcgaggtgagtggcccacgtccttggcatagttaactggatgaaaggggcaactttttgcaatgcttgccatatatgaaaatattatcccgaatgcgatttcaatgtatatataatataatcgctttgtaattagtgaatgtacttaaaaatactcgacaagagtagtagaaataatttaagaaagatatcattctgtttgaatgcaactcaattagccagcaatcaattaagctgataaagattccgtcgaaagattcccccgccacgcaatcaaattgcttgataaaaccgaaacccagagcccagccatcatcggtgagtcattgctgttccattgccagattccatacgcggtgacgtgcaccctggttggttggttccacaaaatcaaactgtctgactttcgcagcgctggcgaaaacaaaatagggaaaacaattcagattaacatgggaatgccataattttatttattgataagccttatcgctgttactatgattcgaaaatgcgtgatagttaaaagtttgtctaaaagtttttatttgctaacttgcaaattggcatttgaaaacggttgccatttgaaatacatatatctttttaaaacgcttttttttttagctagaaaaacggtttttaactatttttagtttttagtatttagtttactaaatacttttggtatttacacgcattgcggttagaaaaacgttagcgtattgagtaaattattgtttgattcgagtttttgaatctaaaacactttcaaatactttaatttagcaattgaaagtgttgaaattgttaaagtaacttagaattgtaagtaactttgtctatttcaatctcagttcaaaacttctcaatctaaagctgtaatttttgtaagttcctgctgtccgataatttgagacataaaatcgcgttttatcccatggtgcaaacctgaaatcaggttttcgtactaagccaactcggattgg

SEQ ID NO: 13388 - DNA, 1691 bp, DROSOPHILA
cccggtctggcagcacagtgcgtttgttcggcttttccaattggatttcggagtctggattttgatttgagcagacaaacggaaccggaaatcctggccagaatttggcaatgagcagcggcaccgccggctgcaagcgcgcgcacagcatcgaggttgagcagccgctgacgtcggagcgcctggagcacagcctgctgttggtcaagggacgcctggtgcccaagtgttccacggcgcgtcaactgaaggcgatcctcgatctgcccgagcacctgtcccaggagcagctcacccagctgtcggccggcggcgagtttaagctcctattcgacttggaacaagcgaatcgcgaggaggaggaggaggagagcgcctgcctcctggagttgcgatcctgcacggccacccgaacgattagcttcagttaccggccccgccgcagctcctaccgggtgcagccgctctacctgctctgtcaggacgaggagaagacgctggcgcagcagcacgaggtgcactccctcatcgatcttaatttgcggctggtgcagtccatctacgcgcacaaactgcacgcggcgggctttcccaaccgcaccttcacgctcaacggcaagtgctgcgccttccgcagccagttgacccggaaacaggcgctggcgaagagcgaggacgagctgtggcagcatttcgccggcgagattatcgcctgtccgcagtggggccaccagttgctcctcaagttcgtcgcctttgtgggctgcacgcgctacgacggcgacgcagtggtggccagcggtgactcctcgtacgccaacatccggcggcatctcaagggacacgcagcactcggtggcggcggcttggcgctctttggtagtgcccacttctacgcgtggcccacgagcttcgcggagatcggcgactgtgtgcgcagcgcccagcgggtggacatcgcccgcctgccggacgagagcaactatcggcggacgtacggcggcgtctatgccagcaccttgggcgccgtgtgccacgaactgggccactgcttcgatctgggccacaccagcgagggtgtgatgggccagggcttcgactacttgaatcgcgtgttgaccgtggaccagcccacggagcatttgccgcagcgaattgtggacgcccgcaggggctcacttgccaatactaattcatccgagggcggatcatcctcatccagctccacctcctcctcctcctcgtccgccggcagtggcgccgcaacgggcaaccgcgcccgcctcaccaaactgaaattgcagccaagcagccaactgctggacaactaccacaaccagcgacgccacgatagcttctattttgcacgcaactgtgccgtaatcctggcccatcatcgctggctgaatttggagctggagcagacggctgccgtcgactttgaggcggccagcatacaattgaaccgcgacacgcgtgagattcgctccagcaggcccatccgactgatcgagctgcgctgcaaccagaacagcctggtggcccactacgaggagttcgaggagccgtatgtgcaccgcttccagctgcccgcttcgctgtggcatctcctcgcggagcagtgcacccactacgttttcgtgctgaccaccagtggcgacaccaagcggctatcctgcgattcctcctag

SEQ ID NO: 13389 - protein, 526 aa, DROSOPHILA
MSSGTAGCKRAHSIEVEQPLTSERLEHSLLLVKGRLVPKCSTARQLKAILDLPEHLSQEQLTQLSAGGEFKLLFDLEQANREEEEEESACLLELRSCTATRTISFSYRPRRSSYRVQPLYLLCQDEEKTLAQQHEVHSLIDLNLRLVQSIYAHKLHAAGFPNRTFTLNGKCCAFRSQLTRKQALAKSEDELWQHFAGEIIACPQWGHQLLLKFVAFVGCTRYDGDAVVASGDSSYANIRRHLKGHAALGGGGLALFGSAHFYAWPTSFAEIGDCVRSAQRVDIARLPDESNYRRTYGGVYASTLGAVCHELGHCFDLGHTSEGVMGQGFDYLNRVLTVDQPTEHLPQRIVDARRGSLANTNSSEGGSSSSSSTSSSSSSAGSGAATGNRARLTKLKLQPSSQLLDNYHNQRRHDSFYFARNCAVILAHHRWLNLELEQTAAVDFEAASIQLNRDTREIRSSRPIRLIELRCNQNSLVAHYEEFEEPYVHRFQLPASLWHLLAEQCTHYVFVLTTSGDTKRLSCDSS

SEQ ID NO: 13390 - DNA, 2711 bp, DROSOPHILA
ctaattacgcggcagccaaatgcagcatatcctaacatccagccaatgttaatgtaacatttcaattgtgtgcggcaaaataaattttcacataattgccaaaagtcggtgtccaagcgggtattgaaaagcgaatcgaaaacgaatcgtaaacgtcgcaaaagtgaaagggcaaagctcgggttggattggctccggggtctggggaccctttaaatggtttagcggaagaataacctttctaagtcgacacgataactgcgccaaagttgaagccaggcacacgatttgccgccaggtgggcaagagtcaatccccgcccccgtggctccgcagtactggtccgcgccatgtgcttgatcgctggcccaagacaccgaagactccgtctggccgggtctctcttgatctgaaattagtttattgcctcgactgcgccatgtgaagcaggcgacatttgccgccgtttgccagtataaatggccagaacttccagcgaacgcttgcagttttggttacttcttctagcgcgatcgtcgtcgaaaccaacaatactccggccactctctacgtgtggtgtctgctgagtctgtgacaactgtgagcgagtggaaaggatacccctgcaaggacatcgttatgctgaaggtgtgaaaacaaaggataccaaagtgctcttatagtctggacaatcaagtttaagccgatttaacatattctcaaggggaatgccaagatgaattaaccaagtgttcctattactaaaagcttatattttattcatacaaagaaaattagtgcataaagaagatagtttaagtcctaatgaaacccgtcgaatgatccgagttaatatgtgatttgatttaaattaaatttaattgccaagaattattctaaacaattcttccctgtcctcatattacttaaagcttatttcaatttaatcgctttcaacattttcttttaatttttttttcagatttccctgctgagcgccatgctcggcatcgcctatgcgggcgtgattggacccggaccatactatggcggtccagctggtcccggacctctgcaccactatggaggatatgcaccgcagcatgggcccctgccaggtccctatgtggcgcccaagccggctgctcccgaaccctacgatcccgacccgaagtactcctttggctacgacatccaggatggttatactggtgacctgaagtcacagcacgagacgcgccacggagatgtggtgaagggcagctactcggttgtggatccggatggaaccaaacgcaccgttgactacacagcggatccccatcacggattcaatgcggtggtccgcaaggagccgctggcctacaaggcaccagcccacctggcacccgtcgtcgcacctgcacccgctccagtaccagctcattacggcccagctccggcgcctccacttccgccggtgcccaaggctcctctgctttcgtatcctcttgccttaggaccttaccaccgtggtgctcccgctcctgcaccaggtcccgctcccgctcctgctccagctccggtgtctgtgccagtggctactccagtcctgccctccgcccacttccatgccgcctatcccgccctggcgcacagcccctatgcccactatccggctccaggtccggcccccgctccagtggaaccccatgcctactaccatcactgagggaccaaggttctcaactatctgatctgatttgattcgacttcatctatcgcacgcagcttacactgacccaaaactgaaactccggctatatctgtgccaaacgctgtactctcaatctcttactctgtgttcttcgagggatttgataccgatccaacatgtagattgattctaagttacccctagcctatgtacacgtctttaagaaaatgttgttgaatggttagtctaggaaataaaacgagaattgaaaaacctaacaaatttgtttgcggtcttccctagaaactattagattgaagttccgaagccaagaagaaaatagtcccacaaaaagtttttaaataatttaaaaaacaacgttttaacgcaattgatgagtgttttatttattgtatcaacttttcgcaatggttcatatatgtatatgttatatgatatcgtatgtggcatatctcatatgtataatttctgattatgtataaatatgtatatgtgtgttgtatataaacgtttcgagtatgtcaccgtatgttataaataagtttattacaatgcataatgtgttattatttatgtattatgttttatgtttaataggttctatgagctaccattcgtagaacatactgaaatgttttcgatatcgatataaatttatgtactcctcagccgacttcaaaagttcatcagtgtgcagagtgcgttttggtctcgctgcactcgattaggtatacaatttaaatacgattatagtccttagttttgtaataaacggtatcaaaagataggtacaattgagtcatgcctgctaccactaaattaatttcgaagcttctattccaacaaaaacgattagttgccaagctcggggctttgtgtctatcattatccgtctgattgatttgatgtgtacgattatttaaactaagggtctttaggctgatataccatacaaaagtgctgtgctctagaggcctttacagttggacacaat

SEQ ID NO: 13391 - DNA, 711 bp, DROSOPHILA
atgctcggcatcgcctatgcgggcgtgattggacccggaccatactatggcggtccagctggtcccggacctctgcaccactatggaggatatgcaccgcagcatgggcccctgccaggtccctatgtggcgcccaagccggctgctcccgaaccctacgatcccgacccgaagtactcctttggctacgacatccaggatggttatactggtgacctgaagtcacagcacgagacgcgccacggagatgtggtgaagggcagctactcggttgtggatccggatggaaccaaacgcaccgttgactacacagcggatccccatcacggattcaatgcggtggtccgcaaggagccgctggcctacaaggcaccagcccacctggcacccgtcgtcgcacctgcacccgctccagtaccagctcattacggcccagctccggcgcctccacttccgccggtgcccaaggctcctctgctttcgtatcctcttgccttaggaccttaccaccgtggtgctcccgctcctgcaccaggtcccgctcccgctcctgctccagctccggtgtctgtgccagtggctactccagtcctgccctccgcccacttccatgccgcctatcccgccctggcgcacagcccctatgcccactatccggctccaggtccggcccccgctccagtggaaccccatgcctactaccatcactga

SEQ ID NO: 13392 - protein, 236 aa, DROSOPHILA
MLGIAYAGVIGPGPYYGGPAGPGPLHHYGGYAPQHGPLPGPYVAPKPAAPEPYDPDPKYSFGYDIQDGYTGDLKSQHETRHGDVVKGSYSVVDPDGTKRTVDYTADPHHGFNAVVRKEPLAYKAPAHLAPVVAPAPAPVPAHYGPAPAPPLPPVPKAPLLSYPLALGPYHRGAPAPAPGPAPAPAPAPVSVPVATPVLPSAHFHAAYPALAHSPYAHYPAPGPAPAPVEPHAYYHH

SEQ ID NO: 13393 - DNA, 5302 bp, DROSOPHILA
tgaaacgcgccgtgcgaatgcgcgcctatgatttctttacccactctcactgctcccaagcggaggtggcctcttttctagctagatatagctataaatataggtaagatcacaagaatatcgaaaaaaagcataagataattcttatcacctctttcgccggatttttgaagtaggatcatcagagataactgctttatatgaaacaaagctagtaagacattaaaaggaaatcgctcctatgagagcgttgacaacgttaaacttaaagcaaatataaactatcacaattgaacaccctttaaattgttatatatgtaagtgattttttttggtttatttattttattttgttgtttatttggtataattactttataagtagaactgttcaaaaacaagccaagtgagctcctctgtttccccaagtactctcacgctctttttttgctctctccagttggtgatgaccgtggggcctggcgctctcttttgaagaagatttttgtaaacaaaaccgcgacacgcattgttgctgctaatgtgattgttgttgttctgataaacgctaatttgcctattgatattgatgttaatgtgcctttgctcacacagtcgcggccaaggagataacactgccccttaatacatagatcgtttcaatctaaaatggatgcaaatttaacatttgggcataggaaaacgtatgggtagacaacgaatatttttgttaaatgaattgatcactttcgataagtgtgtaaatcataaattcctgaacttaagctattgacgtagtgggtgtgtcatgtttgtactttggtaactgcttaacacacagatttatttgcatcataatcactgttgaaagatttctacaggttatatacacaaaaagaaaatctatcatttgaggtagagcactacgtagaagaatattatattttatacagatggcatcgttgtttgttaattcaaaacttttaatacttctaatatactaccataactccttgtacgtcctggcgagggttcggatgtccttctcttgagtattgtgttgaatacacagatagttcctatgattgctccagtccctgatgctgtgatggtacatcacttccacaatgagcagttcctcgtagagctcctcccagactatgcctattgtgctggcacacgtctccaagagccaacggaaggaacaggggaacaactgacgcagttcatgcttgtcatgcctccgaattcttttcatatagccgtgtagaagccagcaatcaaaatttgacacttgcaataacagcgtctcagggcttggcggctcatcattgatatcgctcgctacttggtctgatgctctatcagaaccttccggattcaaaattttttccagattgcgacggggcagatctagagggatgtttaatggatccatggtcccttcctcgaaggtttgcagtgagctaaggctgtcaagtggtatctcgttatcgttgagtttgagaagaaagctgggcgtttcggtaacatcccaaaacggattatttatctcaagttgcacacgccttgcgtcgcgcattgttatacgtttcaaatatcgggctccataggttccagtgggctgtgtgaaccgaaagtccggccgtttctccttacgctttagctcgcttatccacgtctcggttttaatttcagtgttggcgcggtattctcgaccgtcacctcggattattgttagtgggcggaatatgcccacgttttggatgtcctcctggcaggcaagctcctctactcgtagtttaaggccatgttgggacaaatactgcgacagctcggtcgtttccagcacaaagggatccaggttgcgggccgagtgatccactttcatgtggtcaggaattgtgattttcatttttgcaccatcagaccgcgatacttggagtaggattctgttgaagtaggagtgagccggagtcaagctgggctggaattcaatgtgttccttctccatactttctttgctggactcgccaaaatggtccttcagcatggtttcaataatgtgtgtcaggttttcatgctgacgcttcattgccgcagatccctgcatccagccaaaggtttcgccttgctccttctctttccactcctttgccagtatgtcgtccacctgacaaccagtccgggtggataccccgaagcgacgggcaaaactttggttgtaatgtgagacaatcactttcctcatctccacaaactccatccactcggtaaaaacaaaaagcaagggagcctcatctccgccgacttccagcagtttttcattgattttagcggccgattcagatatattccgctccttgagatcgtccaagccgaagagcaacttcatggcgtagaggatgtaggccatagtcctggcctcatagcgcggatacggatgtacggtcatggcgttaaaaaaagtgggcggatgcaggtcaagcaggctattcacgtacttcagtagccgaggtggcagtgccaactccagaatatatcgctccgctagggagtgcaggttcggtttttgatattcagacaagtttatgaatcgtgacatacacgcgatgtttacacgcagaagctgtggagaatataaagataattattagttgtgttcctttttattaatagatatttctatttttctatcgttagaaaatgatggattatagtcaccttgttggtaaccttgtctttcattttgctgagctccatatctttgagcagtgccttgcccttggccgccacatttccgggcagatagttaagcatgcaccgcttggtcaagtgctcctcatcaatgaagcgcagcaagtccgatagctgtatatcatcctccaccatattaagggctatgcccagcaccacatacaacttgataatattcaggcagtagatgttacgatcaaaattgtggagctgcttgaccctcggtctcaagctgtggcacgacatactacccttgctgtcgcggctatgcttgtccaggtgcttcagcggcatatggcgcttcaaggacttgcgtgcacgcattgaccattgcaggtggagactctgctccccttcggactctgaagctcctccgtgcgagcggtagccggaggcgtctagattgcgctgcaaaaggaatgggatcaaggtgttacagtcgcatctgagtaaacatcactaatgaataggctaactatgtcatttatatagcttgtggagctataaaagacgaacgtgttcaagtcagcagcaatttggtaaagtgtgtcgttgcaaatatgtccatgcgtctggttctaattggcgtggccatcctggcattggcctacggacaacctgttcccggagctccagaagtcactgaaagtaattagataaactaatcctaacgcttattgttcatccaacatattcgccacagattctaatccagtacaggagataaatacagcaaaacccatgtataatgactaccaacggacccttttcctgctgctgcccctgctgtttcctaaccaattctatataccgactaccagcggctaataaactaccttagttctgttccacaatctgaacttggcgcgctcgtcatttgggtcacccgttagagtgctcttcttgccctttataccgactaccagcggctaataaactaccttagttctgttccacaatctgaacttggcgcgctcgtcatttgggtcacccgttagagtgctcttcttgccctttttgcctttcttgaatgtcttatggttgtagatgatgcgggcatctctgaaagaattcggaatttaaaaataagaaattttaggagaatgcaagaacccacatgggcagcgcccgcacattcagtttaggcagtcccgtcttgttgctcttgctgaaggccacctccatgctgtccaagtaagccgcccacacttgcagggtcatcagtttgagctccggcttggcgcccatgttgagcagctcctggaggaagccgcgcagcacgtagttgtagaattcccacgaggtgatatcgtcctcatcctccttctccgtatccttcttctgtcggatcgtcctggctgtatatcggcctgctgccgtgtcatcaaagttatcctcggcggtaatgtccactgcacgaatctgatccttctgtgtgccacactctacgcagtagtagaatccctcgcgctcctggaaggtggtaccctcgcacacatcgcagtgcatgttctccagctgcatcgtctcgagaacttcctccatttttgggactttctcttgacggtatcagatttaaattatattattaatcaaactcgcggttgtacacaaatcgtgcatgtgatagtggtggggaatgatctatgtttacaacgatatcatccgttcttcgattgattcgatatatcgtccgtttcttctatgaaaacgtacatcactagattaaggcggcaaataaaagttggttcaaagtaacatatttttagtcatggtattttaataaaattttatttttatataaaatttagagagcggtttttttttgaaagtatatattaaaatctaataagcgtaaagggtattttttattgttttttatgccaacctgttagatgcacttgtacgttagccatcactgaactctaatctctcgtaacatttctgttatctttttggtgtgaccataagcagtaagaattgaattatccatgtcttgacgcttgatttttaaaaaagtcgattcgaaatatcgataggcaacgtaattttttagcgctaataagaggtgttaccagattcggaaaagcataagaacgcgtttttcgttttcgttgaatggccactctgtccttgtgtccatgtacttatgcatatgtatagagactcgattcaaaacaaaatcggctggcgaacgttaacgtcgttgtcggacgattcgactcgcgtctctctaagtttgttgttcgtgccaaccacccccgccggtacccaaacgcccccttttcgcgcgagtgtttttatggttttgctgaatgaaaaggctcgacgaatgcgcttattgagtgcccactgtgtcgggtatggcagtgagtcctacagaatgctctcgctgcacggacagttcatgagaatttgacatttaagtgcgagtttgttcctccttttgcggctaactgcagtttgtagtttgctgtagttttatgcacatttttttggcgtgggctgagattgggacacacccacccgaaaacaaaaacaaaaa

SEQ ID NO: 13394 - DNA, 2619 bp, DROSOPHILA
atggaggaagttctcgagacgatgcagctggagaacatgcactgcgatgtgtgcgagggtaccaccttccaggagcgcgagggattctactactgcgtagagtgtggcacacagaaggatcagattcgtgcagtggacattaccgccgaggataactttgatgacacggcagcaggccgatatacagccaggacgatccgacagaagaaggatacggagaaggaggatgaggacgatatcacctcgtgggaattctacaactacgtgctgcgcggcttcctccaggagctgctcaacatgggcgccaagccggagctcaaactgatgaccctgcaagtgtgggcggcttacttggacagcatggaggtggccttcagcaagagcaacaagacgggactgcctaaactgaatgtgcgggcgctgcccatagatgcccgcatcatctacaaccataagacattcaagaaaggcaaaaagggcaagaagagcactctaacgggtgacccaaatgacgagcgcgccaagttcagattgtggaacagaactaagcgcaatctagacgcctccggctaccgctcgcacggaggagcttcagagtccgaaggggagcagagtctccacctgcaatggtcaatgcgtgcacgcaagtccttgaagcgccatatgccgctgaagcacctggacaagcatagccgcgacagcaagggtagtatgtcgtgccacagcttgagaccgagggtcaagcagctccacaattttgatcgtaacatctactgcctgaatattatcaagttgtatgtggtgctgggcatagcccttaatatggtggaggatgatatacagctatcggacttgctgcgcttcattgatgaggagcacttgaccaagcggtgcatgcttaactatctgcccggaaatgtggcggccaagggcaaggcactgctcaaagatatggagctcagcaaaatgaaagacaaggttaccaacaagcttctgcgtgtaaacatcgcgtgtatgtcacgattcataaacttgtctgaatatcaaaaaccgaacctgcactccctagcggagcgatatattctggagttggcactgccacctcggctactgaagtacgtgaatagcctgcttgacctgcatccgcccactttttttaacgccatgaccgtacatccgtatccgcgctatgaggccaggactatggcctacatcctctacgccatgaagttgctcttcggcttggacgatctcaaggagcggaatatatctgaatcggccgctaaaatcaatgaaaaactgctggaagtcggcggagatgaggctcccttgctttttgtttttaccgagtggatggagtttgtggagatgaggaaagtgattgtctcacattacaaccaaagttttgcccgtcgcttcggggtatccacccggactggttgtcaggtggacgacatactggcaaaggagtggaaagagaaggagcaaggcgaaacctttggctggatgcagggatctgcggcaatgaagcgtcagcatgaaaacctgacacacattattgaaaccatgctgaaggaccattttggcgagtccagcaaagaaagtatggagaaggaacacattgaattccagcccagcttgactccggctcactcctacttcaacagaatcctactccaagtatcgcggtctgatggtgcaaaaatgaaaatcacaattcctgaccacatgaaagtggatcactcggcccgcaacctggatccctttgtgctggaaacgaccgagctgtcgcagtatttgtcccaacatggccttaaactacgagtagaggagcttgcctgccaggaggacatccaaaacgtgggcatattccgcccactaacaataatccgaggtgacggtcgagaataccgcgccaacactgaaattaaaaccgagacgtggataagcgagctaaagcgtaaggagaaacggccggactttcggttcacacagcccactggaacctatggagcccgatatttgaaacgtataacaatgcgcgacgcaaggcgtgtgcaacttgagataaataatccgttttgggatgttaccgaaacgcccagctttcttctcaaactcaacgataacgagataccacttgacagccttagctcactgcaaaccttcgaggaagggaccatggatccattaaacatccctctagatctgccccgtcgcaatctggaaaaaattttgaatccggaaggttctgatagagcatcagaccaagtagcgagcgatatcaatgatgagccgccaagccctgagacgctgttattgcaagtgtcaaattttgattgctggcttctacacggctatatgaaaagaattcggaggcatgacaagcatgaactgcgtcagttgttcccctgttccttccgttggctcttggagacgtgtgccagcacaataggcatagtctgggaggagctctacgaggaactgctcattgtggaagtgatgtaccatcacagcatcagggactggagcaatcataggaactatctgtgtattcaacacaatactcaagagaaggacatccgaaccctcgccaggacgtacaaggagttatggtag

SEQ ID NO: 13395 - protein, 872 aa, DROSOPHILA
MEEVLETMQLENMHCDVCEGTTFQEREGFYYCVECGTQKDQIRAVDITAEDNFDDTAAGRYTARTIRQKKDTEKEDEDDITSWEFYNYVLRGFLQELLNMGAKPELKLMTLQVWAAYLDSMEVAFSKSNKTGLPKLNVRALPIDARIIYNHKTFKKGKKGKKSTLTGDPNDERAKFRLWNRTKRNLDASGYRSHGGASESEGEQSLHLQWSMRARKSLKRHMPLKHLDKHSRDSKGSMSCHSLRPRVKQLHNFDRNIYCLNIIKLYVVLGIALNMVEDDIQLSDLLRFIDEEHLTKRCMLNYLPGNVAAKGKALLKDMELSKMKDKVTNKLLRVNIACMSRFINLSEYQKPNLHSLAERYILELALPPRLLKYVNSLLDLHPPTFFNAMTVHPYPRYEARTMAYILYAMKLLFGLDDLKERNISESAAKINEKLLEVGGDEAPLLFVFTEWMEFVEMRKVIVSHYNQSFARRFGVSTRTGCQVDDILAKEWKEKEQGETFGWMQGSAAMKRQHENLTHIIETMLKDHFGESSKESMEKEHIEFQPSLTPAHSYFNRILLQVSRSDGAKMKITIPDHMKVDHSARNLDPFVLETTELSQYLSQHGLKLRVEELACQEDIQNVGIFRPLTIIRGDGREYRANTEIKTETWISELKRKEKRPDFRFTQPTGTYGARYLKRITMRDARRVQLEINNPFWDVTETPSFLLKLNDNEIPLDSLSSLQTFEEGTMDPLNIPLDLPRRNLEKILNPEGSDRASDQVASDINDEPPSPETLLLQVSNFDCWLLHGYMKRIRRHDKHELRQLFPCSFRWLLETCASTIGIVWEELYEELLIVEVMYHHSIRDWSNHRNYLCIQHNTQEKDIRTLARTYKELW

SEQ ID NO: 13396 - DNA, 3113 bp, DROSOPHILA
gctgttctacaggctcgatctaagattttccacttgttatactacttgatattctaatcagtctgtagatttgttttgttgtttttgatagccttcgtagtatttgctcttgattagctgagaacggcggcagaaaatcgtcggctcgccttagtcgtgtttaaattggaagcgcatgcggttgtcggtgctctcggttcttgatcctccataatcggtggctccgcgtgccataaataccccaccactactattccactcaactgcacttactgcaacctgtgccttcaccaaatagtaggttttcaaacaaaccgtatacccagtgtttaatctaagctgccgaagagtatgcaatagtgttcagtgcctatcagtgattagggagccagtttaaaaataatacctaaaaatgcacgatcccagtgactacgactcggtttacagcgaggaagacttcgtcgacaccgtgcgaggagctgcaactcctccgctgatggactacgaagaatttcgggtgaagacaatgggtgagtctgcttaccattttggccatggccaaattctttctcgcttatcttgtatttgctgtaggcttatgaaagcgaaactttttcgttttgatacgagactcatgataaaatgccagccacagcggaaaattcgtttgcatatcgaaattaaaattaaatcggtggaaatttttactagataacagttagaaaatatctcaatatcaatattttgtaatcaaagacgttactgcaagcacctagttttgggagctacaccaagaaggttttatcaaaacactacttaaacattacttaaatattaaaaaaatatattttttctgtttgttatgtgtttagatataatcccattgaacttcttcatcaattttataatttagacttcgaaaaaaaaataaaagagatattttagcaatttaaagagcactaagttagtttattggcatcaataacttgttccgccactcctacttcttcccggcctgagccttctttttgttcggcttgggcaccagtttcaggcggatcatttcctcgaggagcgtggagcccaggtggcagggattggcggtcatacggactcccgctttctccagggcggccaccttgtccttggccgctcccttgccaccggaaatgatggcgccggcgtgacccattcgacgacccggtggagcagtctgtccagcaatgaagccaactactggcttggcctcgcagccagtgttcttctccttaaggaaatcggcagcctcttcctcggcggatccgccaatctctccaatcatgacaatgcccttgatctccttgtcggacagaaacactttgagggcgtctatgaagctagttccgttaaagggatccccgccgaggccaacgcaaagagcctgacccaatcccacgttggtggtctgatggacggactcgtaggtcagggttcccgaccgcgagactatgcccaccactcctcgcttgtggatatctcccggcattattccgattttgcactgatccggcgagatgattcccggacagttgggtcccagcaggcgggacttctcctggcaattcagcatttgcgatatccgcaccatatccgcctggggaataccctcggtgatggccacaatcaagccaatttcactctcgatagccgcgcaaataccctcggcggcggatggaggtggtataaagatcaccgtggcatctggcttcgccttctccacagcttctgccaccgatttgaatacgggcttgcccagatgctccgtacctccctttttgggattcacaccgccaactatattggttccgtactttatggactcctccgagtggaaagtggcctgcttgccggtgaatccctggactagaacctttgttgccttgttgatcttcaggttgcacaccgtcttgccatagtccgccttgccacgcctcaaaatttggggcgttaacgcccgcaggagcatcttgcttcctcgatttagtgacattttgtgggaattaagtcttggattgctggtggatttgtttttgggccaaaaaattaaacttttggggcctgatttagaatggagttcttaccaaaactgttgaccgaatgtcaggtttcaacagtcaaattatcagggaggtttggaaaaaggcctgctgtgttcttaacaaatccttttctggtaatttacgtacatgcatgtttaagtgcattttcttttatacaacattgaggtcctataactcctaaaccttgctttgtaacttcatgttattaaatttaaagagttattatctgttataatataaatttgatagtaacttgttaaagtaaaaatgaaaacaaattatctaccccactgtgcctgcgctcagcccttcaattaattccgattcgattttaattgaaatccaatagaaactcctcttttatctcgctctcactctctgagcgcgcgaaacagctgaactgaaacgcccgctttggccagttgggctgcaacccgttccaataagatcatcgttcaaagagagcgaacaagaatagctacgttacgatcgcgtttcagatcgctttctgacttcgaagcgtaaagacttaaaacgcgtcggataaacaccatgatgttactggtttttttctgcgcgccgtcgttgtgagccgagaagaaaaagtaacaaaagaagcagcgcaggaaaatcaaaattggctgcaagtgcgtgtcccgaaagtttaataaccaagaaaagtttgtaaattgaaaaaggcacttaaagtggttacctaaaatgaaaagataatgggaaagagcaaaaaaaaaagctgacgcaagttcaaggtgtagaatttgtgcgcgtgtgtgagtgtgccacaagttgtttgagcaaaagtggagaaataatataaattccgaaggaatttcaacagcaagtgcttgaaatcgcaattggtgtgccaaacttaaggttttgccttgtctttaatcgagtttttagaggttttaactctttttttccaacaaacacacacattcacgcattcttgattctttgactcacaaattacccacgatagcaacaaca

SEQ ID NO: 13397 - DNA, 1113 bp, DROSOPHILA
ctccattctaaatcaggccccaaaagtttaattttttggcccaaaaacaaatccaccagcaatccaagacttaattcccacaaaatgtcactaaatcgaggaagcaagatgctcctgcgggcgttaacgccccaaattttgaggcgtggcaaggcggactatggcaagacggtgtgcaacctgaagatcaacaaggcaacaaaggttctagtccagggattcaccggcaagcaggccactttccactcggaggagtccataaagtacggaaccaatatagttggcggtgtgaatcccaaaaagggaggtacggagcatctgggcaagcccgtattcaaatcggtggcagaagctgtggagaaggcgaagccagatgccacggtgatctttataccacctccatccgccgccgagggtatttgcgcggctatcgagagtgaaattggcttgattgtggccatcaccgagggtattccccaggcggatatggtgcggatatcgcaaatgctgaattgccaggagaagtcccgcctgctgggacccaactgtccgggaatcatctcgccggatcagtgcaaaatcggaataatgccgggagatatccacaagcgaggagtggtgggcatagtctcgcggtcgggaaccctgacctacgagtccgtccatcagaccaccaacgtgggattgggtcaggctctttgcgttggcctcggcggggatccctttaacggaactagcttcatagacgccctcaaagtgtttctgtccgacaaggagatcaagggcattgtcatgattggagagattggcggatccgccgaggaagaggctgccgatttccttaaggagaagaacactggctgcgaggccaagccagtagttggcttcattgctggacagactgctccaccgggtcgtcgaatgggtcacgccggcgccatcatttccggtggcaagggagcggccaaggacaaggtggccgccctggagaaagcgggagtccgtatgaccgccaatccctgccacctgggctccacgctcctcgaggaaatgatccgcctgaaactggtgcccaagccgaacaaaaagaaggctcaggccgggaagaagtag

SEQ ID NO: 13398 - protein, 342 aa, DROSOPHILA
MSLNRGSKMLLRALTPQILRRGKADYGKTVCNLKINKATKVLVQGFTGKQATFHSEESIKYGTNIVGGVNPKKGGTEHLGKPVFKSVAEAVEKAKPDATVIFIPPPSAAEGICAAIESEIGLIVAITEGIPQADMVRISQMLNCQEKSRLLGPNCPGIISPDQCKIGIMPGDIHKRGVVGIVSRSGTLTYESVHQTTNVGLGQALCVGLGGDPFNGTSFIDALKVFLSDKEIKGIVMIGEIGGSAEEEAADFLKEKNTGCEAKPVVGFIAGQTAPPGRRMGHAGAIISGGKGAAKDKVAALEKAGVRMTANPCHLGSTLLEEMIRLKLVPKPNKKKAQAGKK

SEQ ID NO: 13399 - DNA, 2901 bp, DROSOPHILA
gatcattgatcttgtcattgacgtcgtagaaaatggactgggatagcagatcctctggagaagctgcgccaccttcctgcccagcgaccttcaagggaaacacatagcgatgcacactgctgaccgtgaccaccagcagggtgacggatgtaccttgctccgtgagtgatacattcagcacagcggagtcggtgaatcgcagacgcaggtgattcctctgcagggagatgtccaaactaacctctgatagttccaggacatcctggtatgtccgcctgcaaatcagtggccatgtgaaactaatttaacgattctgatttgcacttaccaatatatgaaacggtttctggtctgaacatttttcgtattcttgtagcaatagccgccggaggtttcgaaggtttttaaatcctgcaaagtgctctgggttcctacattttgcggaggagcatttggttactcagaatttctctggcaatcttgcacgaaactcacccgtgttaattttcacctcgatccactccgccggactgaggttccgcggtatgacctcgcggtagctcatgttggcttgcagtttggatgtgggcatcttgctagcacaacaaattaatataaaaacctcaacgaaaacggaaaattattggcggcaccggcgtaaacacgctcagtagtagtgttggaaaacgcttacgccagcggtgcacaccaggcaaaatagtcgacatagctttttatactcacatacaaaagttaattacagaagttagttaaaaattgtacattttcctaaatgtaatttcatgacaataaagtttattatagcaaagcaggaatgatataagatgcctttaaatcttgtgatattaagaaagttgtcgctagcattttaacaattgccacatattggtcacactgcattgcacgtgtgtttccatttgttgatgcggctttattatttagtttattttttaaaataaaaactgtctctggcctaaaaatgagtgaacagcaggatgagactgtagtctgcctgcccggggagcgactctgcagaaccgaggacagcatagtcctgggcataggcacctacgagcagaatggctacatttacgcctccaagtctggaattgtcaacatcgaagattcgggtgataaagtaagtaatcctggcatttcgttgactctgggaaccaattaatctccatttcagtgccaggtggttagtgtgcataagcccggatttcatctaaccatcccagccaccggagacgtggtcacagccagagttctcgtcacaactccaaaattcgccaagtgcgccattttctgcgtacgaaatgtgctgctggaaagcagctaccgcggacttctgcgcaaggaggatgtccgggagaccgaaaaagatcgcgtcgatatctacaagtccttccggccgggcgatgtcatcctggcgagggtcattaaccaactggagcagtccttcctcctgaccaccgccgaaaatgaactcggcgtggtcatcgcctatgccagtgattaccggaagacccgggtgcccatggtgccggtcggctggagcgagatgcagtgcccccagaccacgatcaaggagccacggaaagtggctaaagttctgcctgagagttcaataaatgctgtgaaataaggtcaatcgcatgttaatcagaagcttaaattcatttgtggaactaaaaatgttttagtaagtgattattagccaaataattatatgtcttggcaaccagaggacgctgaatatggatacaggtttatgttagcattttatttccatagcaacgttgataagtagctatttgacagtttacattatttcaaatcattaaataaatctataattaagttgtaaaagttcaaaacaagctggtttccatagtttagcttttatgattgatacgtatcttatatttgttatttattcatgattggtttgttataatgattcaacaagagattagaatttaatattggatcgtcatgcaattgctgtttttaaaagtatctctatagattcgaaagtcatgggaatagattaaagaaattgtgcggtaatttgttctagcaacttaacaaaacatattttatgtttaaaataattcataaacacaaggtaatctaaatatatgcaggcacatgcactttataggttggcaacataaaaacttttagggtaaacgacaggtacttattccaagtaatccgaatttcaataacatgcaattgcacgtgttcccaaaaaaaaaaatatataatcataaaggcaaatagatggttgtaaaggctcaggcgtcagaggcgtaaaaacccgtagcccgttgccaatcaatgtcgctgggagctgttgttgatggatgactattcctatgcaaatagcaaatggaagttcgtttcgcgtgcaggagccgcgactaattcaatcagaggagcgggagcaggcagcctggagcaatgagctgctccgggactaggccaccgtgtcttgtcttgccgaagaaatgcaaatgcataggaaaagttacaggtggatcggtgggcagggagcttagcgagtcctgggggatccaaacaaccaatcattgtttggtcgatgggaaacgcagtcggtttgtttcggtggttcgaagcccggttaatattcaaattaaatcgagggggaatacgaccaatatgcgctgcaagtgaacagccgacgggtagttggccctgtcgtagttgtcgtcgtagagtccccagttccggccagctcaaaaacataagttccttcctattgtcagtcgcagaccagcagcagaagaaccacggccatagcagcgcaaacgaacagggaagccaagcaactcatcatggtacagatttcgc

SEQ ID NO: 13400 - DNA, 847 bp, DROSOPHILA
atgagtgaacagcaggatgagactgtagtctgcctgcccggggagcgactctgcagaaccgaggacagcatagtcctgggcataggcacctacgagcagaatggctacatttacgcctccaagtctggaattgtcaacatcgaagattcgggtgataaatgccaggtggttagtgtgcataagcccggatttcatctaaccatcccagccaccggagacgtggtcacagccagagttctcgtcacaactccaaaattcgccaagtgcgccattttctgcgtacgaaatgtgctgctggaaagcagctaccgcggacttctgcgcaaggaggatgtccgggagaccgaaaaagatcgcgtcgatatctacaagtccttccggccgggcgatgtcatcctggcgagggtcattaaccaactggagcagtccttcctcctgaccaccgccgaaaatgaactcggcgtggtcatcgcctatgccagtgattaccggaagacccgggtgcccatggtgccggtcggctggagcgagatgcagtgcccccagaccacgatcaaggagccacggaaagtggctaaagttctgcctgagagttcaataaatgctgtgaaataaggtcaatcgcatgttaatcagaagcttaaattcatttgtggaactaaaaatgttttagtaagtgattattagccaaataattatatgtcttggcaaccagaggacgctgaatatggatacaggtttatgttagcattttatttccatagcaacgttgataagtagctatttgacagtttacattatttcaaatcattaaataaatctataattaagttgtaaaagttcaaaa

SEQ ID NO: 13401 - protein, 204 aa, DROSOPHILA
MSEQQDETVVCLPGERLCRTEDSIVLGIGTYEQNGYIYASKSGIVNIEDSGDKCQVVSVHKPGFHLTIPATGDVVTARVLVTTPKFAKCAIFCVRNVLLESSYRGLLRKEDVRETEKDRVDIYKSFRPGDVILARVINQLEQSFLLTTAENELGVVIAYASDYRKTRVPMVPVGWSEMQCPQTTIKEPRKVAKVLPESSINAVK

SEQ ID NO: 13402 - DNA, 4165 bp, DROSOPHILA
gagcacaatttgctgctcagggcaagcagtgtcgtccgggcgaggagcccgatccgctcaataagtacccgcgcgacaacctcgcctgtggagcgggcagtgagaaatcacgttccgtggccataatcaccgctgtactgctgcttttcggcctgcgatggggattcagttaggctgatcaggttgcagggtgcagatttacttgctctttatgtatgtagtgcaatttgtacattttagctgtatgatataagctcaatttgtctaaaagtaggtccatgtagtgtagtactcccaaatctgagttggtcggttttctaggcaaagaagctgggaatttaatctttggacaattcgtatccacttcgcacaaactttgccatttaatagtctttggttatttcgtaaaagaaaagtgttttaaacaatgctcaaatatgcaactatggaatcatacttaaattaaataatattgtccttagattaacccaatccttttatatttcttcgcaaccgtacgaattgacaactcctaccaaacatatagttataaaatcgtaattgtattttgtccatcccgaaatgtgatcttttttaagtgtgtcctcggatatttaccgcatttgaaaatgttggccacatataaagccaatcattttcgggtggatcatccaaaggcagttctatgcttcttgaatatcgatctgtacattccaaagcctattgcgaaaaatatttcatttatggtacggtggcactggcagttccactagcttgttgttaaattctttgttatttattatgaatatggttttcgaaatttgttgattgccttgtgatttatgtattctattaattttgcctaagctaaatgcgttttttccatttctgctgcctatgaagcatttaagaattgtaaactcaactctcgatttgtaatctagattttaagaacctaaaccagcaatgtgaataaaccaagagacccttgtaatcgcaagttttttgtgagtatcttattaatgtttatttaaatacttaggagtaatcaagctcctcgaccagctcgtagaggatggcaccatcggtgtccttcgttggagattcattgccattatcttgatctttgggcgcagcttttggcctactaccctttactttgcaaggacctgcgggtgtttttaaaagcttggacctggttaaaaatagaagggaatagttaataaactactggattacactctaatgttgtaacatacgcaattgtcagttcgtccagcattggaagaagtgtggatcgtgtcactccgcgagcttcctcttcggccagttccttggggtgtgcctgccgtttgtgcgatcgacagttggagccattggcgaagtctcttccgcaaaaattgcacttatatggccggatgccggtgtgaaggatgagatgtgccttcagtgtcttacttcgcttgaacgccgatccgcagacttcacacttaaattgccgtgtatctgaatgcaccaatttgtgtttgttgaatgtgcgtcgggtttttaacttcaagccacatacagtgcactcgtagatttcggcactgtgtgtatctaaatggatctggcaaaagattaggtaactagttaatcgtactgtagtggataagagtacatgacaacctacctttaacctcgcattgtttttaaagcctcgcttgcacacgggacactcgaaggggcactcatctgtgtgcacaagtttgtgatccttcagtccagtaatgtaattgaagcttttgccacagaggtcgcacacatagggctttatttggttgtggatgccttctatgtgtcgcttcagtgttcccgaggtggtgaagcgcttttcgcagtgtggacagcagttatctgtctttggtttggcacgtacatgggttcggtggtgggcatgcagttgggcgactgttggaaaacatagtttgcactgattgcactccaactgtggcagatcatcggccacagtgttgtgaacctcctccatgtgacgcttgtaggctttgggtttcttatacggctttttgcaaatattgcacttatacatggctggtacctctgatatttcatcctcctcatcggttacatgctctcgggagatatcttcctgggtatcctcgtttgattctatagattccacggtgtcttttgtttctacgggttctttttgcggattgtgttgtactatttcatatgtttccatgttgaaatctgaaacttggctttcttctataatctgcgactcctcgatatagcgatcctctgtcatgtgctccacttcctccactaagcaatctgtagcgtcttgggtttccaactcttcctccacagcttcaacctcttctcccacagtgtcaatctcttcctccacagtttcaacctcttcctcggcaagatcttcttccacatcttcttctaggatttcctcttccaccccagaaatttgcatttcttcttcaataacatcttcctctttaggaaagtcttgtttttcctgaagacattgtttttccaccaaaaaatttggtatcattaggatttcacttttcattttactggatgtttctgtttggcagactattggttgttcctcgctgatgaatacttcgtcattctggggaagactttcgtctacggctccgagcattatatgcttccatccatcggttgccacaccgcagtcctctcgaattttctcataatccatcaaattattagactgtaacaactgcaatttgctgaaaaggatctgcactttgcgaaccctctccgaaaactcgatgaggcagtccatcaatgtgaagcattcggagcacagaaaattgctcagctcgtcctcccttttgatctgaaaggcatgatcttagttttctatttggaatatgtaaatttatagcagttacatcgacccaaaagtacttgccaatggtcatggccattgtgctcgcccaggagttttgtttcgcctccctgaagaatacattttgatttgtcggatgctccttggagcacaggcgacaccattggtgccaaattgttgaatctctgttcgcggcttgtgtttctgcgagaatatccgacatattcagaaaacatcgaaaatatactttcgttttgttttgattaacagccctgccttgcaaaaataccagggctgccagctacacaagaaaacagagctgcggactgttccattggtttacagttcacgacttagaggttccggaactacagagcaattattaaaactaacggttaagggcaagaaaacggtatgctttttttatttggcatttcatttttatttaagtcttttcgtatgtttttagcatccgtttaacatatcaaactctactctagctaaaagtacgaatatttttgagattccgtttcaagaatcacagatctatttgtatgttatattatgtatgctcaaaaattttgatttcatttctttgaaaacgtgtaccaattttacagccaagcaaaaactgcccttttaaaagattaaaaacaattcgtcatcaatttacaaaataacttatatttgtaaaattcaaaaactttctacttagatattagtatttgtgttattaactgcgttaattaggtccatcatcactcgagctcgttttagacattatgagcattcttaaactgtccgttaatttgcgtatgtccagtatatgtcagcggcatatacgtctagaatatagtataggtaatttagcttatcagcttagggaactaaataatgcactagacttaaactaggtaagtgtacgaaacaaaatactaggtgtccttcaactgccgttgatggcgtcctccgatttcatcgtcgaattggagaactgatctccgccggccagaagatcggcactggatgcaactggttgcagctgtgcctgttgcactgccacgttcactgggaccattggcaccatcggcacagccgtggcttccattcccggagcggtgctaatagttctggccagattcttttgctgtcgcatcagtttctccttctcgcgttccgccttcagcttatcgaagtcatcgccctcgtcttcgggctgcactgccgcatcgccgagtagatccgtggaggacctcaggtcca

SEQ ID NO: 13403 - DNA, 1983 bp, DROSOPHILA
tcaaaacaaaacgaaagtatattttcgatgttttctgaatatgtcggatattctcgcagaaacacaagccgcgaacagagattcaacaatttggcaccaatggtgtcgcctgtgctccaaggagcatccgacaaatcaaaatgtattcttcagggaggcgaaacaaaactcctgggcgagcacaatggccatgaccattggcaagtacttttgggtcgatatcaaaagggaggacgagctgagcaattttctgtgctccgaatgcttcacattgatggactgcctcatcgagttttcggagagggttcgcaaagtgcagatccttttcagcaaattgcagttgttacagtctaataatttgatggattatgagaaaattcgagaggactgcggtgtggcaaccgatggatggaagcatataatgctcggagccgtagacgaaagtcttccccagaatgacgaagtattcatcagcgaggaacaaccaatagtctgccaaacagaaacatccagtaaaatgaaaagtgaaatcctaatgataccaaattttttggtggaaaaacaatgtcttcaggaaaaacaagactttcctaaagaggaagatgttattgaagaagaaatgcaaatttctggggtggaagaggaaatcctagaagaagatgtggaagaagatcttgccgaggaagaggttgaaactgtggaggaagagattgacactgtgggagaagaggttgaagctgtggaggaagagttggaaacccaagacgctacagattgcttagtggaggaagtggagcacatgacagaggatcgctatatcgaggagtcgcagattatagaagaaagccaagtttcagatttcaacatggaaacatatgaaatagtacaacacaatccgcaaaaagaacccgtagaaacaaaagacaccgtggaatctatagaatcaaacgaggatacccaggaagatatctcccgagagcatgtaaccgatgaggaggatgaaatatcagaggtaccagccatgtataagtgcaatatttgcaaaaagccgtataagaaacccaaagcctacaagcgtcacatggaggaggttcacaacactgtggccgatgatctgccacagttggagtgcaatcagtgcaaactatgttttccaacagtcgcccaactgcatgcccaccaccgaacccatgtacgtgccaaaccaaagacagataactgctgtccacactgcgaaaagcgcttcaccacctcgggaacactgaagcgacacatagaaggcatccacaaccaaataaagccctatgtgtgcgacctctgtggcaaaagcttcaattacattactggactgaaggatcacaaacttgtgcacacagatgagtgccccttcgagtgtcccgtgtgcaagcgaggctttaaaaacaatgcgaggttaaagatccatttagatacacacagtgccgaaatctacgagtgcactgtatgtggcttgaagttaaaaacccgacgcacattcaacaaacacaaattggtgcattcagatacacggcaatttaagtgtgaagtctgcggatcggcgttcaagcgaagtaagacactgaaggcacatctcatccttcacaccggcatccggccatataagtgcaatttttgcggaagagacttcgccaatggctccaactgtcgatcgcacaaacggcaggcacaccccaaggaactggccgaagaggaagctcgcggagtgacacgatccacacttcttccaatgctggacgaactgacaattgcgtccaagcttttaaaaacacccgcaggtccttgcaaagtaaagggtagtaggccaaaagctgcgcccaaagatcaagataatggcaatgaatctccaacgaaggacaccgatggtgccatcctctacgagctggtcgaggagcttgattactcctaagtatttaaataaacattaataagatactcacaaaaaac

SEQ ID NO: 13404 - protein, 556 aa, DROSOPHILA
MDCLIEFSERVRKVQILFSKLQLLQSNNLMDYEKIREDCGVATDGWKHIMLGAVDESLPQNDEVFISEEQPIVCQTETSSKMKSEILMIPNFLVEKQCLQEKQDFPKEEDVIEEEMQISGVEEEILEEDVEEDLAEEEVETVEEEIDTVGEEVEAVEEELETQDATDCLVEEVEHMTEDRYIEESQIIEESQVSDFNMETYEIVQHNPQKEPVETKDTVESIESNEDTQEDISREHVTDEEDEISEVPAMYKCNICKKPYKKPKAYKRHMEEVHNTVADDLPQLECNQCKLCFPTVAQLHAHHRTHVRAKPKTDNCCPHCEKRFTTSGTLKRHIEGIHNQIKPYVCDLCGKSFNYITGLKDHKLVHTDECPFECPVCKRGFKNNARLKIHLDTHSAEIYECTVCGLKLKTRRTFNKHKLVHSDTRQFKCEVCGSAFKRSKTLKAHLILHTGIRPYKCNFCGRDFANGSNCRSHKRQAHPKELAEEEARGVTRSTLLPMLDELTIASKLLKTPAGPCKVKGSRPKAAPKDQDNGNESPTKDTDGAILYELVEELDYS

SEQ ID NO: 13405 - DNA, 3370 bp, DROSOPHILA
aggcataagagctttgaatcgccaggagctggagctgtacatgcagatgccaagggacatgatgaaggtggcaccagctctgatcggctgctccctgcccatggtgggctatgcgttctttcccctcgtgtaagatatgccctactaaacactcttgcaaaatttggtataccgatttgttctttcgcagcttttattacccccgctcctttctcactgcccatttctggactccgcagcagcgctccgagttccagagctactacatgaagcggcgattatgcaataacaaggacgtctttcgctgcctgcaggacaagctcaaagcgacggcatcgcatcccaagcactcggcttttgctgacatcctgggccagctgggcagcggcacacaccccacgcctgagatgctcatcgatgtcaaagacatattcgccgaaggaccatattccctgctgggaatgtcgcggaagcacgttgtacgtttaatctgacacattttatgcagcctaaagcatatcactaatgcatacgttccagagaaacctagtcaaccttcatggactgcccagtagcatcttcaagcgacatcggctccacgagcacgccttcctggtgcactacatggaccaggccataacccgcgagggtggcgttcacaacctgacaccggatgctttgcgctactcctgctatctgcgcggattgaatcccgacagcctgagcagcgaggccatgatcgagtggctgcggaagtgggtcaaggtgtccacgtcgatacaaggcgaacatatcacgctgttcctgcacttgcccatcctgctgggctacaaccatcccaacaactggaagaccatctacggcaagtgccccacttgagcggggtcctctggtcgttagctatttggtagactgtgctttaaagattggactgttaagatcattttgtttcttgagagcaaataaaaccgttaaaccaaaagaaagctggcagtgtgcttgtgtttttcctaaaaataacactttcttttattttctccatggtggtggatgttcatcaagcagttactttcgttaaaggtagtattttttacttcttggccgcggccttcttgccacccttggccttctcggcacgcagacgctcgcgacgatccttcttgaggacgcggggagtgccgtcagccttggtgcgcttcttcagtgtgttgaaggcgatggtcagcagcttgttgcgctgacgcttggcataacgcagcttgaagcggtcaaagtcgttcaacgaggagcgctgcaaaagaagacaaattctcattagtacttgatttattctgaatgtttatgaagacgcctagctatgattgtaatcagataaactagaattagcttcatatatgtgtcagccggcaattcctatcaagaactttcaattatcatcatgtgcagttcaaggaggtaatcaactaggcagagaagaggtataacattttcccctctacataggtaaactttcctacagctacgaatcctcctcgtgctcagtgtacataccttgcagatgttctgtgccttgacggaccaggggctgaccttccactgggccttcaggtcgctctctgtccaggccttgcgcacgatgcgcgtgggcgcggtgtaggggaacttgatgcggtacttggtcagatgcagattgttcaatctgtattcctgacggggcacgccagtcagaggaccatctaccagaacctgaaaagtgaaaagccattaattagtttggatcactttaaccatgtatggccatgaagggaggagtacagcaacaaatgctggttttgcttgcttgctttcagagggttaaactagcttcatttatgtgtcagttggcacttcctatcaagaagacaaattatcatcatgtgcaagagctcgtcacttggcaatttgttgctgttactccactatggaatgatgcacttactctgttttggtcaatgacgtcgacaatggccaccaggcgccccttcaggggaccggcggaggccttggcaatgcgaccagtttgtacgaatctctcgaaaggctgcaaacagagagaagtccattaaaaatgggtgaaaatgttggatttcggttgttgcatggccagcgcgttgcttgtgttggtgaccaccacgtgaactatttgaatgttggatatcccatggttttccaacgcttttacgctgctttcgctattcacacgttcaacgcactgacccgttcgcttggccgccaaatttaattcatctcgggccatttagaccgctgaattttcacatttttcaaccgatccgcagaaaccttcgtcgattcttaccatgacgctaaccggaaagaaagagaaggaaagaacttttttgacagctcggtggtagcatggcgttagtgttgctaaacacagagttgcatgtggtctagtgttgtgcagaaatagttaatgtgacagtaaatcatacacatcttatgtggtatttttcgctatcaactgttacagtcacactaagccaattcgatagatttcgatagtaaaaataaacattttggaataacataattacttttgtagaagttactttttacggggttaatttcaagcagacattttcccaacatggtttacatacacttccccaacaatttaaccgaagaggagcaaatgctgcaggccaagtatcagaaactcaagaaaaaggtgggaaaactcatgccacaaatgtgattatttatattaacaagtttttaacccgtagaaaaaggcactgcaagcgcacaaggcgcccaagccggagccggagagctccttgaccttgaagcgtcccacggatgcgcgagatgcccgtgaagtggccaggaaactaatcaaaagcggcgccattcccgccatccagaagcagaccaagcaagatcaaacctccttcaagcggcccaaaggacaggaaagagccaagcgctccacctcggaaaccactgttgcctcctaccagcccttttcgtctacgcagaacgacgtggcccaggagacgatcattagtgagatcattaaggaggagccgcgtcgacagaatctctaccaacacttcgccaccgagcgggatcgagaggagcgcggcatgcccgagaaggtgcccatggacacagcgcagccagagaagccacgggccggcaataccatcttcgtgtccggcaacaaggtcaccgaggatttcttaaaaaagacattcaacgactacggcaccattgtcaatgtctccatggagatcgaaaagaggtaagtgaacatggaaagtccatgttatagcttacatatatattttcccaactggagaaatta

SEQ ID NO: 13406 - DNA, 602 bp, DROSOPHILA
cggttagcgtcatgcctttcgagagattcgtacaaactggtcgcattgccaaggcctccgccggtcccctgaaggggcgcctggtggccattgtcgacgtcattgaccaaaacagagttctggtagatggtcctctgactggcgtgccccgtcaggaatacagattgaacaatctgcatctgaccaagtaccgcatcaagttcccctacaccgcgcccacgcgcatcgtgcgcaaggcctggacagagagcgacctgaaggcccagtggaaggtcagcccctggtccgtcaaggcacagaacatctgcaagcgctcctcgttgaacgactttgaccgcttcaagctgcgttatgccaagcgtcagcgcaacaagctgctgaccatcgccttcaacacactgaagaagcgcaccaaggctgacggcactccccgcgtcctcaagaaggatcgtcgcgagcgtctgcgtgccgagaaggccaagggtggcaagaaggccgcggccaagaagtaaaaaatactacctttaacgaaagtaactgcttgatgaacatccaccaccatggagaaaataaaagaaagtgttatttttaggaaaaacaca

SEQ ID NO: 13407 - protein, 166 aa, DROSOPHILA
MPFERFVQTGRIAKASAGPLKGRLVAIVDVIDQNRVLVDGPLTGVPRQEYRLNNLHLTKYRIKFPYTAPTRIVRKAWTESDLKAQWKVSPWSVKAQNICKRSSLNDFDRFKLRYAKRQRNKLLTIAFNTLKKRTKADGTPRVLKKDRRERLRAEKAKGGKKAAAKK

SEQ ID NO: 13408 - DNA, 4984 bp, DROSOPHILA
tattggcattcttgtgtttaaggccagatctcctggtaagtttcagtttcgcgttataaatcagtttcccgatccgcatcccaaaagttaaaagaaaacccaacataatccattaactgaaggcaaaaggcaaacgaaagtacctaaaccttcacaccaccagttgtactaaaacattaatttacgcagaatacttgatcgatctataacccaattactccgcttcctcctcgcacacatgattaaacacacctaaaccacaccactttgttgctggccttagacaacaagaatgggctctactgatcaactatttaatagcttctttaatttgtaacttccagcttttactcgtatattcgttcgttagtagaaaatagctcgacttgacaatgaatcaaaatgctttctcccttacaggacgatattccagaatcggatccggatagctgtccacacgagggtgaggtgcgcgaggatgaggacgaaacggaggaagagtcggaagactctgatgagtctgaaggcgaagaggaagaggaggatgaagaggagataggtaagtttaataagctcataaacttgcttcacgttatactaatatctatatctatcctatcccttcaccagatgtgctacaggacaacgacgcggacgacgaggagatcgacgatgaggacgaggaagaggacgcgcccgaggtgagttcctttctcctggatgccaacaacaagcgttccagcaatatctccgctctgctcgaggccgcggccaatgagaaggctcctgtcctgcgccacgccactcacgccatcgacgagaccaagcaggcgctgacaaagatgcgctgcgccagcagtccccgcgataagaagtgagtgttgtcgttctgtaccagggaatgcagtgtatatttactcgcaatctatttacctattgttgtagcagtggattctccagatccctagtggctgcctgcacggataatgatgtcaatacggtgaagcggctgctttgcaagggcaacgtgaacctgaacgacgccgccgcctccacggatgatggcgagtccctgctctcaatggcctgctctgcgggctactacgaattggctcaggtatgtagtgttataatcactccaaaacgttttggaatttgactaatttcggtaactcggtaattctgctggaaactagaaaaatatttataaagtaaatgcacctttattatattgcgtgtcaactacgttcgtcgacgtggcatcgccactgacgtttgcccactcagatggtttatcgataaatagccctgaattagtgtgcaactaattaaacaatgccgacagagttgaaaaagacaaaacaagaaataaaaataacttcgggcaattcaagaccacatctaatctaatcttcgactgtcataggttctcctggccatgtctgccgcccaggtggaggacaaagggcaaaaggactcaacgcctttaatggaagctgcatccgccggtcatttggacatcgtcaaactgctgctcaaccacaacgccgatgtgaacgcccactgtgccacgggcaacaccccgctcatgtttgcttgcgccggtggtcaggtggacgtggtgaaggtgctgctcaagcacggcgccaacgtcgaggagcagaacgagaacggacacactcccttgatggaagcagcttccgccggccacgtggaggtagccaaggtaagtgataccagtacatgccttgcatcaatactgtgtaaaatgcaagtgattataatccgagatttgagagtgttggcacacctgcgacctgaatcgcgttactgattggcgtaggcaagatgccaagctctgtgatttactttgatcttatctgatgcattcggcagtaatgtaatggttttgaactttgtaattgcttagctaattgcatatcggttattcttgtacccatttaggtgctgcttgaacatggagccggcatcaacacccactcaaatgagttcaaggagagcgccctcactctagcctgctacaagggtcacctggatatggtgcgattcctgcttcaggcaggtgcagatcaggagcacaaaaccgacgaaatgcacactgccctaatggaggcttcaatggacggccatgtagaggttgctcgactgctgctggactccggtgcccaggtgaacatgcccacggactctttcgagtccccgctaacgttggcggcttgcggtggtcatgtggagttggcaacactcttgatcgagaggggagccaacatcgaggaggtgaacgacgagggctacaccccgctcatggaggccgctcgcgagggacacgaggagatggtagccctcttgctcagcaagggtgcaaacatcaatgccacgaccgaggagacccaggagacagctttgacgctggcctgctgcggtggcttcatggaggtggctgcattcctgatcaaggagggagctaatcttgagctgggtgcttccacgcccctaatggaagcctctcaggagggacacaccgatttggtaagcttcctgctgaagaagaaggcaaatgttcatgcagagacccagacgggggatactgccttgacgcatgcctgtgagaacggacacacagatgcggccggtgtgctgctatcgtatggagctgaactagagcacgagtccgagggtgggcgaacgccactaatgaaagcctgtcgtgccggacacctgtgcactgtcaagttcctcattcaaaagggcgctaatgtcaacaaacagaccaccagtaatgaccacactgccttgtcgttagcctgtgccggcggtcatcagtctgtggtggagctgctattaaaaaacaacgccgacccgttccacaagctgaaggacaacagcaccatgttaattgaagcctccaagggtggacacactcgtgtggtcgaactgcttttccgctatccgaacatttcgcctacggaaaacgcagcgtctgcgaatgttacccaggcagcaccaaccagcaaccaacctggtccaaatcagatgcgtcaaaagatcatgaagcagcagcttcagcatcagttgcagcagctgaacgctccccctggcttgcatgagttgtctgaggcggcacgtgcatccaatcaacaacatttccaccagcaacagttcagcagtgccggcaacggatcctccaacatcgtggcaatgggaactggcgactttttggatgccggagaactccaacttactgctactgcgggaatgagtgcgggagccggaaccagtaccacgggcagtgagactggtatggaggagtatggcgaagtcggaggaattgacctgactactcttggcgctcagcagcaagagggtcttattgcaaagtcgagattgttccatttgcagcagcagcagcaacaacagcagcagcagcaacaacagcagcagcagcagcaacaacaacaacagcagcagcaacaacaacaacagcagccacctgcagctggccagcaccagttagtgccatgtaagcacttcgacctggacatggagcacatcaattctctgcagccgccgcaaaaggcaccgcccgctccacctgtactcttccacaccgtttgccagcagcctgtaatgcaacagcagcagcagcagcttcagccaggtcagctcaagttgaaggccatgctacccaaccgcaatcgcgcgttgaaaaccgccgaggtagtggagtttattgactgcccggtggatcaacaacagcctggcgagcaggtgcgcacgcagcctttgggtgaggatggaaagactcctcagtttgcatgcgctggagaggatccacggttgcagcgccgtcgcggctttatgccggagctgaagaagggtgaactgccgccggagagcagcagcagtgacccaaacgagctagcccttaaaggtgagctaaaacagcctaatgtttccttttaaaggttcttattctttgtataattctttacaatcaggagccgacaacaatcagcccgtaccgacagcactggacaatagcgcatgcgcccagattccagcggtaagtcccacatgtcctacttacacaataatttctataacaactggattgtcaattacagcgaaactctggcggagcaataacccattcctccgaagttctgcagagcacagctatcagcgacaggccaaaggtaaaggcaaccaacaagaacaaccgaaagcaagcggccgcagcagcagcagctgcagcagcagcggcggcggcagcagcagcggccgcccaacacgcccagcaagtgttgccgaacccaatggtctccatctataataacctggtacgttttgctaacgcttaccttttttattcatacaaataaaacattgtatttatacgcagcatttgcagcacttgcagcatccgcatctccagtttcagcagcaacttcaactgcatcaccagcgagtagctggactggacaatgcagcggctgcagcagcagcagcggcttcatccgcgaacatggcctactctatttctccggcatctccacttccctcgcccactggcagcggcaactatgtcgatcagcagctgcaacagcagtccatggatgttgctctacagcgcaagacggccatggacgatttccgtggcatgttggagacggcggtaaatggtccaaggggcagaaaagacctggctcttaacacaccacagctgaacttcttcaaggacggctggcatatggtgggagtgcacaatttctttggtgatcagccaaagtcgcccactgaaacaccgcctgaaatggaggagactaccatgtcctcaccgaccgaagcagatcgtctcggatcggagcctcgggccgagatgaagaacttggccacgctctgctcggccgcagcagcagctgctgctgtggcagcggttaacaaggatcaggttgagattagt

SEQ ID NO: 13409 - DNA, 2436 bp, DROSOPHILA
gtgaagcggctgctttgcaagggcaacgtgaacctgaacgacgccgccgcctccacggatgatggcgagtccctgctctcaatggcctgctctgcgggctactacgaattggctcaggttctcctggccatgtctgccgcccaggtggaggacaaagggcaaaaggactcaacgcctttaatggaagctgcatccgccggtcatttggacatcgtcaaactgctgctcaaccacaacgccgatgtgaacgcccactgtgccacgggcaacaccccgctcatgtttgcttgcgccggtggtcaggtggacgtggtgaaggtgctgctcaagcacggcgccaacgtcgaggagcagaacgagaacggacacactcccttgatggaagcagcttccgccggccacgtggaggtagccaaggtgctgcttgaacatggagccggcatcaacacccactcaaatgagttcaaggagagcgccctcactctagcctgctacaagggtcacctggatatggtgcgattcctgcttcaggcaggtgcagatcaggagcacaaaaccgacgaaatgcacactgccctaatggaggcttcaatggacggccatgtagaggttgctcgactgctgctggactccggtgcccaggtgaacatgcccacggactctttcgagtccccgctaacgttggcggcttgcggtggtcatgtggagttggcaacactcttgatcgagaggggagccaacatcgaggaggtgaacgacgagggctacaccccgctcatggaggccgctcgcgagggacacgaggagatggtagccctcttgctcagcaagggtgcaaacatcaatgccacgaccgaggagacccaggagacagctttgacgctggcctgctgcggtggcttcatggaggtggctgcattcctgatcaaggagggagctaatcttgagctgggtgcttccacgcccctaatggaagcctctcaggagggacacaccgatttggtaagcttcctgctgaagaagaaggcaaatgttcatgcagagacccagacgggggatactgccttgacgcatgcctgtgagaacggacacacagatgcggccggtgtgctgctatcgtatggagctgaactagagcacgagtccgagggtgggcgaacgccactaatgaaagcctgtcgtgccggacacctgtgcactgtcaagttcctcattcaaaagggcgctaatgtcaacaaacagaccaccagtaatgaccacactgccttgtcgttagcctgtgccggcggtcatcagtctgtggtggagctgctattaaaaaacaacgccgacccgttccacaagctgaaggacaacagcaccatgttaattgaagcctccaagggtggacacactcgtgtggtcgaactgcttttccgctatccgaacatttcgcctacggaaaacgcagcgtctgcgaatgttacccaggcagcaccaaccagcaaccaacctggtccaaatcagatgcgtcaaaagatcatgaagcagcagcttcagcatcagttgcagcagctgaacgctccccctggcttgcatgagttgtctgaggcggcacgtgcatccaatcaacaacatttccaccagcaacagttcagcagtgccggcaacggatcctccaacatcgtggcaatgggaactggcgactttttggatgccggagaactccaacttactgctactgcgggaatgagtgcgggagccggaaccagtaccacgggcagtgagactggtatggaggagtatggcgaagtcggaggaattgacctgactactcttggcgctcagcagcaagagggtcttattgcaaagtcgagattgttccatttgcagcagcagcagcaacaacagcagcagcagcaacaacagcagcagcagcagcaacaacaacaacagcagcagcaacaacaacaacagcagccacctgcagctggccagcaccagttagtgccatgtaagcacttcgacctggacatggagcacatcaattctctgcagccgccgcaaaaggcaccgcccgctccacctgtactcttccacaccgtttgccagcagcctgtaatgcaacagcagcagcagcagcttcagccaggtcagctcaagttgaaggccatgctacccaaccgcaatcgcgcgttgaaaaccgccgaggtagtggagtttattgactgcccggtggatcaacaacagcctggcgagcaggtgcgcacgcagcctttgggtgaggatggaaagactcctcagtttgcatgcgctggagaggatccacggttgcagcgccgtcgcggctttatgccggagctgaagaagggtgaactgccgccggagagcagcagcagtgacccaaacgagctagcccttaaaggtgagctaaaacagcctaatgtttccttttaa

SEQ ID NO: 13410 - protein, 784 aa, DROSOPHILA
MACSAGYYELAQVLLAMSAAQVEDKGQKDSTPLMEAASAGHLDIVKLLLNHNADVNAHCATGNTPLMFACAGGQVDVVKVLLKHGANVEEQNENGHTPLMEAASAGHVEVAKVLLEHGAGINTHSNEFKESALTLACYKGHLDMVRFLLQAGADQEHKTDEMHTALMEASMDGHVEVARLLLDSGAQVNMPTDSFESPLTLAACGGHVELATLLIERGANIEEVNDEGYTPLMEAAREGHEEMVALLLSKGANINATTEETQETALTLACCGGFMEVAAFLIKEGANLELGASTPLMEASQEGHTDLVSFLLKKKANVHAETQTGDTALTHACENGHTDAAGVLLSYGAELEHESEGGRTPLMKACRAGHLCTVKFLIQKGANVNKQTTSNDHTALSLACAGGHQSVVELLLKNNADPFHKLKDNSTMLIEASKGGHTRVVELLFRYPNISPTENAASANVTQAAPTSNQPGPNQMRQKIMKQQLQHQLQQLNAPPGLHELSEAARASNQQHFHQQQFSSAGNGSSNIVAMGTGDFLDAGELQLTATAGMSAGAGTSTTGSETGMEEYGEVGGIDLTTLGAQQQEGLIAKSRLFHLQQQQQQQQQQQQQQQQQQQQQQQQQQQQQQPPAAGQHQLVPCKHFDLDMEHINSLQPPQKAPPAPPVLFHTVCQQPVMQQQQQQLQPGQLKLKAMLPNRNRALKTAEVVEFIDCPVDQQQPGEQVRTQPLGEDGKTPQFACAGEDPRLQRRRGFMPELKKGELPPESSSSDPNELALKGELKQPNVSF

SEQ ID NO: 13411 - DNA, 3184 bp, DROSOPHILA
ccgaaacactgaaccaacgccgggtaaaagttgttcatggatacgcccccgtcgtcggcgcgtggcgtcgccgttccattggccaaagatgaggccatggtcgaggtgatgactctgacattagcctctgtgctggcagcaatccgctggctggcgtagtacatggagctgtccattggggactactgtggagtggctgctaagcgtgggagttcactgttagtgggcgactctgcgcgtcatagcggaaaaagtggggtgctccggtgggccaagcagctgatgggccgtgacgtcaaagggccagctgcggatttattggattttcgccgacctttactttatgttgctggcaaatatgttgctctattatttaatcgcttatctacgcagttttgtttgccaatttgatggttgttgttgtgtattattagcactctattttccttcaatagtcgaaaatggtcgaaaatcgcaatgcccggcaggctgatttcactttcatctgttcgaacgacgcattgctgatttttgagtccgcagcacttgcttttggcaattaaacgaatttattaatttgcgcaaattaacgtagttaagagctcaaaagcgcccgccgatgcgttttgtttttaatttgcaatgcgaatggtgggaccgcagcgcggtcgttaagtaataccagcggggcaaccaaaatgtactaaaatacaccatttatatgttatgaaaataccaaacaaaaatactaaggcagtgctacaaagagaccgttaaaatatctgttatttacacagtttttcctaaaattgaacgacatataagctaaatatcgaaccagttaaacaaaccagttcgaatgagttatctttccaaattacaataaaaacagtttcatttaagaacaataagtcgttggttgacagacctgccaaacagtgctgcccaccaacactgtacggtccaaacagctgattggtataggaaaaagaagaagacaattagtcatcaaacaaaatttgtagaacgaattaaagtggaaaacccacaaatttcccataaattttgcgtgttgtagttaaaataataaagcagtcaatatgaatcgcctttttggtcgtggtaagcccaaggagccgggtccaagtctaaacgattgcatcgccggggtaagtgtcgaaatcatggagaaaacaaagcaaataacaatttattacactcaacaggtcgatgcccgagcaacaaacatcgaagagaagatcagtaatctggaggcagagctgcgcaaataccgcgaacaaatgtccaagatgcgagaaggtcctgccaagaactccgtgaaacagaaggccctccgggttctcaaacaaaagaaggcgtacgttcaatgccccacccactgcctagtatcgattatattccaaacctccagtgttactcttctccagacatttgaaattatcatttcctaatctataagttccattaccttatgaaatttacatccacaatcaatttttttattgtgtcctgttctaaatgagtattttaaaccattttgaactttatttgtttcctacacagctacgaacagcaggcagaatctctgcgcaaccagtcgttcaacatggaacaggccaactatgcggcgcaatccttgaaggatactcaggccaccgtggcggccatgaaggatggagtcaagcagatgaagaccgagtacaagaagatcaacatcgaccagatcgaggtaagcatagttagctggaaagagatggaaatgtcccagaaatatgaacataaattaatttttatccttttgcctaaaggacatccaagacgacatggctgatatgtttgagcaggcggacgaggtgcaggaggcactgggccgcacgtacggcatgcctgaggtggatgacgacgacctgcaggccgagttggatgctctgggcgatgagattgccttggacgatgacaccagctatttggatgacgtggtcaaggctccggaggcgccgagtcgagagccgggagctgacagcatcgtccctggaaaggtataatgctgcttatatggatagcagcttgattgcttactaacgagctaatttcttacagagcaccattgaaacggatgagttcggcttgcccaagattccgacatcgctgaagaccacataggcaagctgccaagctgccagctctcatgtttccattctttatcctttgttgaaccttgggcacgctttgtatattttatgtgtaatggagccatcaaagattccctctcaagtctcacttttgtaaccatttgttttttcaataaatagccgtttagttatcacgccacactaatgacgcattatattggttaatttatgaaagttaatatatatagtgaaaaaacattaatatatttcaacttcaaactttcacttaattcagggaaagaaattattattatttattatttattaggtttgtgcttaaaaattttaacaatgaaacattcgttctttagtttttatccagcggttaaatcaattaatatagtttaaattgtaaattaaatagtttgacccttttttgatcggatgtacagctgtacgtatacgtgataaacacttaagtcaaaaactcatttcaaacaaaatttggtgagcttgcagaacaggtaagaagaagcttgccattgaattacgatattttcaatttaagtaagtttttgagtataaaagtgagtataatgtactgcttacttttttgagaaagcagaatacttgctgaatgagtttccgccgcattgtaattgaaatggatttagcgttaatcgaacgcaaagcaatgttaatatattttttggccttgaaattaaataaggtgttgttggaaataaagtacgcaaaaacaaaaactatttcccacaatttcgacgtacagaggatgcactgtagctccctactctctttggctctccctgcaattgcaattgcattccgctctcttagcctcgcttgcgctctctacgctaacgagctttgaagttcagagcgtgaacttgagcgtttctctgccgttgtcgtcgcgaggtggaggtgcgctggtgtgcgtgagcgggtctcagtgcagcgcagtgcctgtgtgcaaaaatacgcttgttcgccgtttagttgtcttttga

SEQ ID NO: 13412 - DNA, 781 bp, DROSOPHILA
attagtcatcaaacaaaatttgtagaacgaattaaagtggaaaacccacaaatttcccataaattttgcgtgttgtagttaaaataataaagcagtcaatatgaatcgcctttttggtcgtggtaagcccaaggagccgggtccaagtctaaacgattgcatcgccggggtcgatgcccgagcaacaaacatcgaagagaagatcagtaatctggaggcagagctgcgcaaataccgcgaacaaatgtccaagatgcgagaaggtcctgccaagaactccgtgaaacagaaggccctccgggttctcaaacaaaagaaggcctacgaacagcaggcagaatctctgcgcaaccagtcgttcaacatggaacaggccaactatgcggcgcaatccttgaaggatactcaggccaccgtggcggccatgaaggatggagtcaagcagatgaagaccgagtacaagaagatcaacatcgaccagatcgaggacatccaagacgacatggctgatatgtttgagcaggcggacgaggtgcaggaggcactgggccgcacgtacggcatgcctgaggtggatgacgacgacctgcaggccgagttggatgctctgggcgatgagattgccttggacgatgacaccagctatttggatgacgtggtcaaggctccggaggcgccgagtcgagagccgggagctgacagcatcgtccctggaaagagcaccattgaaacggatgagttcggcttgcccaagattccgacatcgctgaagaccacatag

SEQ ID NO: 13413 - protein, 226 aa, DROSOPHILA
MNRLFGRGKPKEPGPSLNDCIAGVDARATNIEEKISNLEAELRKYREQMSKMREGPAKNSVKQKALRVLKQKKAYEQQAESLRNQSFNMEQANYAAQSLKDTQATVAAMKDGVKQMKTEYKKINIDQIEDIQDDMADMFEQADEVQEALGRTYGMPEVDDDDLQAELDALGDEIALDDDTSYLDDVVKAPEAPSREPGADSIVPGKSTIETDEFGLPKIPTSLKTT

SEQ ID NO: 13414 - DNA, 9942 bp, DROSOPHILA
atcctgaccaagcgaaatgttttgaaagggacgtggagcaacaggagcgggcagcttatcaatgcaaaacagactttcggctttatgccgtccacttcatattcgaaatgccacccccacttcatatttgccatccacccattttcaccatttccacaattttcatctatttccatctgcattgtgcaggaagcgttgaagcaacccttgagggattaaatttcaacagtttgccgcccgcgttgcgcattcttggccagcacttcccccctttggaaaatccttccccccccccttctcaccatgtgccttcagtagcttttctcttgccgacttttcgacgcttagccatctgtctgtgcattttcgtggaaatgggtagcgcttaaatgggaatagggcatacagctaatgaatgtaatcgtcataagctgcccttttcgctgcggaagagccaactcattacgagtgcctgtctacagaatatttccttgtaattgggcttgattttggggggtggtagtcgaatctttcggagaattatgaacgaaagtgcattcaatttaaatccgctcttgcccgctgtccatcaaattggttgtttaccggagggttgggcaaacttctgtgaaaaggatttctaaagaatttgcaacgatttaaaagggcaaaacttctagaaagcattttgtgattcttaattaggtatttttaatgaaaaattgtactttgatgtaagcatttgcggttgattggaaaagataggttttcagatagaaatgtattactaaaagaagcaaaaattgtgcatatacatgagatgcatttaagattaggaattctctccagaaatgagactaacatatttcagtcgtaataaaaccggaaaagcagaacaaacccctacctttttccgcctggtcgcaaggccattagaatgtcgtacctgcagctattttgatttgataagcaaacaaaggcgacaaacagcggcagcaacatgcagaaaaacacagcgacgaatggcaaacagaataaaataatcagaagacaaacgcagaaagtggtaatgagtatacgccgtgttggacaaaggagaaaaaagcaggaagggaacggcgttccccgtgctgtgttgtctggaaaagtgaaaagcatgttaaagcccgagggcgggcattatgaggcaccccataccggttaccgctccgatttctatgctccatggcgcgtctgccagacacttgagccaaccagccgactcctcgacatccagctggacaataattgtgcgagcgagggttccatgcccaagtgtcctgcgggcaatggcagcgccggaaagagggaaaagggggaaaatgccgggcaggaatggcatattaagcaaagatacaaagccagaatgccgaatgctaatgaattgaaatttgttggtggcgcgggggcgtatgagcaatttaattgctgagcaaattgcgcgctgatgaaaattgaattgttcattgtgtagcgtggcatgtcatgtcactgtcaagtgcaaatgtttccaatgccgcaacatcaacattgtctccccaaaaaaacattcgcattcaacaaatgaggtttgccaatgtcggcaaatggaaatggaaaagcttgcgtgttatttattattgctcgcctacaaacaactcggctcggcattgtttaaatgatttttcaagcgatttatttgcggtatgtaaacttttattactccacactgcattccagctctgtttctcattttaattttcgcgctgatgtcattgtcctcgcgactgatttttgcatatccttcgtatttctttgcagacggagctctcacacaatctgcaacaattgtcggagaaggcacgttccacgaccgagttcatccagcggctcaaaggcatgagcgacaaagtcacggtaagtgggaaaaaaccggcgaaaaagtccgcaattcggctaaatctccgtatctcatccgtaatcaggaatcctgtatggagttcgagcgcctcgtccacgctcagtgtgaggccctcattcaggccatccacgacagacgcgaatatctgctggaggccattcgcatggacaaggacaccaagatcaggatactcaaggtatgttgtttcttcaagaagctattataaataactaacatatacaaacccaaagtatatgaaagttaaataatgattttgtaaattattataatttaataaatgtacaatattttacttaaacaacaggaccaacaatcgaattgcactggcaagttgcagcaaaccacaggactaattcagttctgcattgaagctctaaaagagactgacagcgccgcctttcttcaggtgggttttttgacttcattaattaatgtgttcgtcagttaataaaatactttttattctgctgtgcaggtgggctccatgctcatcaatcgagtgaccaacacggacatgacctggcaccaggaggtcaccaatgccgcccctcgagtctcgcccattgttgacttgaccctggatgatgctgctctggcacgtgccatagataacttgaactttatccagatgagaggtaagtgcgagggcacctaatgaaaaatgcttaaaatatttactctaatagctatgtttgctagcccacgtaataacattatgcataggtataggtaaaacaattatagaatctaaaattaatagatatttatacgtaactagaactccttgagtatttctatgtagaacaatttcccaccaatttcgagctgcagacttcttgttcaatattattgtatcctaaccagccgtgaatttttgagcccaaatgtatgtgccaggcaaacccacgtcataaatattgtcactaattacgcacaaacacacagacccacccaattggccaaaggtgtgactttgggccacccaataataagcacaagcacaaatataaacaaaaacagagcccgcacttgaaacaaaaggggaaagagcccttcattcgagggtcgtttaagagttccgactgaagggcttcaaaaatagttttgggaactcccccgggagttgggttttcaaatttagaactggttgagtgttgggaaaaaggcaaaaagagtttctgttgacaacttctgggggaaatgaacacccaaaataggtgccccataattaatgtgaaagtgttgaaatcggatagtgcacacacagactgcggactaactattaagatacattaaacatctgatatggctaacatatttgtgcttttcttgcatcttcctgtcattctgaatgtgccgcttgctatcatttaaatgaatatcgaatatacccataaaaaccaaacaaatcatctaaagccgtcaaagatggagatgaaagatgtccggcaggtgagcaaaaaccacaatcacttgaatgcaaaaatatcaactgaaaaaatcaatacacaaattaagttttcgtacacaagacagaaacacatgaatcttgatttcataatttttgttcagttttttttggggaaaactgattttttggtgcttttggacttcttccctctctcacacacactcacacacgctcattgactcactcacacacacacatatccacctggctgtcggccattttgttttcatggtttttggccattgctttctacctttgttttccgttcttttacgttcgacgggcacacgcctacgcataataatttttcattttcatttaagccactagctggaaatacaaaatacccgaaaatgcgtccaaatattttcggcttcacttccgtttcctggcgaatgtcaaaaaactgtcaacttgtgggtgggggcggtaccactggaggggcgtggtcggcgatgtcatttcatgtgacataattttttacgccacgcttttgcctttgcccgtcgcttttcatttgactactctttctcatcttcattatttcatgcttaagcttttatttcgcatttttcgttttatatgtttattatttttatgctacccttgctgcttttttctggtattttccctcgcaattgaccctcttcaagcgggctgcttaggcttatcccttacacttttagcccgattgccgaggcaccttgaattcaactttttactttgtgcctcgctttttgtttcggtgacatttgacagcttttggcgccattttaattcgatgcctgttcaggggagcggaaatgcccggagtgtcgtcgtttttatgtttattttgcggcataattttaggcgctttacttcggactcgccatttgtgttgtgtcatgaatttttattaccaggcgttggttttatgccccgattttatgacacctgggcgtggcccccctcagggcaattaataaaaaatgaaacttgaacaaacgagcatatctttttgttgacagattcgttttggttagtcttgggatcaattggttgtcctgtggtcctctcatccatcgaaactcttttattggttgtggtattgtcttagttttactgataatttggtttacttttatttcactacctctataccagtactaacacttatttgggtcttttattcatcgttttcccatttcccatctaaagataactttttttgttcttcccacagcacccatgacaccaactatactgccatcggattgctcggccgagaataattcggtgaccgttgcgtggcagccaccaaatcactctttcgtcgaaggatatgtcctggaattggatgatggcagcggcggtgaatttagggtatgtttaatcaaaacaaaaataatatataaatataacaaatgcttcaatggcaacagttgtaaatcctttatatatatcttgttcaaaacgattgcttttaaagttgaaaatgtaatgaaaatgtaaataaaataatgtatgtaaatgagccaagtcaagtgaatgccatatcagctaatgaatggctatacgaatcgttcgatccaagtgctgattggctgagtgaatggctgtcatcttccaatttattaacccagaactttaatttgattgcctgcccccattcaggaagtctactgcggcaaggaaacaatttgcaccgtggacgggctgcacttcaactcgatgtacaatgcccgggtgaaggccttcaattccgccggagagggtgaatactcggagctgattggactgcagactgccgaaggtgagtgccgcttttcacgtttccagctctactagctttttcaattaagctccaccacgctcgccgctgagctactttcccaactgttttataatttaatccttttcggtcatgcgccaccccaatccatatccacctaccgagttcccagctcggactgcttctggcttcccgttcgtgctttgcatgtcaaacagccattgaccccttttgcgcctgcagggcaggaaaatgtgaatggaaatgggtctggaggtggtcgccatgggcggaggatgtcttctgcaatccaattcgcacttgattgatgcatgcgccacctgacagcagctcctattcctacaggaggcacatcgactcctgcttccactcccactgctcaccacaaacggaacgccgcgtaaagttgtttaatttataaaattaacagagcgctctaggcaacatttactttccgtcgttttattagttgggcgccattaatttgcaacttttaattgattattcctcgctgtctacgagttgccttcaaaggggtcacaggcgatttaagcgtatccatccgaacccgaaaccgagccgatcccactgcaaattgtcattttataaagtgtttacaacgagcgcgtgtccctaagtaattaacggaaaaccagttaacagtttatggctcgtgacgtttgcgggtggtcggcactaatgggttaagtcggacaccttaaggacattagggagacagtttacaagacgtcagtcttgggatgtgagacggttcaagtaatttcaattaagccagcgatgatgcggtcgtttggttacgtgacaaattgagaaactcagttcagaaataaagaaatccatacattaaaccatagcagatgcgtatcttaaagttatcaaactaaacctaataaaccaaggcgattaaagaccacttctaatcctttttaatagactcctaatcccaacttcagacgcattcatttggcaaatattttagctcggtctgcctcttggttatccaattaagaaactgggaacagtttacaacaactaattaaatgcctgggcatccaggactctcggtttatggcgcctggctcaaatctctcatagttttaatcgcaaagtcatatggccgacataaacaaaacaatggccagccggagtcctcctggcccagatgcttgctttgtggcttgtttggccacacaattgcctttggtggccaataaaacaggcaacgtcatcatcgtcagcagaccgagaagtggagccatgactctctttatatatacatagatgtatagccggtcccagctgattccggactagccttggccacttaatgcggccacaacaataaaaaaggaaatttaataaagcactccactcgactcgccactcgttgcctactttgcggcgcataacagcatgaactgcaaggaaccaccaacttggactccgaattgcactggccacttgagctttgacaatggggaaaattgcaaccggtctggctttgtttttctttccacttttcactgccccgtgcactgggaaaagatgatggtcttaaatttagaaataataactcggcggtaatgggatactattggaccgtaatcagctgaataggggtagtggaaaataatcttatctcatttaaggaatccaattgagctcgtttgttatccaacatgttttgtaaccaaaagtaatctagcgattcggttaactgggtggtattgccaagatatttctatctggaattctttcaactttccaagagttaatgtgccaagtgtatttatcgtctaaatttttcttcattccattgcagtggcctggttcacgtttgatcccgttctgagcggtggagccggttctggcttaatctttagcaaaaacaacgccaccgtgagcgtcgagggctgggaacaccgggtggccctcggctcggtgggattctcccgcggcgtccactactgggagttcaccatcgacaactatacggcggacacggacccggccttcggagtggcccgcatcgacgtggcccgcaacaaaatgctgggtgagtatgcctggccctcatccctacggctcaccttacagtgggttactggtggcattcgcaattcaattaaaaattcagagcaggcgccgccaggatagaaactttgatcgaaaataagcaggggggggggggagccgaagtggaaaatctgcacaacaaatagattcctggcgttgacaaaagagccaatacgtatgcgcaaagttcgcacagctaatagactgggattccggagggagttcggttcgggaacttaaaaactttgccattttgccgtctcgcaatgcgatgccaataaaatcgagtgccaagtagtacgggggcgtatcgaaaacttttgccatttcttgttgcatgtgcgtgggatggggtgtctttcgttaccagactgagacaaagacaaacacaatcaaaaggacttggtcgaggcgccttgaagtatgccttggcaaattgattgaaaatgtgcgtggggttgcgtaggaggagtgggtggtttccacaggcgacttgaactgcagacaaaagtaattaaaagtgcggcacttaaacttttgtcaaatgcaaaagtttatttgcggcagcgcatcccgtaccgcatttttctatctttttaagtctttgcgcgatgctgtgtatccttttcacttacacaatttattccccaagctgctcacgcgccatttaacacgtgcccgccagcatcgctgtggtccactgttggaaaactcaagttttcgaattaaattttcatatgcaaagcgtaacgaagcaggtggcgcccccagcggctgacattgacactaacagttgcagtttgccaagttgttttacgacccttatgcgttctatagatacatatatctctatatctatatagctatgtgcacagcagacccccgacttccgcccgatcctgttgctcctgcgtttgtcagttataattccgcaggactaaaacgacagacgggaaactgacaagccaaggatactgcgagtcgggggagccatcgtgccagccggagtttaaagttcgcaacttgcagctgaaactgagttcagcaagtcacgaaagcggagagcaaagattatttggggcattcaaattatcaatgaatttggatggcgattgctggggcttaagctgagaggaagatggtttaaatgctttaagtgtatatttctgtggaatttccatttcagtcaagagaattatatccgtttaagccactccaattcatgagcacttaagcgacttcaggcatatgttccatatacagctctattatacttgtgattgattacagcttctaattaatgttgtacttttatgttattatcctcaggcaaggacgagaagtcattcgccatgtacatcgaccggcagcgatcctggttccagcacaactccatacacgagcggcgagttgagggcggcatcaccacgggaagcacgatcggagtgctcctggatctagagcggcacaccctgagcttcctggtcaacgaaatgccgcagggatcggtggcattccgggatctctacggggtcttctatccggccgtgagcatcaatcgaggcgtcactctgaccatgcacacggccatggatgcgcccaagatggactatttctagaggtgatcgaaccgggtggagagtagcaaattgtgtacatagagcttgacatttggcagttatcggtgtctatatatatatgttagcattaccttaatacgaacaatttactcagacagcttatacatatatgggtgtatgtgtacgtgtagttttgggcaaagttcagcgacatatctccatttaatcgtatctctattcgtagttttaggcactgtttgtaaaacgctgcgccaaatcggataggaattattcaaaataattgaaagcatttaaaggtatctcgatgtaaaatacaataacaaaactctcaatgtttttcaacacgaaaatagagccaaaaatcatgcaccgtgcaacaaaaaaaaagttataataaaatcgcgaacaccaaaaaaaaaaacaaatctaatttaaacgcaagcgaataaaaactaaggtaaaatccaattagcaattagtgtagctaaaaatctgcatctgtatgtcatcacacgtacgtgtgttaaggttaatgtttatggctaacacaaacgcatttgtttgaggctaaaattaaatcaaaatcaacgtgttttcgggtgagtttttattttaaagactgaaaagaacatgttttttataagtacgttaggaaaaacacgacaaaagtttgaatgcgcaaaactaaccaaggcaaaatcaacaaaaaatttcccaaaaattagtaactttcaatatttatgaacactgcaaaagctgcataaaacaaatgtccccaaacacgaaaaccaacttaaagccaagagtttcgcttataaaatcaaatatgcatcggaatattaatacttaatgtacaactaagtttcctgtaaatattaatgtattgtttaataaacgttcggcttttctagatattttctatttaaggtgtaatgcataaaattaaattccaatgtatgtacggactatttatacttttcaacttaagcctatttacagcaaaaaccacaattaaagt

SEQ ID NO: 13415 - DNA, 1725 bp, DROSOPHILA
atgcagaaaaacacagcgacgaatggcaaacagaataaaataatcagaagacaaacgcagaaagtggtaatgagtatacgccgtgttggacaaaggagaaaaaagcaggaagggaacggcgttccccgtgctgtgttgtctggaaaagtgaaaagcatgttaaagcccgagggcgggcattatgaggcaccccataccggttaccgctccgatttctatgctccatggcgcgtctgccagacacttgagccaaccagccgactcctcgacatccagctggacaataattgtgcgagcgagggttccatgcccaagtgtcctgcgggcaatggcagcgccggaaagagggaaaagggggaaaatgccgggcaggaatggcatattaagcaaagatacaaagccagaatgccgaatgctaatgaattgaaatttacggagctctcacacaatctgcaacaattgtcggagaaggcacgttccacgaccgagttcatccagcggctcaaaggcatgagcgacaaagtcacggaatcctgtatggagttcgagcgcctcgtccacgctcagtgtgaggccctcattcaggccatccacgacagacgcgaatatctgctggaggccattcgcatggacaaggacaccaagatcaggatactcaaggaccaacaatcgaattgcactggcaagttgcagcaaaccacaggactaattcagttctgcattgaagctctaaaagagactgacagcgccgcctttcttcaggtgggctccatgctcatcaatcgagtgaccaacacggacatgacctggcaccaggaggtcaccaatgccgcccctcgagtctcgcccattgttgacttgaccctggatgatgctgctctggcacgtgccatagataacttgaactttatccagatgagagcacccatgacaccaactatactgccatcggattgctcggccgagaataattcggtgaccgttgcgtggcagccaccaaatcactctttcgtcgaaggatatgtcctggaattggatgatggcagcggcggtgaatttagggaagtctactgcggcaaggaaacaatttgcaccgtggacgggctgcacttcaactcgatgtacaatgcccgggtgaaggccttcaattccgccggagagggtgaatactcggagctgattggactgcagactgccgaagtggcctggttcacgtttgatcccgttctgagcggtggagccggttctggcttaatctttagcaaaaacaacgccaccgtgagcgtcgagggctgggaacaccgggtggccctcggctcggtgggattctcccgcggcgtccactactgggagttcaccatcgacaactatacggcggacacggacccggccttcggagtggcccgcatcgacgtggcccgcaacaaaatgctgggcaaggacgagaagtcattcgccatgtacatcgaccggcagcgatcctggttccagcacaactccatacacgagcggcgagttgagggcggcatcaccacgggaagcacgatcggagtgctcctggatctagagcggcacaccctgagcttcctggtcaacgaaatgccgcagggatcggtggcattccgggatctctacggggtcttctatccggccgtgagcatcaatcgaggcgtcactctgaccatgcacacggccatggatgcgcccaagatggactatttctag

SEQ ID NO: 13416 - protein, 574 aa, DROSOPHILA
MQKNTATNGKQNKIIRRQTQKVVMSIRRVGQRRKKQEGNGVPRAVLSGKVKSMLKPEGGHYEAPHTGYRSDFYAPWRVCQTLEPTSRLLDIQLDNNCASEGSMPKCPAGNGSAGKREKGENAGQEWHIKQRYKARMPNANELKFTELSHNLQQLSEKARSTTEFIQRLKGMSDKVTESCMEFERLVHAQCEALIQAIHDRREYLLEAIRMDKDTKIRILKDQQSNCTGKLQQTTGLIQFCIEALKETDSAAFLQVGSMLINRVTNTDMTWHQEVTNAAPRVSPIVDLTLDDAALARAIDNLNFIQMRAPMTPTILPSDCSAENNSVTVAWQPPNHSFVEGYVLELDDGSGGEFREVYCGKETICTVDGLHFNSMYNARVKAFNSAGEGEYSELIGLQTAEVAWFTFDPVLSGGAGSGLIFSKNNATVSVEGWEHRVALGSVGFSRGVHYWEFTIDNYTADTDPAFGVARIDVARNKMLGKDEKSFAMYIDRQRSWFQHNSIHERRVEGGITTGSTIGVLLDLERHTLSFLVNEMPQGSVAFRDLYGVFYPAVSINRGVTLTMHTAMDAPKMDYF

SEQ ID NO: 13417 - DNA, 4756 bp, DROSOPHILA
tggcatttgcatattcattgccataaaccataaaccataaaccatacaccacgcaccatactccatatttcatcttccatttaaggcgactttggacgcggatcgttatcgataagcccagctgccatacatgtacatacgagtactacataacataaatatacctttctcccactgcccactcgcataacagcttttcgaggcgtctcggccgaatacagagttacaaattcttgaaaattatagcttgcactttgcatcgtgtcaatgtcaacacaaacacatgtatacatacatacatacatacagacattcacacagagataaaacgcacagtgcagttgcagctgacactcgagtggctccgagtgcccactcacttgcatctacttgcattcacgcctaacaagcaattcagacagccccgtccgcggcgcccaccaccacccctttggttgggccaaccccctcctcccccccgccgacgaaaagccactaaaaccgggcgataatggacagcgtcacaaaatattgtaatcagcaaaaacaaaaatggcaaaagagacgtctggcgtaagtagaataacaacacgaatacccgcataccctataattgcttaaaaggatagtttccttcacaagtgaataccttacaagataatgtcatattataatataaaatagataattgaattatctctgatttgttagatttgtaaactaacaatgtgcatttttaagtaactctgcttaaaaatacattaaattgaaaagttgaattacgctatgtttgatatctgtgagttggttcccaactttattgcccatacgccaggttgccttacagcgtttcgaaggcgcacatccaatttgcgatatttttagtgctttacagcaggacagcctggccctatataccctgaattcgtaattggactaatgagggcggcactatcaacgtcaggttgtcaagcgaatgtccccgattcgtgtggattaactagctggtcgctgttttgcgcttgttgttgttttggctgcgagataagacgataaggcagtggaaaagcgttcgcacttggcattgaccgtggtttatgcgagaaatctctcttaggtaaaaacatcgcttacactgggcaaaataggtttaagaaatatacatcataatatcaaacctttttgacaagtctttataataactaagatagttttagtggtattccgatagatttctatacctttggaaattcgcttcttttaaattttaacaatgaatatttacagcttaagtaacgttttttgtctgtgtagtaatcttagctttggatttgctctccactgctttgtttattggatttctataccgttattgttccttcggactgggcttccccaggttctcccattaaaagtgacctacttttcggtaacttggcaactctttttgggcaactcacctgtgggccgcatagcggtaatactttttgggcagagccgatgtcgaacagggtcctggggtattgggcgcagaatcactcatctcgcactgaaagtagtcgaaaagcggaaaattaatgagagtaggctgatcggtttactaccacataaaacacacacgtacacactcacacacacgctgcgaattttaaagtaggaaaattgaagtagagaagtgggaatgaggctgaaaattgagaacgcaggcagtgcaggcaaagcaatcaaagtgctaaggacaaaaacaataatatatgaatgcaaaggaaagagtgctgaataatgaagtggggtggcaactctggccaaccctctttgactgacgcaattggcacaagtttaatgagttttgctgcaactgattgatatgctgctgtctagctacatcttcacctcctgctttttcaacactgagatagaaaaggtgtacaaaaataatgtttaaattatatatgtacgtatacattgtttttacaatgcttaatgcccacatcaattaaaaagaacgtctgttcatggtaatttaaaccatatatacaaaaatattacaaaactctttggatattttgtaattttaacatttgaaagttttttgcttaaaaacgtgcatttattgagaaaaatattgttttctagcgtaagagtgtgctttctcccgccgctttcgctcagtgtacttacttggtagggcggcaggtcgcaaaagtccctctcgaaggacttgagcggatcctgcggctgtgcatcttcgctgggcgtggcctgcattctgcctaaactggcataggagcaacttagcctacggttgcctttgttcctcctgcttcgctggcaatttggggcaccaatgtggatggggtatatccttgaaggggcggtttggctgccctggccgtgtttgggtatttcgcccgattttagtgacagtcggcgagagtcgttaacgattgccacttgggcaatgtgatttggatatctaaaggtgtctgttgtttcggatctgcttgttaattggcggtggtactgcaaagtgtttgttaaacggcgtaagtttctcattgccaacttaaacagcatgtgtgtgcgtgtgtgtgtgtgggaacaaactaaaaaatgcatcggtgtgtgtgtgtttgtcagcgtgggaaagcaatcaagcgatttgggatttaattctattgatattgatgcaaatgcatatgtacatacatacctgatacttattaagttgctcagaataagactgattagtttgattgcatgaacattaatccgatcaatatgaaatagtgttactgggtgtttttttttaaataataataataactctttggtggtgccactacataataaaatctgtactatactgaaagctgaatagattatagtattttgcaaatttaaggggtattattagagtgtaaataaaaacctttgttattcagtttattttagaatgaaaatagcacagccttatctaaatctcgggcaacaaagatgttgtctggactctcatctgatgcacatgtgtcaagtttttgaatattcctcaattaacacgcaataattggatttttatctgaatagttaagttaagttaataatggcacgcgttgagttttttatgcgtacccagtgtttatgtttctaaagctagcaatttgtgggtgggcccgaaagtaggctacgtatatttttctcgctcggtgcgtgcacttccaatggcaaccgctgattaagctaatttatcttgtttttcgctgcgtaattgcagaaaacaagtttgttggcccgtgttgttgttgctgttgtggccgtttttgttggcgctgcaaggtgccggcaaacaaaatcacatgacacccccgccgcgagtgccacatatcgatctatcaaaggccggcagatgggcaaaagggcaaaagtaacgccggcgggggctctaaaaatacacaatatgtatgcccgtgtccattggacagcgccaacaacaacacgactcaaaaaaaaacaacaacaaaattgggcagttcttagtgggagttacctctttgggccagaagttttgaagttgcggatttttgcgtttcgaggttttgctttccagccacttgattttccaatattttccagctatttttggactcacgcacgcggtcgcgatttcataacacactgcgcacggttttcaaaagttgtccaataataaacacactgcgccacgattttcaaaagttgtccaagatttccatcaaaccaataataaatgggcggcctggaagaagaagacgttttacgataacgataacgataatttccgatggttttactttttccttattttctctctcagaaaattagtgcaaaacagaaacagcaagagaaaagagagttgtttgtaaacaatggggcattttgctcgatgctggcaatgctgcactctttcatttggcgcgcaatgcgtggaattcaaaatatttgtttcgcagtgaaacatattttcaattgtctccatatatgaagagctatttgtcataaattaacaatcttcttgtcctatgccataagctagggacctatagtttaattaactcaagtcatttatttcctttttcttgataataattgttcgttgactgaaaataatacataaaagtatgtatgctacatatttctctgtatgatctaacaattgattttgtttaaattttaaaagcattttttaggcatcataatattatatttatatataatttatttatatataaattataattttaagaatttacttaacattcaccatttttgttcatttaggatacatttttccaacccccctttgtgttttttttttttcaactactttatataatatacgtgaaccatttaaatgtgatttaagagtctctttgatcaaatttgtcacatggaaataagcagcttatactattactttttaatggtcccctttaggagctattaggggcagacttttccgcctttggcatttatttaattacccttttcgaataaattgttatatgttaatggacgattccgagcacagcgaacttccttagcctgctcctttcgctcctttcaatcttagttgcaacacacttccctgttcctctaagttttcgcccagatttatccgtttttcaatatgtttttcttttctcgcccggttctcacctttccgctcaagttgcgccaataaatttgtgcgcttccaatgcctttagtgctttacgga

SEQ ID NO: 13418 - DNA, 677 bp, DROSOPHILA
tttgatggaaatcttggacaacttttgaaaatcgtggcgcagtgtgtttattattggacaacttttgaaaaccgtgcgcagtgtgttatgaaatcgcgaccgcgtgcgtgagtccaaaaatagctggaaaatattggaaaatcaagtggctggaaagcaaaacctcgaaacgcaaaaatccgcaacttcaaaacttctggcccaaagagtaccaccgccaattaacaagcagatccgaaacaacagacacctttagatatccaaatcacattgcccaagtggcaatcgttaacgactctcgccgactgtcactaaaatcgggcgaaatacccaaacacggccagggcagccaaaccgccccttcaaggatataccccatccacattggtgccccaaattgccagcgaagcaggaggaacaaaggcaaccgtaggctaagttgctcctatgccagtttaggcagaatgcaggccacgcccagcgaagatgcacagccgcaggatccgctcaagtccttcgagagggacttttgcgacctgccgccctaccaatgcgagatgagtgattctgcgcccaataccccaggaccctgttcgacatcggctctgcccaaaaagtattaccgctatgcggcccacagccaaaacaacaacaagcgcaaaacagcgaccagctag

SEQ ID NO: 13419 - protein, 70 aa, DROSOPHILA
MQATPSEDAQPQDPLKSFERDFCDLPPYQCEMSDSAPNTPGPCSTSALPKKYYRYAAHSQNNNKRKTATS

SEQ ID NO: 13420 - DNA, 3875 bp, DROSOPHILA
ccaacagaaattgaagctaattgttaaattttgctaaaaaaaaatttgtataaatgctttgtaagcttggagtgtttcgctgttatgtttattaaaaataaatcctgtgcatgtagcaattttgtgttattatttttcttatatttgaaaattaagtatattgaaagctttgtcatatgtagtactagtttactagacaatcagcacatacatatgtactttaaaacataaatatgtaaagcatacttattccactcaaacaaagctttaatcaaattaatcaaattgcgcgcaaaagaagccgtgaaaaataagtaaaaagtaaatgaatatagaacgctagaaaaagttcaaattttcaaaagtgcggccgttttttgggcgtggcaagtaagaatccggaaacaatcttgcgatgcatctacatatgtctctgtgatctgcattcataatgtgactttctcagcttttttagttttatagtttctaatatctcgttcctacggacagacagatggacatggtcagatcgacatgaatcaatattcgtattaaaaatatatatcatttataagaaaagctgttacatactttctaaagaatcaagtataccctagatagaaaactagcttaaattcagacaagattgatatacattcatctagttaaacatatttaataagtattataataataatttcttataaaagatcttaaaatacacacctaatttggagtgtgaatcaatatttcgtagctaatacaaatagggcaagtactaaacccaatgataattggtactttcaggcttattatataacaattatctcattctgcatatatctcttgtgctaaaacaatgataacaataacgaaacgactgcagctttgaattgaagttggaaaatccagagaaagttacatatttggtaagcaaacaccagaagatctggcagtcacttaaaatggaccagctataaataggtcggtatggtgagtgatggcatccagaatccgtagagaagtcaccatgcgtcctattcttgtgctatccctggtcatcttggccacgctggttgtcctgtcctcgcaggcaacctcaacatcgcccacgagtagctcctccacctcgccgacgagtagctcatccacttcgcccacgagcagctcctcctccacgagctccgcaacgaccaccacgacgaccaccactaccactacggctgccaccaccacttccaccaccaccgaaaagtcgaagaagaagcgtaacaggcgccgcaggcggaggatcatcatccgtcgcagggaacgaagagacgaacgtggtgaacggagtcgcagggaacgaggtgacgagcggggtgaacggagtcgcaggaatcgcggtagcgacggtgaacgcattgtgaggcgttatgtggtccgtgagcgccgcttcagacgctactaataataaaaaagcaggtcaatatttctcataaaccatacagttgtctggaggagattctggtctgcaggatgcggattgcaggatctcgtctgtggtatctgggctgcaggatctgagctgcggaatctgggatcagggctgcggaatttgggttctgggctgcgggctctaagcggcaaacgagaaaatttctcgtgcagcttatgcacgtgtatcatttttatagtttcgcaaatggggcttaaaactggcccaccggataaagtcttgacctttggatgtaagccggcagacctcttcccaaacgttaatgtaaaaaacaaaaaaaaaagtcaccaaagatcaggtataaagccgcaattccgcagtccacatgggctagtctagtcgtttagctctcggagcacatattcgatggcatcacttggcatctcatttcatccatttccggatcagccggatgaacggacacgcaactggccactggtggattcattttggactgtgcccgtcctgctttccatttatttacttatggtgcgctatgcgcccaagtggacaaccaggtgagatcgtcggaagacacttcatccatagaacaactaaacatatgcactggctttttttgggatctcagacacaagccgctgcagctgagagctccattgttctgtcacagcttggccatggtgttcctaaatggatatatctgcctggaactctatgcggcaaccagggatcttgactacaatttcggatgtcagccatgtcgggttagctttgatccacacgaaatgcgtgtaagttggagcacactattcaggaatacgaatgtaatcttaatgcaaattcttaataatattgttacttcatacttatacagcttacaaaggcattttggtggttttacatttcgaaaatcctggaattcgccgacacggctttcttcatcctgcgccaaaagtggtcccagctgagcttccttcatgtgtatcatcatagcaccatgttcgtcttttgttggattttaattaagtggatgccaacgggttcgagtgagtaccttaaaagtgtctaaattggttgatttcctaaatccaatctgttcatttccatatagcctatgtgccggccatgataaactccttcgtgcacatcatcatgtatggctattatgccctgagtgtgctgggtcctcgagtccagcggttcctctggtggaagcgctacttaactggcctgcagctggtccagtttaccattatcttcttttgggcgtcacagatgttagtccgtggatgcgagtacggcacctggataaccctatcgatggccatatattccctgcctttcctctttatgttcgggaaattctatatgcaaaagtacacggtatcagcagtcggcaagaaacctatataaaccaataacacttttataaatagcttaaattctattgctcgttttagttgtaaaaaccaagtgcatttttatactaattttcaaacaaattgacacagttaataaaagctcgaccttgaatatcaattaaaatacagtcagtaaaatgttaagtgaaaatgttataggtaaaacctagaccttgaccaaagtttatgctccagcgacttgtaattagattttgacgaaaaatatcaacgcatcaacggagcgatcaaaatgcgtatataagtgactgacccttggcagtcggatctgattcaaacttggagccaccatatgccatgacgtcgtcgatgggtaatgatacgaaaactgagagctattcgtatccattcgcggatttggcggacgaacggacgcaggattggccactggtcaaatcgccgtggaatattatcgcactgcttgccctctatttacttatggtgcgctatgcgcccaaatggacagccaggtgagatcgagtccaagcatttgcacatccattacaaaccaccagcgctggccactcggtatttcagatgcaagccgctgcagttgagagtgcccttgttttgtcacagcttggcaatgatatttctcaatggttatatttgcctggagttcctgacggcttcactaagtcttggctacaacttcgcatgtcaggagtgtcgggtgagccatgatccacatgaaatccgggtgagttggcgaagcaactgggaattgagaagttaagaattcgaaatctgatgcagatagcggcagctatgtggtggttttacatctcaaagatactggaattcgtagacacggcattcttcatcttgcgccacaaatggaaccagctgagcttcctacatgtgtaccaccatagcaccatgttcttgttttgctggacttatgtcaaatggctgccgacgggttcaagtgagtttatataccttaaaaatattatatttctagtagtaatatc

SEQ ID NO: 13421 - DNA, 1329 bp, DROSOPHILA
atggcatccagaatccgtagagaagtcaccatgcgtcctattcttgtgctatccctggtcatcttggccacgctggttgtcctgtcctcgcaggcaacctcaacatcgcccacgagtagctcctccacctcgccgacgagtagctcatccacttcgcccacgagcagctcctcctccacgagctccgcaacgaccaccacgacgaccaccactaccactacggctgccaccaccacttccaccaccaccgaaaagtcgaagaagaagcgtaacaggcgccgcaggcggaggatcatcatccgtcgcagggaacgaagagacgaacgtggtgaacggagtcgcagggaacgaggtgacgagcggggtgaacggagtcgcaggaatcgcggtagcgacggtgaacgcattgtgaggcgttatgtggtccgatctgagctgcggaatctgggatcagggctgcggaatttgggttctgggctgcgggctctaagcggcaaacgagaaaatttctcgtgcagcttatgcacgtgtatcatttttatagtttcgcaaatggggcttaaaactggcccaccggataaagtcttgacctttggatgtaagccggcagacctcttcccaaacccggatgaacggacacgcaactggccactggtggattcattttggactgtgcccgtcctgctttccatttatttacttatggtgcgctatgcgcccaagtggacaaccagcttggccatggtgttcctaaatggatatatctgcctggaactctatgcggcaaccagggatcttgactacaatttcggatgtcagccatgtcgggttagctttgatccacacgaaatgcgtcttacaaaggcattttggtggttttacatttcgaaaatcctggaattcgccgacacggctttcttcatcctgcgccaaaagtggtcccagctgagcttccttcatgtgtatcatcatagcaccatgttcgtcttttgttggattttaattaagtggatgccaacgggttcgacctatgtgccggccatgataaactccttcgtgcacatcatcatgtatggctattatgccctgagtgtgctgggtcctcgagtccagcggttcctctggtggaagcgctacttaactggcctgcagctggtccagtttaccattatcttcttttgggcgtcacagatgttagtccgtggatgcgagtacggcacctggataaccctatcgatggccatatattccctgcctttcctctttatgttcgggaaattctatatgcaaaagtacacggtatcagcagtcggcaagaaacctatataa

SEQ ID NO: 13422 - protein, 442 aa, DROSOPHILA
MASRIRREVTMRPILVLSLVILATLVVLSSQATSTSPTSSSSTSPTSSSSTSPTSSSSSTSSATTTTTTTTTTTAATTTSTTTEKSKKKRNRRRRRRIIIRRRERRDERGERSRRERGDERGERSRRNRGSDGERIVRRYVVRSELRNLGSGLRNLGSGLRALSGKRENFSCSLCTCIIFIVSQMGLKTGPPDKVLTFGCKPADLFPNPDERTRNWPLVDSFWTVPVLLSIYLLMVRYAPKWTTSLAMVFLNGYICLELYAATRDLDYNFGCQPCRVSFDPHEMRLTKAFWWFYISKILEFADTAFFILRQKWSQLSFLHVYHHSTMFVFCWILIKWMPTGSTYVPAMINSFVHIIMYGYYALSVLGPRVQRFLWWKRYLTGLQLVQFTIIFFWASQMLVRGCEYGTWITLSMAIYSLPFLFMFGKFYMQKYTVSAVGKKPI

SEQ ID NO: 13423 - DNA, 3352 bp, DROSOPHILA
tgaagccctcgtagttctccttggtctaaagggtttgaatagaaaatattatacattttcaaaaagcttaaggtatctcgctcacctcatcgtcgttgtcctcgtcgccagcatcgctatccacatccttgtcgcacatgttgtcctccagtatggctacaggtgctgcaccatccgtgggcggtggcccagggtccggagtgacgtccacagctccggtcgtcgctggtgcacgctccccctcctccgcttgcaccccttcgccaacacaatcgtttgttatttgcagtggcggcggcggcggcggctgcagcacctccccctccacttcaccgtcaccatcacagtctccctcgccatcggaactgctcagcacctggttctcgcctgactcgtccacaccatgttccactccgttctccatgcgttcttgtcgcgaattctgtgcaattctacggatattttacttccaagatacttaagttttgcgaaaaaaaactgatggatgcagtaaggtagctgctttttctacccagaataccgaaactcattaaaaccgccaacccacggtcacacttgctagcggtccaattttaaccggtaaaaacggaggaatggcgttgccatacataacatgagaagcattgaatcggttatttattacagaaacacaagaaatgtttttgttttcaaatgtttatttatcataaaagagttcaagtcttttaggcattttcgtaatcatttattttgaaatccattaattttacttgttttatcgttggttttagtcgtggcacgaaaacagtgtaaatgtaataatattactttaaaattaattttaattgtgatctgttaaagtatttaattttttaaatcattcaagccgaaataatcatttgaaaatatgtgcgtggcaaatttaatgaaacctctaaacatcgatatcacagcgtagaaatcgacaataatcatcaaaaacatcgaagcttgcagcattactagaaatagtcagcggaaaaggcgcgcattaaattgttttgttaaattacttttacggtcagaaagtaacttaaaatacatccaattactatcgtattttacatgcgttaacgaaatggcactttgggtggataaataccgtccgcgggagctgtccaaattggacttccacaaggtaaatcagcgaggaaaccggcgcatacatctatatagctggcccatatattaaagtatctctttttaaaaaggttttttattttatgatttttgctaatttcgatgcaggatcaagcggagaacctacgcaacctttgcaagcagagcgattttcctcatctgatgttctacggaccctcgggtgctggcaagaagacacgcatcatgtgcctgctacgggagatgtacggatccggcgttgagcggttgaggagcgagaccatgacattcaccacgccatccaatcggaaggtagaggtgatgacggtcagcagcaactaccacttggaggtgaatccctccgacgctggcatgtacgaccgcacggtggtgatcgatctcatcaagcaggtggcccagacgcatcaaattgagattagtggccaacgggaattcaaggtgattgtaatttcggagggcgacgaactcaccaaggatgcccagcacgccctgcgccgtacgatggagaaatatgtggccacgtgccggataatcatatcggtgaactccacatctcggatcattccggccatacggtcgcgttgcctgggcatacgggtggcggctcccaacgaaacggagatcgtgtccatcttgcagaacacttgcaagcgggagggactcgcactgcccgtggagctggccaaacgggttgtggacaagtcggagcgcaatctcaggcgagcacttttgatgctggaggccgccaaggtggccaaggcgccgtttaccgccaatcaggagattcccgacctggactggcaggtgttcctgcgtgagacagcatctcagattatcagtgagcaaacgcctgccaaactggagaagatccgcgaacgcctgtacgagctactcacgcaaggcgttccacctaatctcatattccgcggcctggtcgaacagctggttaacaattgtgatatgtccatcaaggcaaagacgctcgagttcgccaccgagtacgagcaccggatgcagtccggcgccaagcacatttttcatcttgaagcgttcgtcgctcagtttatgaacatctataaaaagttcctttctgagctggacatgacggatgatttttaaacgatttacacgctttagcatttaattcaaaaaacttattaaataaactgatttaaacgaactattaacgttcttcctgaagatccgttcgcatctgcagaacggccatgctcatcttatcatcggtggtgcgctttatggtctcaatatatctttgaacttcttcttcgagtttaaagtaagcctaaaataggaatagatttggaatatgattggaatgtattttgagtagaacgaaatttatatgtatgacttaccatttcataatcaagatcatccttgccattaatctttaaaccgtgcagcagcaaatcgatcgtgctgatggggaagcagagctgtgggtttgctatgttcaccgcgtgtttgaattcgaaatactcgctacctgctcccagcatgccggcgattatttcacatcccagatctgcggcttccagcagacgattgtgtttcacaagtaagtggagcagttcccgggagtgggataacttgtaggagtttatcagccactggggcaagaaggcgtttaacccgagaagcctttgaaccacgctctttcttatcaaggtggagtcttttgcctcgttatccacaaccagtttttgaagtaaagtccaggccatatcggcagcattacttcgatgaggtagatctgttataagacatatagtaagcctctttttttcatacacgttaaaaaatccctacctgccatgtcgttgttttgcagccagttccaggcgtccgacgacttgtcctcagtggcagcaacacaagcggatgtcagactctcgaatatggggagcacagagaacgagtgtccccgcgaaagtttcaatgccgcggtgtacaggccggaactagccagcaggtatgatagctcctcgggtgtggcccgctcgtaggcagctgtatctttgcggtagaaggaaagctcacgtaaagcttctgcgtgcaccagttcccttcggatatcagccagctctagaacaaccacctcctggcctctcttgtcctcgtcacatttgggctcaccatcgtcgttatcctg

SEQ ID NO: 13424 - DNA, 1242 bp, DROSOPHILA
actagaaatagtcagcggaaaaggcgcgcattaaattgttttgttaaattacttttacggtcagaaagtaacttaaaatacatccaattactatcgtattttacatgcgttaacgaaatggcactttgggtggataaataccgtccgcgggagctgtccaaattggacttccacaaggatcaagcggagaacctacgcaacctttgcaagcagagcgattttcctcatctgatgttctacggaccctcgggtgctggcaagaagacacgcatcatgtgcctgctacgggagatgtacggatccggcgttgagcggttgaggagcgagaccatgacattcaccacgccatccaatcggaaggtagaggtgatgacggtcagcagcaactaccacttggaggtgaatccctccgacgctggcatgtacgaccgcacggtggtgatcgatctcatcaagcaggtggcccagacgcatcaaattgagattagtggccaacgggaattcaaggtgattgtaatttcggagggcgacgaactcaccaaggatgcccagcacgccctgcgccgtacgatggagaaatatgtggccacgtgccggataatcatatcggtgaactccacatctcggatcattccggccatacggtcgcgttgcctgggcatacgggtggcggctcccaacgaaacggagatcgtgtccatcttgcagaacacttgcaagcgggagggactcgcactgcccgtggagctggccaaacgggttgtggacaagtcggagcgcaatctcaggcgagcacttttgatgctggaggccgccaaggtggccaaggcgccgtttaccgccaatcaggagattcccgacctggactggcaggtgttcctgcgtgagacagcatctcagattatcagtgagcaaacgcctgccaaactggagaagatccgcgaacgcctgtacgagctactcacgcaaggcgttccacctaatctcatattccgcggcctggtcgaacagctggttaacaattgtgatatgtccatcaaggcaaagacgctcgagttcgccaccgagtacgagcaccggatgcagtccggcgccaagcacatttttcatcttgaagcgttcgtcgctcagtttatgaacatctataaaaagttcctttctgagctggacatgacggatgatttttaaacgatttacacgctttagcatttaattcaaaaaacttattaaataaactgattt

SEQ ID NO: 13425 - protein, 318 aa, DROSOPHILA
MFYGPSGAGKKTRIMCLLREMYGSGVERLRSETMTFTTPSNRKVEVMTVSSNYHLEVNPSDAGMYDRTVVIDLIKQVAQTHQIEISGQREFKVIVISEGDELTKDAQHALRRTMEKYVATCRIIISVNSTSRIIPAIRSRCLGIRVAAPNETEIVSILQNTCKREGLALPVELAKRVVDKSERNLRRALLMLEAAKVAKAPFTANQEIPDLDWQVFLRETASQIISEQTPAKLEKIRERLYELLTQGVPPNLIFRGLVEQLVNNCDMSIKAKTLEFATEYEHRMQSGAKHIFHLEAFVAQFMNIYKKFLSELDMTDDF

SEQ ID NO: 13426 - DNA, 4794 bp, DROSOPHILA
tggcatttgcatattcattgccataaaccataaaccataaaccatacaccacgcaccatactccatatttcatcttccatttaaggcgactttggacgcggatcgttatcgataagcccagctgccatacatgtacatacgagtactacataacataaatatacctttctcccactgcccactcgcataacagcttttcgaggcgtctcggccgaatacagagttacaaattcttgaaaattatagcttgcactttgcatcgtgtcaatgtcaacacaaacacatgtatacatacatacatacatacagacattcacacagagataaaacgcacagtgcagttgcagctgacactcgagtggctccgagtgcccactcacttgcatctacttgcattcacgcctaacaagcaattcagacagccccgtccgcggcgcccaccaccacccctttggttgggccaaccccctcctcccccccgccgacgaaaagccactaaaaccgggcgataatggacagcgtcacaaaatattgtaatcagcaaaaacaaaaatggcaaaagagacgtctggcgtaagtagaataacaacacgaatacccgcataccctataattgcttaaaaggatagtttccttcacaagtgaataccttacaagataatgtcatattataatataaaatagataattgaattatctctgatttgttagatttgtaaactaacaatgtgcatttttaagtaactctgcttaaaaatacattaaattgaaaagttgaattacgctatgtttgatatctgtgagttggttcccaactttattgcccatacgccaggttgccttacagcgtttcgaaggcgcacatccaatttgcgatatttttagtgctttacagcaggacagcctggccctatataccctgaattcgtaattggactaatgagggcggcactatcaacgtcaggttgtcaagcgaatgtccccgattcgtgtggattaactagctggtcgctgttttgcgcttgttgttgttttggctgcgagataagacgataaggcagtggaaaagcgttcgcacttggcattgaccgtggtttatgcgagaaatctctcttaggtaaaaacatcgcttacactgggcaaaataggtttaagaaatatacatcataatatcaaacctttttgacaagtctttataataactaagatagttttagtggtattccgatagatttctatacctttggaaattcgcttcttttaaattttaacaatgaatatttacagcttaagtaacgttttttgtctgtgtagtaatcttagctttggatttgctctccactgctttgtttattggatttctataccgttattgttccttcggactgggcttccccaggttctcccattaaaagtgacctacttttcggtaacttggcaactctttttgggcaactcacctgtgggccgcatagcggtaatactttttgggcagagccgatgtcgaacagggtcctggggtattgggcgcagaatcactcatctcgcactgaaagtagtcgaaaagcggaaaattaatgagagtaggctgatcggtttactaccacataaaacacacacgtacacactcacacacacgctgcgaattttaaagtaggaaaattgaagtagagaagtgggaatgaggctgaaaattgagaacgcaggcagtgcaggcaaagcaatcaaagtgctaaggacaaaaacaataatatatgaatgcaaaggaaagagtgctgaataatgaagtggggtggcaactctggccaaccctctttgactgacgcaattggcacaagtttaatgagttttgctgcaactgattgatatgctgctgtctagctacatcttcacctcctgctttttcaacactgagatagaaaaggtgtacaaaaataatgtttaaattatatatgtacgtatacattgtttttacaatgcttaatgcccacatcaattaaaaagaacgtctgttcatggtaatttaaaccatatatacaaaaatattacaaaactctttggatattttgtaattttaacatttgaaagttttttgcttaaaaacgtgcatttattgagaaaaatattgttttctagcgtaagagtgtgctttctcccgccgctttcgctcagtgtacttacttggtagggcggcaggtcgcaaaagtccctctcgaaggacttgagcggatcctgcggctgtgcatcttcgctgggcgtggcctgcattctgcctaaactggcataggagcaacttagcctacggttgcctttgttcctcctgcttcgctggcaatttggggcaccaatgtggatggggtatatccttgaaggggcggtttggctgccctggccgtgtttgggtatttcgcccgattttagtgacagtcggcgagagtcgttaacgattgccacttgggcaatgtgatttggatatctaaaggtgtctgttgtttcggatctgcttgttaattggcggtggtactgcaaagtgtttgttaaacggcgtaagtttctcattgccaacttaaacagcatgtgtgtgcgtgtgtgtgtgtgggaacaaactaaaaaatgcatcggtgtgtgtgtgtttgtcagcgtgggaaagcaatcaagcgatttgggatttaattctattgatattgatgcaaatgcatatgtacatacatacctgatacttattaagttgctcagaataagactgattagtttgattgcatgaacattaatccgatcaatatgaaatagtgttactgggtgtttttttttaaataataataataactctttggtggtgccactacataataaaatctgtactatactgaaagctgaatagattatagtattttgcaaatttaaggggtattattagagtgtaaataaaaacctttgttattcagtttattttagaatgaaaatagcacagccttatctaaatctcgggcaacaaagatgttgtctggactctcatctgatgcacatgtgtcaagtttttgaatattcctcaattaacacgcaataattggatttttatctgaatagttaagttaagttaataatggcacgcgttgagttttttatgcgtacccagtgtttatgtttctaaagctagcaatttgtgggtgggcccgaaagtaggctacgtatatttttctcgctcggtgcgtgcacttccaatggcaaccgctgattaagctaatttatcttgtttttcgctgcgtaattgcagaaaacaagtttgttggcccgtgttgttgttgctgttgtggccgtttttgttggcgctgcaaggtgccggcaaacaaaatcacatgacacccccgccgcgagtgccacatatcgatctatcaaaggccggcagatgggcaaaagggcaaaagtaacgccggcgggggctctaaaaatacacaatatgtatgcccgtgtccattggacagcgccaacaacaacacgactcaaaaaaaaacaacaacaaaattgggcagttcttagtgggagttacctctttgggccagaagttttgaagttgcggatttttgcgtttcgaggttttgctttccagccacttgattttccaatattttccagctatttttggactcacgcacgcggtcgcgatttcataacacactgcgcacggttttcaaaagttgtccaataataaacacactgcgccacgattttcaaaagttgtccaagatttccatcaaaccaataataaatgggcggcctggaagaagaagacgttttacgataacgataacgataatttccgatggttttactttttccttattttctctctcagaaaattagtgcaaaacagaaacagcaagagaaaagagagttgtttgtaaacaatggggcattttgctcgatgctggcaatgctgcactctttcatttggcgcgcaatgcgtggaattcaaaatatttgtttcgcagtgaaacatattttcaattgtctccatatatgaagagctatttgtcataaattaacaatcttcttgtcctatgccataagctagggacctatagtttaattaactcaagtcatttatttcctttttcttgataataattgttcgttgactgaaaataatacataaaagtatgtatgctacatatttctctgtatgatctaacaattgattttgtttaaattttaaaagcattttttaggcatcataatattatatttatatataatttatttatatataaattataattttaagaatttacttaacattcaccatttttgttcatttaggatacatttttccaacccccctttgtgttttttttttttcaactactttatataatatacgtgaaccatttaaatgtgatttaagagtctctttgatcaaatttgtcacatggaaataagcagcttatactattactttttaatggtcccctttaggagctattaggggcagacttttccgcctttggcatttatttaattacccttttcgaataaattgttatatgttaatggacgattccgagcacagcgaacttccttagcctgctcctttcgctcctttcaatcttagttgcaacacacttccctgttcctctaagttttcgcccagatttatccgtttttcaatatgtttttcttttctcgcccggttctcacctttccgctcaagttgcgccaataaatttgtgcgcttccaatgcctttagtgctttacggattaccacacctgctgtggatgccactaccaccacctcc

SEQ ID NO: 13427 - DNA, 927 bp, DROSOPHILA
aaacgtcttcttcttccaggccgcccatttattattggtttgatggaaatcttggacaacttttgaaaatcgtggcgcagtgtgtttattattggacaacttttgaaaaccgtgcgcagtgtgttatgaaatcgcgaccgcgtgcgtgagtccaaaaatagctggaaaatattggaaaatcaagtggctggaaagcaaaacctcgaaacgcaaaaatccgcaacttcaaaacttctggcccaaagagtggcaccaccaaagagttattattattatttaaaaaaaaacacccagtaacactatttcatattgatcggattaatgttcatgcaatcaaactaatcagtcttattctgagcaacttaataagtatcagtttgttcccacacacacacacgcacacacatgctgtttaagttggcaatgagaaacttacgccgtttaacaaacactttgcagtaccaccgccaattaacaagcagatccgaaacaacagacacctttagatatccaaatcacattgcccaagtggcaatcgttaacgactctcgccgactgtcactaaaatcgggcgaaatacccaaacacggccagggcagccaaaccgccccttcaaggatataccccatccacattggtgccccaaattgccagcgaagcaggaggaacaaaggcaaccgtaggctaagttgctcctatgccagtttaggcagaatgcaggccacgcccagcgaagatgcacagccgcaggatccgctcaagtccttcgagagggacttttgcgacctgccgccctaccaatgcgagatgagtgattctgcgcccaataccccaggaccctgttcgacatcggctctgcccaaaaagtattaccgctatgcggcccacagccaaaacaacaacaagcgcaaaacagcgaccagctag

SEQ ID NO: 13428 - protein, 173 aa, DROSOPHILA
MLFKLAMRNLRRLTNTLQYHRQLTSRSETTDTFRYPNHIAQVAIVNDSRRLSLKSGEIPKHGQGSQTAPSRIYPIHIGAPNCQRSRRNKGNRRLSCSYASLGRMQATPSEDAQPQDPLKSFERDFCDLPPYQCEMSDSAPNTPGPCSTSALPKKYYRYAAHSQNNNKRKTATS

SEQ ID NO: 13429 - DNA, 10760 bp, DROSOPHILA
ggtatcattaggatttcacttttcattttactggatgtttctgtttggcagactattggttgttcctcgctgatgaatacttcgtcattctggggaagactttcgtctacggctccgagcattatatgcttccatccatcggttgccacaccgcagtcctctcgaattttctcataatccatcaaattattagactgtaacaactgcaatttgctgaaaaggatctgcactttgcgaaccctctccgaaaactcgatgaggcagtccatcaatgtgaagcattcggagcacagaaaattgctcagctcgtcctcccttttgatctgaaaggcatgatcttagttttctatttggaatatgtaaatttatagcagttacatcgacccaaaagtacttgccaatggtcatggccattgtgctcgcccaggagttttgtttcgcctccctgaagaatacattttgatttgtcggatgctccttggagcacaggcgacaccattggtgccaaattgttgaatctctgttcgcggcttgtgtttctgcgagaatatccgacatattcagaaaacatcgaaaatatactttcgttttgttttgattaacagccctgccttgcaaaaataccagggctgccagctacacaagaaaacagagctgcggactgttccattggtttacagttcacgacttagaggttccggaactacagagcaattattaaaactaacggttaagggcaagaaaacggtatgctttttttatttggcatttcatttttatttaagtcttttcgtatgtttttagcatccgtttaacatatcaaactctactctagctaaaagtacgaatatttttgagattccgtttcaagaatcacagatctatttgtatgttatattatgtatgctcaaaaattttgatttcatttctttgaaaacgtgtaccaattttacagccaagcaaaaactgcccttttaaaagattaaaaacaattcgtcatcaatttacaaaataacttatatttgtaaaattcaaaaactttctacttagatattagtatttgtgttattaactgcgttaattaggtccatcatcactcgagctcgttttagacattatgagcattcttaaactgtccgttaatttgcgtatgtccagtatatgtcagcggcatatacgtctagaatatagtataggtaatttagcttatcagcttagggaactaaataatgcactagacttaaactaggtaagtgtacgaaacaaaatactaggtgtccttcaactgccgttgatggcgtcctccgatttcatcgtcgaattggagaactgatctccgccggccagaagatcggcactggatgcaactggttgcagctgtgcctgttgcactgccacgttcactgggaccattggcaccatcggcacagccgtggcttccattcccggagcggtgctaatagttctggccagattcttttgctgtcgcatcagtttctccttctcgcgttccgccttcagcttatcgaagtcatcgccctcgtcttcgggctgcactgccgcatcgccgagtagatccgtggaggacctcaggtccatgctctccactggaaacatagatggtaagtgtcagtaaagtatatgccatggttaaattcatcatacgcaacgtgcaacgtctacgaaatggctaggactaatgctaggcgggtaccaatatgaagttgaggttacgggttcatggctacctacttgaccagccagaaacctattctgcggtcaaacaaagcgcaaaatatttaatttaaaagagccaagctgggttaagtactcaacaagtgggcatcgctttcaaaaaaacacatgccaattgttttaaaattcaaatataaaactaaattaaaaatgtaaatttaaagacagcttggaaaagatacatattgtgggaagttttggtttttttgtgggttcgttaggttgaatactaaactaaattaagtaattaaaaaatggttactgtaaaacaaaaagcttattagcaattttttcattattaattttgcagggtatattcaaaaataaattgttaaaattagtaatagtttaatttttgttactaaataagtttcaattaaaaatattttttagtacacacggaaataactgtatacattttcgtttataaataaatcataaaataagagcagacaatcaaaaaaaaaaaatttaacaaaaataagagtgtaatagggaaatcagcaacgattacgtagaagagcaagctaaaatattcgaacaagttaatagggccaatggatgtgaactttaccgggcgtgacgaaccacctgaaaacctgcggtgcatcgggcctctctttaaaagttcccgaatttgttgaaaatgaagatacacaaatgttaaaaatgagtttaagaagcggttgggcgctctaacacatccgctgattgggatggaaaacggttaagtgactcacctgtctctcggctggcgcccttttgtggatcgtatagggacttggagctctcgcccactggcgaactgggtgcagtggctgcattagacaggagcaggggacttccgcccgcaggagctgaagtactgagcagtgcatccactccgccaggtggaaataggttgggttcgtactgggattgggcccgattgtatgagggcggacgtgacgggatgtccaccggttccgagtgggccggtggtggctgcagcggtccagaggttccagctcccgacgaggtttgtgcgaatatgtccatgacattgggacgtggatcattggctctcatggatgttatggtcgcctgttcgtccacctcctcgatcacttgctgcgtaatcctaagactgccagctggttttccggccgatgtagccgatcctaccacggcacccgataaactcgccgagctggcgctggccgggaatttgtagggctgatcctgactgggcgttgccgatcccggcctgctatcgtcgcggctcaggaaacgtttgagggccgaggccaccgtattcacccgggatagagttcccgaaacgctcaccagcgagggcgaggaatccaggcgcattttgccatttccagctgagaagtgaatgccactggcatcatcggcctagtttcgggaatagaaagcatcacgttagacatatattcattaactaattagtatatagattgtgcagttccgctgtgcccggattacttgaaaccatttagtgctctaaggtcagtgcagcagaaagcaattgaaagtcgtgcagtgcgaagtgctgttaaaggcttagcctgtggacagatcttttagacaattagaatcaaaagttagtattcacattcttaaagcgtagagacacaaacaccattcttaacttatggttagactggatgtaggcacagtaagataagtgtaggaatattaactgaaatataaactggaaataatcgatttatataaaaatatgaataagttctaaagtaaaagtaatagttcaaaatataaatgctttaaattgaaactaacatttgaacattactgtgcctgctccttattttaatacacaatttgtacatctagattatttatagtatataccaagcaccgctgtaactcagaatgccaatgagcgaattgtgatcccacaaaagcaatgtttcttcgtgttgaacaagaaaaagaggttagaaattttaaattttgatttggatttggatttagtttcgacttggatcggatcgcaggacgagggaatgatgaattttgttaaccgattgagtgtctggtgccaatgcttcgtaacgctagggaatgcggccaacgttttgattctaacctcctcatctggcgagcccttgggaaaatcataagtaacggtttggacgccggtgtccgcacccggaacttgaacttgacccgtaaccgggttcggggctttcgcatccgcagcggcggcgggatcaccattagcattaccaaccatttcatcgatgcgaacggacgacattgtcgatggcatggccgcattcttgggcacctcgatcttggcagtggacggctctggatgattctcccggaatcgttcggcagctattgtgtagggcagctcgttggggaacacctcgtcccagtactgatcctttaacagctccggatggtcatggtgcatctcgtcgacgatcagataggacacctgaagattgcgatccaccatccagttgacctgaggaatatattttattgattttcgcagaactaacaaatgtgttctaatgcgtacctcaaaatcatcatcgtcttcgccaaatggatttatcagcgactcggccaccttgagccaacccatgtagaagaagaactgcagcgttgtaaatacaggaaagtatagatccaccttgttcaggtatgtggtattgcccaccaccttgccatcggtccattgttgacccatgcagcaggtaaggaagtacgaatacaccgccagggtcaccacttgggtgtacaccagaggtacactaatggtatcgtagctgatgaggagtccacactgaccacgaaacttatttagctcatcgatgatggtcttcacagcaaaatcatcacgaatgcgaccttcctttctggccctggttataatactggcagcccaaacgatgggcagccagtgcttcgaaggtctgggaaaggccttgttcatggtctcgatgatggtcttttcattgtcatttagcagacccgcttccaccagattatttaggccggggaaacgcttcttcaccctcggcgaaacattcgccaggaccatcgtcaggcaaaggcacacatatcgcattattgttcgcctcatcatgcgtcctcgctcatcctggccatggacattcgagctgacaaacacggcgatgggatctggccagggaatggaggtgtactgattccaccaacgggtcatcacaatcgatacatagaaaccaagcacgaaggacaggggtatgagttctctgtaactatcacagtactgaacaatggcctcaaaggttctgaaagaagttgcattattagtaaggcgcttaaaaagaggacaagatcggtggagaagaagatctgcatacatatatgtatgtattttgtagcatcagctaattttattaaaacaccatttgtgaagttgtcaagagctattttcagatgttttgagtaaactttctactgtctgtgtatttaaagttaattgtacattgtatttgagttagagcccatcagcactttctcgaattgaatggaacatagataaattcaaaaataataatatttcaaattcaataaatatggtttaatgtaggcaccacaactccactgatcttctctaggagctttttattactcactctttttgtgcggggttgaggccaaagcgatacaccatgttgatcgcatagtaaatggtcaagaaggccagaagatctagccaaaccagtttgtaaatgcttcctcgccatctgaaaagtgggaaaatgagtattgaacctttaaatttgaaaatactatattactattactattgcgattcttccaacatcagcctataaaaatagagcgaacacgtcaggctaatcagcatacattgacccttatcaggcaataataagttctgctacggattcgttccagaatccccacatgatattcgaattcgtatttgaccagcggcagtgtgtctgaggatgatatgtcatggcgaatctaacctgctgatatgggctggattattttggccacttgttgttgacacacgaaacgtcataaaatatactttgtagccctcgaaatataaacattgtccgcagaaatgtgcgcttgacttgacatgacgttcagacgatatttataaagcttatcaggtgaataaagcgtgatataatgaacaatcaagcgatatcttatagccaagaaatggtatttttactgaacacaaaaacaaaattatatggttattttttggaaactttgaagagagcgtttctatggcaggaccagtgaatcattaagggagattcccattgaccatgggttattgaccattattgggcgttataaacagcagcttaattagatcatcaactatttaactggcagcccaatagattacaatccatatcagcaatatatgaatgggcgaaatgcgtagtgaaagaactctacccccacattattaaattataattcagacaacaagctgtgacagatgtcagagttatgactacacgggtctagattacacataatatagaagagggggttagactctggtggcgattgcagtttgccatatgaaggacggtggaaagttatataatttgcatttgctgcacttgtgttgctctgctgattatcccatccaattctccgaagtgtgtcaatggtctataattagcaaagcagctaacaatttcgcactatactgtcatagcatatagatgatattgggtgaagtacataagactttaactcacctgagcagcaatttgagaaaacagccaaagccgcgacaagtggccacttcacctgtgtacgtaattgtcattgttctctcctattttaattccacctccaatttagtttgtttatagtgctcttttatagctgagattgctgttcttctttccgactgtcttatcgcgtctcacacattgttgtttgtcgaaaatgaaagttccactcttcacctgaaatgaaatgagatagaacacacattttttttttatagagcacggggttatgtaattacagagcaatcactcatggcagtacgaggaatcggagacagggctttcacaacctgtacaataatgcaatttgaaattctaaaatcgatatttttcacaattagacatgcgaggaaaccggtgaaggaaactcgcggcacggaaaacaattgaaatgcatttaacatttaacagaaatgcaacagcttcgggtagattatattaattgccgcaatttatatggacgatgccacataaaccccgatgcatgttcagatacttctgtgtatataaaatgtatctgaaaacgcgctgagctaaaatacactcaactttgcgtgtgggcgatgtcaaagtcagcgtttgagtgtttgggcggtctccatttgatttcgagaggtgtctctgggggtcagcttccaacgattagatatcaattacccaagcaaacaagctcaaagttacacatgccgtttagatattgaattcttcggggaagtacattatatattgataccaagatgagctcatttagttagcttttctccatatacatataaaataatgaatttccgtcctaaaagagagactgaaaaatgcgagaatttctgctaaccggtgagctaatgatctaaaatcacgccgcgaactcggctccgagcttaaattatattaccaagaccattccgaccatgtgccatgtgatcccggcctttctggtgcggcgaacatgacatcatgaatcggtctgtttactctagagggtatcgctataggtttgcagagcgatcgtaaaattatacacaagagcaaattatataataatcatagtattttagtattgcagcaatacaatatagaataatgtaatgtatttgcaatattaatcccaataaagttaagatcattatatttatcgtaatataaaacatataatatattcttctctgtgtatgctcgtgttcgatttgatttatttctctcatgagtataaaccttcaaaaaaaaaaataaaaaaacaataaagtgacgtagtttgctaactactagttcgggtttgattagtccagtcaaggtaactcatcgtttttaagggtttattttattatattttaaataagattttctaaagtctattgatttatcactcccttgtgatcgcttgtcgctgaaatagcaagcgttttaaattctgggtaaacaaagagaaatgcgataggaccgagactttcaactgtatatatagtaggtataaaccaaataagctaatttatcgtatatatacgagtataaacgaactaagcaagtaaacagaagcggacaaaagattagttgtgtacgttaaataaataaagagttaaccctttttgtttgagtattgttaagggaaaatattttatcgacactgtttttttcatgtattcaaacgcatttgtagctaatatcttgaccgcagctataagaaatgatcgcagtaaataatttactgatgcctaaagcaacaatggcggatcattatttattgtttccatttttgcttatttcaaatcgttgtgttcgaaggtttacccttcctcttcaatacagggtactgccctgccgaacccttcttggatatatatcaaccctaatatcaaccctatatatcaacgcagtgacattttgctgattcctttgtcgcagacaattgtttattgagcaaactgttcgatgcgctggcttcgcgataactgacctcttctctgggttttatataaggattgcaatatttgcagatcagaatttcagcgtcaacatcgttgacctacaaagtcaaatatatcggtcatgtttgcggacttggccaccattattatcattcccattagcataacattcaatatttgttacactgattctagactgacgacaacattcgaatccaaatcaccgaggttaatgactttttcgacgaacacttggctggcgagagttgtcagtgggccagaaaggcgcgtggctaaatttaaattattctcaaccgagtgctcattgcattttattaaaattcttagcattgcagacattgtgaagaattggcaaaatttgggtaggcgtcagtagaaagtagtggcagaaaaggtggtggtcgaatgttacgaaacataaaggaaataattcttcaaaataatactttatatgtacaatgcacccctagctttattattatttcttatatttacgttttcattcataattttgctaatcttttattttgaaggggtatggggtgagcagcacaatctaattgaattatttgtatttaatcataagttattatatgagagcctaattgttagagcaataaattattaaatattctcgccatgatttatgatattttcgctcgacaattatgttatcttcaacgcaacttattaatagttttcttttggtcacccaagtaatttgcgtagagattgcatatgcaaaagcaaatcggatgagtcacgggatatgatacatctacatgtacatggtatataactaaagggcattgtgtggtgcattctactatttgtgatgttgaccaatttttgcgagctgcaatcgattttaaactcattcgtcgcgcgtttaaaaacagattttagttgctattcctggctttgcactgttattaaatcgctccacggtcacttacacacttacatttatttgtgcatgttgttgttgtggcggttgttgttactttgattcacggcacgcaagcggtagcaacaataaagttaacaaattggcaggtagcaaaaaaagaggtagaagggcttagacaaacacactaacatcggtttatgtgcgagtatttcttcactttgtgcctttatgcttcactattttacgttttcgttgccgccgaacttcttacacaaacactaacactcacacacactcaaacagaaatacatgctcacgtccgcgctcaacgaccgccaatgtgaaactgaaaagaacgccatggttttacgttttctttaatttcactctcagaaattctctgctttgtgctgaaaacgagtgcgaaattcgcggagagagagcgaaaagagagactaagataagccgagcacaggggcgaattcgatgaaacgggggtgggcgccggaagtaagttacaaaaagaggaaataaatatcaggaataataataataataatattgaataatctataataagctaagtacaattataatgcatatagtttcgagtacaatttattataaatttattattatcaatgatgtgaggtgattcgcctttcattaggtgcgcgacttacctcaattttacctgtgttgtctaaaagcattgtatacttttgggctttctgggcatacgagatgcactttgtttcatgggaaacctgaaactataaatctatgaaattttatgaaggtagattatgataataagtagttcaaagttcgtgatattttatccttccatcataaatttaatgcgctccctaccagactttcaccaataattcaagattgtccaaaactaattaatcgcttatcttcagtccgtttcaattagtcacttgaatttttataaacagagcaaaatcgatctaaatgggcatcctataactaaataaaacactcaaaatgtaccttttagtttttattaaattaaatgattacattttatataattacaattcgtacgtttaacgcatttgccaaatgtttgtttcttaacattttagactatattgtagactttatattttaaattaattttgttggcctgcctttgtttatttttacaagtagttgaaacatttcactaatacacattcgttcgcacttatgacagactaatgacttatgttacgtggttgaattaaaattaggcaaagagaactttagtacgtttagtttagtattttacagcggcatctcgtctccaccatcgtt

SEQ ID NO: 13430 - DNA, 2861 bp, DROSOPHILA
agcgcggacgtgagcatgtatttctgtttgagtgtgtgtgagtgttagtgtttgtgtaagaagttcggcggcaacgaaaacgtaaaatagtgaagcataaaggcacaaagtgaagaaatactcgcacataaaccgatgttagtgtgtttgtctaagcccttctacctctttttttgctacctgccaatttgttaactttattgttgctaccgcttgcgtgccgtgaatcaaagtaacaacaaccgccacaacaacaacatgcacaaataaatgtgaagagtggaactttcattttcgacaaacaacaatgtgtgagacgcgataagacagtcggaaagaagaacagcaatctcagctataaaagagcactataaacaaactaaattggaggtggaattaaaataggagagaacaatgacaattacgtacacaggtgaagtggccacttgtcgcggctttggctgttttctcaaattgctgctcagatggcgaggaagcatttacaaactggtttggctagatcttctggccttcttgaccatttactatgcgatcaacatggtgtatcgctttggcctcaaccccgcacaaaaagaaacctttgaggccattgttcagtactgtgatagttacagagaactcatacccctgtccttcgtgcttggtttctatgtatcgattgtgatgacccgttggtggaatcagtacacctccattccctggccagatcccatcgccgtgtttgtcagctcgaatgtccatggccaggatgagcgaggacgcatgatgaggcgaacaataatgcgatatgtgtgcctttgcctgacgatggtcctggcgaatgtttcgccgagggtgaagaagcgtttccccggcctaaataatctggtggaagcgggtctgctaaatgacaatgaaaagaccatcatcgagaccatgaacaaggcctttcccagaccttcgaagcactggctgcccatcgtttgggctgccagtattataaccagggccagaaaggaaggtcgcattcgtgatgattttgctgtgaagaccatcatcgatgagctaaataagtttcgtggtcagtgtggactcctcatcagctacgataccattagtgtacctctggtgtacacccaagtggtgaccctggcggtgtattcgtacttccttacctgctgcatgggtcaacaatggaccgatggcaaggtggtgggcaataccacatacctgaacaaggtggatctatactttcctgtatttacaacgctgcagttcttcttctacatgggttggctcaaggtggccgagtcgctgataaatccatttggcgaagacgatgatgattttgaggtcaactggatggtggatcgcaatcttcaggtgtcctatctgatcgtcgacgagatgcaccatgaccatccggagctgttaaaggatcagtactgggacgaggtgttccccaacgagctgccctacacaatagctgccgaacgattccgggagaatcatccagagccgtccactgccaagatcgaggtgcccaagaatgcggccatgccatcgacaatgtcgtccgttcgcatcgatgaaatggccgatgatgccagtggcattcacttctcagctggaaatggcaaaatgcgcctggattcctcgccctcgctggtgagcgtttcgggaactctatcccgggtgaatacggtggcctcggccctcaaacgtttcctgagccgcgacgatagcaggccgggatcggcaacgcccagtcaggatcagccctacaaattcccggccagcgccagctcggcgagtttatcgggtgccgtggtaggatcggctacatcggccggaaaaccagctggcagtcttaggattacgcagcaagtgatcgaggaggtggacgaacaggcgaccataacatccatgagagccaatgatccacgtcccaatgtcatggacatattcgcacaaacctcgtcgggagctggaacctctggaccgctgcagccaccaccggcccactcggaaccggtggacatcccgtcacgtccgccctcatacaatcgggcccaatcccagtacgaacccaacctatttccacctggcggagtggatgcactgctcagtacttcagctcctgcgggcggaagtcccctgctcctgtctaatgcagccactgcacccagttcgccagtgggcgagagctccaagtccctatacgatccacaaaagggcgccagccgagagacagtggagagcatggacctgaggtcctccacggatctactcggcgatgcggcagtgcagcccgaagacgagggcgatgacttcgataagctgaaggcggaacgcgagaaggagaaactgatgcgacagcaaaagaatctggccagaactattagcaccgctccgggaatggaagccacggctgtgccgatggtgccaatggtcccagtgaacgtggcagtgcaacaggcacagctgcaaccagttgcatccagtgccgatcttctggccggcggagatcagttctccaattcgacgatgaaatcggaggacgccatcaacggcagttgaaggacacctagtattttgtttcgtacacttacctagtttaagtctagtgcattatttagttccctaagctgataagctaaattacctatactatattctagacgtatatgccgctgacatatactggacatacgcaaattaacggacagtttaagaatgctcataatgtctaaaacgagctcgagtgatgatggacctaattaacgcagttaataacacaaatactaatatctaagtagaaagtttttgaattttacaaatataagttattttgtaaattg

SEQ ID NO: 13431 - protein, 721 aa, DROSOPHILA
MTITYTGEVATCRGFGCFLKLLLRWRGSIYKLVWLDLLAFLTIYYAINMVYRFGLNPAQKETFEAIVQYCDSYRELIPLSFVLGFYVSIVMTRWWNQYTSIPWPDPIAVFVSSNVHGQDERGRMMRRTIMRYVCLCLTMVLANVSPRVKKRFPGLNNLVEAGLLNDNEKTIIETMNKAFPRPSKHWLPIVWAASIITRARKEGRIRDDFAVKTIIDELNKFRGQCGLLISYDTISVPLVYTQVVTLAVYSYFLTCCMGQQWTDGKVVGNTTYLNKVDLYFPVFTTLQFFFYMGWLKVAESLINPFGEDDDDFEVNWMVDRNLQVSYLIVDEMHHDHPELLKDQYWDEVFPNELPYTIAAERFRENHPEPSTAKIEVPKNAAMPSTMSSVRIDEMADDASGIHFSAGNGKMRLDSSPSLVSVSGTLSRVNTVASALKRFLSRDDSRPGSATPSQDQPYKFPASASSASLSGAVVGSATSAGKPAGSLRITQQVIEEVDEQATITSMRANDPRPNVMDIFAQTSSGAGTSGPLQPPPAHSEPVDIPSRPPSYNRAQSQYEPNLFPPGGVDALLSTSAPAGGSPLLLSNAATAPSSPVGESSKSLYDPQKGASRETVESMDLRSSTDLLGDAAVQPEDEGDDFDKLKAEREKEKLMRQQKNLARTISTAPGMEATAVPMVPMVPVNVAVQQAQLQPVASSADLLAGGDQFSNSTMKSEDAINGS

SEQ ID NO: 13432 - DNA, 5363 bp, DROSOPHILA
atagcatataaatagtacgactcttagacgatgtacgcaactaactatttaaactggggcttaaagcaagccacgcttggccagttttggttttttggctattacacacacacaaacccgtcgacttcgaaattcaaaatttgaccccggatttgttgactcggtgatccttgaatcgatgatcatgttggaggccaccttgcagccaggatatgtgcctgttggcatcacgccaatcttgaattggacagagccaccaagtctaaagcattgtgatgaggattatctgatcgttgtcctggcattgtccatttgcacccagttcttgctgatgacctatgtggcgttcgcagtcatgcaaccgtgttccatgcgaaggaagcagttgattgagggccagcaaaagaccttcgctagcttcatattccgaaggttactcttccagttggacgaggcattacacccttcggtcgaggcggtgcggttagactcctgcttgaggtctggtgaaaagctaatccaggccattcaactgttccggcgagatgctctcaaggtccttcagccagtgcagaatatctcatccgcaatggccagcgatttgtactatgtgctggacgaggaggagaatgaactgaatttcaacggctatgggagctctcattcaaaggtcgaggtcaccgaggaactattggtgtatttgctatatccggaacgaaaagtgtccgagaagaagtaatacgtcggactggggaacctaaatttttggctctacttgatttgtatttttgtataaactttccgcaaagtccactaaattcacgaattaagtaactgccttattgaatttttttttttagataattttcaatattttaataaagaaaaatcgcctttgtccatgctggttttagtttaaaagtactccaaataaaaatactttttattcaaaatcttcaagctggtgagccccacaaatttgacacactaaaatttagtttcagttcactaggccttcgcatgttcttccagggcattgatccataggtgaagtggacctattccccatcctctttttcgtcgcagttgcagcatttcttcttcttgttgttggtcggatcagatccacgtttcggaggacacgcgtcgaagttgctcgcaggatccgccagtgggaactgcttgttgaatagaggctttggtccgtggccagccggaaaatctgcggtcacatgagccttgcaaggagcacactcggcaccggcaccgccggcaaccaccttgctgtgaccactctgtatacccttgctggcaagtccacgaagtggctgacccgctgctccacagtcgtcctgcggccccatggttcgattggtgcctattgtgtgtgtggaaaggaacgcttcggatgttacgcctccacaatgtgggcatataaaggtgggcggtggtacgactgaagcggctttgctctgactcttacccaccgcgcaactgcagtcatcggcaggtgcaggctgcggcgctttcggctgaggagcacattcagcaatgggtgtctgctgtggcttagctacgggactgcaaccgcagtcctcctgcggaggatccgggcaatcatccctgccacaaccgtcgcatcccgactccctttgtgtcgacttgctctcctgttgatagacgtcatcggggtccttgtcggccactggaaaatagtgtccagttagcgcgtcgtgccgatcctcatcctcgtcatcctggcaaccacagcctccattggacttcttcagatgctgggagcagtcctgcgtctgtggcttggtggtgcaatcctgttgctgttcagattggagctgttgctgctgcttctggtgctcctgttgctgctgctgctgctgccgcatgcagtcctgttgcttttgctgctgttccatctgctgcttctgtcgttcgtccatggagcactcgcagtcgggatcggtatccggcacttgcccttgaacgacaattagtcctgctcctttttgctgtggtccggcacatggacaatctggatcgtgctgtatccccagggttctctgctgttgcgattgagattgctgtagtgcttctttcctagagcatgtacactggtcgtcgtctactttttgctgagatctctgcatttgagcttgtgatggctgctgtttctgggagccacatattccacaactcggcgcatcctttggctgcaattgctgctgggacttttccttcgctcctgcgccacatgagcatttgccatcctctcctggttgcgtctgtgaccgttgtttctgggcaatgccacaggagcaaggaggctgtgtctgctgagcaaagtcactggttgcagttgtggcagtcgacttgtgcgacatggttcccaccattgaaggagcgccacacacgcaccgtttcttggatggctgatcgtccatattggcctcactggtaatgatgtactggtattttccggatggctttgatcctctggatttgctcttgctaccctcgtcgctggtgtcggccaagcttatctccttgccgtacttgcagaggaactcgatgatcacgccgtttgtccagccgtaacccagcggagtgttttccggcgaagatcctccagatgtgccgaagtcctcgcagtagtactgcaataaggtggtaaaaatcggattaggaaactgccatgttagtgcgaaatattttttaaggccgattgctcactgtcaggtattagaacctgtatgacaatctagtaaaagttaaacttgatgcttgaggtcctaaaatacattatataaaacacaacgataccacggatatatagtaacttaccttctcgaacatgaagctctcgtacttgtatgccgcatagttggacttcacccatcgatgagcccatcgcttggacatggcttttgccggcggagtgcccagattctcaagtccctcgatgatcaggaacatcatgggcggaaagacattggggtgatcccaattctggcccgactccttattcatcgtgtacggcacaccaccatactgcgcatccaaatcattggtcttgatgtactgcatcacccccttggacaccttctcagtgtccaccaagggaaaggccctggcccacagcggagcaaagttggtgcagcagaagtagttgcgtggcttgttgttcaccagatcgtagtccagccaaatgccggcttgggcattccataaattatcccgaatggcttttactaggacacatgctctatcctgatactcatcggcttttttcgtattgcccgctttgcgattaaactcggccaggatcttgccactccggaaaacaatgcagttcagctccacgggcacaatggcagatgttttgatgtctcgaaaggatcctttattggaaccatcgacggtcacataccagcgtgaactgaagttcgtacccgattcagcagccgacttgagttcggtgtacataacctctcggaccacaggactcttgatgcttgccacacactccagatcttctcgataggcctcgggcctgggtcctgccgaggaatcccgatactgatacatggtcctgcccttcacctgcaccgagtgcttgctgatgaaggtatcgtattcggtttccagcagcggcaaagcttcaatggcgtactgctcgtccttggtcacctccacatatgcctttaccatcatgatcaagagtggagggttcgatcgacccgagcagtatatccggccacaaccaggcacaaagccgtactgctgaaccaattccaaatagttatcgatcatgccccgggctgtttgatgcatgccacattgcagcaagccgcgaatgatccaaaacgattcccagtagcggtactcgcggcaatttgaggagggaacaatgaaaggattcggtacgtagataatggaatactgatcggggttctccttgacttcatccttaatccgccgccccaactccttccaaagtccattgacatccgaaccgaactgctttatttccgggtcagagatcctggcaagaaacgaaggctgtgctttccaatccggcggtgtccagtgttccagctccgagccaggatcattgaagtgcttctgcagtaagaaaatatttctaaaattatacctactttatagtgaaatttctttgggtttttcttagagtttttttttcacattttacctcgacaaacatttgcaggaaccttagagatccatcgtttctgcggcaattggtgaacatatcgaagtcggccaaagtttgggcaggtgtaaaaatgcagctcatgtccacaaagtgtttgcagtcgggaaacattttcgatctctggacagcatccagcaagggaccctcgcagaaaacacctctatctcaggcggaatataaccaatcagtcggaacttcaagttcgaggacctttcttccacgactcacctgttttctccgcccaggacctctgcaccgcagcggcacttattcgccatcttcaacgagttgttgccttttttgtatagcgaagttcaggctgagtgactgataaccggtccaaattcgggtttcagcctagatgtgaatcccaggcgactgggttttttggggcataaatcaaaaaaccgagcagcagcagcctctgttatattgaccattaaagcaaatttgtcgacatttgccattaagagtcaacaatgctcggccataaatcagcgtaaatagacaggaagcgcctgcgaatcctcagcactccttccagggccacacatttattttaaattaccataaatgcccctgaccgaaaacgaaaccaaaacaagagcagcgtggcgaactttgcctaaaagctattggcccctgtgtccatttgtaatttccagacaatttatcaaaccagcaaaagcagtgaaagcagcaaaggaacagcaaaagcaaggggatgccaagtgccgaaggccagaagtcggaatggaaatggcgcagaaaatgcgcttcaagtggccatggccatgaccatcgactggatggatagatggaatggaaagccgggggtggcggcgagttcaaataaagtaaaaattcttcgattcgtgtacaatcaaattgggatggtggaaaatgggatagtggacaatcagccgcgggacggatacttcataaatttcttcgaccgatccactttaatgcaagtttttggcatcggcatctgtgtggaaacttcttcaagtacgagaattcgaaggagtacggaaattagccttgtcgcaatcgcattctctgtcgtctgcaaagtttcaattgaattttcgtccggcataaaaatgca

SEQ ID NO: 13433 - DNA, 999 bp, DROSOPHILA
atgtttcccgactgcaaacactttgtggacatgagctgcatttttacacctgcccaaactttggccgacttcgatatgttcaccaattgccgcagaaacgatggatctctaaggttcctgcaaatgtttgtcgagaagcacttcaatgatcctggctcggagctggaacactggacaccgccggattggaaagcacagccttcgtttcttgccaggatctctgacccggaaataaagcagttcggttcggatgtcaatggactttggaaggagttggggcggcggattaaggatgaagtcaaggagaaccccgatcagtattccattatctacgtaccgaatcctttcattgttccctcctcaaattgccgcgagtaccgctactgggaatcgttttggatcattcgcggcttgctgcaatgtggcatgcatcaaacagcccggggcatgatcgataactatttggaattggttcagcagtacggctttgtgcctggttgtggccggatatactgctcgggtcgatcgaaccctccactcttgatcatgatggtaaaggcatatgtggaggtgaccaaggacgagcagtacgccattgaagctttgccgctgctggaaaccgaatacgataccttcatcagcaagcactcggtgcaggtgaagggcaggaccatgtatcagtatcgggattcctcggcaggacccaggcccgaggcctatcgagaagatctggagtgtgtggcaagcatcaagagtcctgtggtccgagaggttatgtacaccgaactcaagtcggctgctgaatcgggtacgaacttcagttcccactggcggatcctgcgagcaacttcgacgcgtgtcctccgaaacgtggatctgatccgaccaacaacaagaagaagaaatgctgcaactgcgacgaaaaagaggatggggaataggtccacttcacctatggatcaatgccctggaagaacatgcgaaggcctagtgaactga

SEQ ID NO: 13434 - protein, 332 aa, DROSOPHILA
MFPDCKHFVDMSCIFTPAQTLADFDMFTNCRRNDGSLRFLQMFVEKHFNDPGSELEHWTPPDWKAQPSFLARISDPEIKQFGSDVNGLWKELGRRIKDEVKENPDQYSIIYVPNPFIVPSSNCREYRYWESFWIIRGLLQCGMHQTARGMIDNYLELVQQYGFVPGCGRIYCSGRSNPPLLIMMVKAYVEVTKDEQYAIEALPLLETEYDTFISKHSVQVKGRTMYQYRDSSAGPRPEAYREDLECVASIKSPVVREVMYTELKSAAESGTNFSSHWRILRATSTRVLRNVDLIRPTTRRRNAATATKKRMGNRSTSPMDQCPGRTCEGLVN

SEQ ID NO: 13435 - DNA, 3474 bp, DROSOPHILA
cgccgtgcggcattcacatggagatgcgcacaattttcagaaaaaacgtaaaagcttggagccagaatcgaagtaaattttggaaaaacacagaaaataaaatccaaaatggtaaagtgtgaccaaagttcggggcaccaaaaaatacacttgagtcgggtaaaatatactagaatatgcgttgcgtttactttttctagggtggctcgtgaaattagttttaaatatgtacatatatctagtttaaattcattcagatttttaactcgatgcattttttaaagaatagagtgctttatttgtttcttagtagaaaaagtatagtttcttgccacatggtccttggggcccatttccgcacggaactggggatggtgccgccgaagtggttgaagtatcagaggaggcttccgtcgtggttgtcgaggtggaggatgcagcgaatccaacgatggcgcacagaaggaacagaatggcgaagaacttcatcttgattactcttttgtgactgtgatattttcccggggatagttgctcaattttatacctttcatttttagatttgcaaatattgacacaaatgcttcaattccgcctatgtaccaaatatcaagagaaaagaaacaattcggcaaacactgcgtggtacttaaataatgtgttttgtgtttgtttagaaatagcaacacatggaatttcgctttttgccacttacaggttaagcttttaagcatagcacgcggattcagacaagatgatatatatatgggaaatttttatattgcatgatcattgtttttaaggaacccgcataaaccaaaatagtcagcaaaagcttctgtgatccggaaccagttcggccgcctgtttggttcacagcacttaaaagaacacttgggaaaaacaataaaaatatttcgcaaaagttatggcgaacgctggataagtcagccaaaaattgaatccatcggagcgactgccttggagccacagcccacccatgatgacgaccgacttcgcgggcagccagttcgtgtccagcaatcccaacaccagctgtagtgcatcccgctggctaacggaggaggtatttgcatggatatgcaatttgaaaatgatttgattcacatatttctgttgttctgtaggtctttaaactaatcgaaattgtgcagcgcgacgaggccatctacaatccgaggcacaaatactacttttgccgcccgtacgtggagaacttttggcgcgaggtggatttgaagctggaaaagaatccgggcgccagtctggccaagtggaccaatttgcgcatctcgttccgacgagagtacaccaactatctggaggaaaaggtgccaccctgctggtcctacttcgaccgcatgttctttctgcatccgtatctacgcaagaagcaccagcagcccaaatcgctggacacacaggtgcaggacgccctggcacacctctcgaacctttctagtcgtatgcagcgtgagcgttcagtgaccattccgggcagcagcagtattggtggccagcccacgccctccgcccaccagtcaccacctgcacagcagctggacaactatctggactactttgacgaggcggaacacaacaactccgagctggatgacatcatggaggaggagcagcagcgcaacagtcgttaccacggccagttggacggcaacgacattaagtcggagtgcgaggagccggtggatgactacgaacaagaggcgcacgagcccgaggaggatgaacaggatgaccaggacctacacaagatggcgcctacttctagctcttcatcggcggaggcccagcgtcgttatgccaaccagcattcacacgccagccgaatgcttccgggtcgcctccaaatgcgcacctaccatgacgagatgcgtggcgctattcgtccgcgttcccaggaactccaagctccaactgcagcagtggccggggtcaactactccgcacagccgactgcccatccaaacatttcgtttgtgcgacctactttcagcaagcccgtggatttggttagcactacaacgcacgccggaggcggaggaggaggaggtgttccaggaactgctggcttatccgaagcggaactgcccacaccatccactgcggccgtggccaccccgatggcgcccagtagtagtgttagtgccagcagtagcagtagctacttgagtcaacggcatgggcacaaccatatgcatggaggacatccacaggtgccgccgtcagcgcttcctctgcgtttggaagccaacaacgcgtccggcggatccgtgtccaacggcggtgcggagctgtgcgactgcaagaccgatccggatgccatgtttctgatgagcctgctgcccgacatccaaaagctgaacggccgtgatcgcggcaagataaagatagccttccagaacatcctgcaggactacctgtatccggattagcgttgatctctgtgtataccttccgcttaacgcaaacggaacccagttccagtatcgattttgtttaatattctcttttgtattttcgttggagaaaaaaaaagaatcctttaagcttcgctgtgcaagaacaaagtatccttaaaaacgttttgaaaactatccggtatgtttattaattgtataaatatttataaatatttaatgtgtaacacaagaataaattcatttgaaattatgcgatatatggctaggtaacttgaagtatcacatgaggatcggaatgggttgcatcccatcctcactcgaacagcttcagctcgcgggtgatcttcttgatcttgttgtccagcgtcttgtcctcgtgctcgcagatgtagtagtgccgcgaggtgcactcctgtccgtagtacacatagctgtgctttccggcattgtaacttagccgtaggcagcgacccttgccctctatttgcaccgtgttgttcagcacatcctcgccggtcgcctcctctgccgcctgctccgaactgtccaccagattggcggccgtcgagttctcccccttctgggccatcgcaatggatgtgagattcatgttgggattcaccggcttagccgaattggaccagatccagaggaggccaggattgagaccgcccagccagtaatcgcgaccacgatgcgtcggctgattcagcagataggccatgatctcctcattctccgagaccttctcgaactcggccaggtgggagtttagacccttgcaggcagagtttgccgtcttccagttcacctgctgctggctgttgatgtagtagcagttgtcgctgatgcgcgtgaagttcgcgggacagggatccttcacctccttctgattgtttccggccatcagatagtagatcagctgctccgagcgccgcacgcgactctccaggtaatctatgggtgtttgcttttacttagaccaagaactcctaggtgtgacttcaactta

SEQ ID NO: 13436 - DNA, 1413 bp, DROSOPHILA
atgatgacgaccgacttcgcgggcagccagttcgtgtccagcaatcccaacaccagctgtagtgcatcccgctggctaacggaggaggtctttaaactaatcgaaattgtgcagcgcgacgaggccatctacaatccgaggcacaaatactacttttgccgcccgtacgtggagaacttttggcgcgaggtggatttgaagctggaaaagaatccgggcgccagtctggccaagtggaccaatttgcgcatctcgttccgacgagagtacaccaactatctggaggaaaaggtgccaccctgctggtcctacttcgaccgcatgttctttctgcatccgtatctacgcaagaagcaccagcagcccaaatcgctggacacacaggtgcaggacgccctggcacacctctcgaacctttctagtcgtatgcagcgtgagcgttcagtgaccattccgggcagcagcagtattggtggccagcccacgccctccgcccaccagtcaccacctgcacagcagctggacaactatctggactactttgacgaggcggaacacaacaactccgagctggatgacatcatggaggaggagcagcagcgcaacagtcgttaccacggccagttggacggcaacgacattaagtcggagtgcgaggagccggtggatgactacgaacaagaggcgcacgagcccgaggaggatgaacaggatgaccaggacctacacaagatggcgcctacttctagctcttcatcggcggaggcccagcgtcgttatgccaaccagcattcacacgccagccgaatgcttccgggtcgcctccaaatgcgcacctaccatgacgagatgcgtggcgctattcgtccgcgttcccaggaactccaagctccaactgcagcagtggccggggtcaactactccgcacagccgactgcccatccaaacatttcgtttgtgcgacctactttcagcaagcccgtggatttggttagcactacaacgcacgccggaggcggaggaggaggaggtgttccaggaactgctggcttatccgaagcggaactgcccacaccatccactgcggccgtggccaccccgatggcgcccagtagtagtgttagtgccagcagtagcagtagctacttgagtcaacggcatgggcacaaccatatgcatggaggacatccacaggtgccgccgtcagcgcttcctctgcgtttggaagccaacaacgcgtccggcggatccgtgtccaacggcggtgcggagctgtgcgactgcaagaccgatccggatgccatgtttctgatgagcctgctgcccgacatccaaaagctgaacggccgtgatcgcggcaagataaagatagccttccagaacatcctgcaggactacctgtatccggattag

SEQ ID NO: 13437 - protein, 469 aa, DROSOPHILA
MTTDFAGSQFVSSNPNTSCSASRWLTEEVFKLIEIVQRDEAIYNPRHKYYFCRPYVENFWREVDLKLEKNPGASLAKWTNLRISFRREYTNYLEEKVPPCWSYFDRMFFLHPYLRKKHQQPKSLDTQVQDALAHLSNLSSRMQRERSVTIPGSSSIGGQPTPSAHQSPPAQQLDNYLDYFDEAEHNNSELDDIMEEEQQRNSRYHGQLDGNDIKSECEEPVDDYEQEAHEPEEDEQDDQDLHKMAPTSSSSSAEAQRRYANQHSHASRMLPGRLQMRTYHDEMRGAIRPRSQELQAPTAAVAGVNYSAQPTAHPNISFVRPTFSKPVDLVSTTTHAGGGGGGGVPGTAGLSEAELPTPSTAAVATPMAPSSSVSASSSSSYLSQRHGHNHMHGGHPQVPPSALPLRLEANNASGGSVSNGGAELCDCKTDPDAMFLMSLLPDIQKLNGRDRGKIKIAFQNILQDYLYPD

SEQ ID NO: 13438 - DNA, 13244 bp, DROSOPHILA
ttcgatttagctacagtgagcagatatacatacatatattccggtatataaaataacattggctatcgaacgtcctctatcgtaattcactgcgacaattcttgtacttattgtatgtgtaaatcgtcctttggttgggttgccgttgcctcgggatatgttttagtttaaatggcttcagattcgattcctttcgtttggtggggtgtgtggtttgcggttcgcggtttaatgcgaaagtatgcagttgagaaatagatatatgtatattagatatagctacaggtctatatagttgaagttcgttctttgagaggggggagcaacagtggattcaacagagactagcgtaaactttgaaggagtgcaacaatctaggggtgcgcagagcacataagaggcacattagttatttgagcaacagtagcatagagactagagtgttaaacagctgtgagtatccatgatgctgggtactctacggtactttggcattcgtcatcaaaaaaaaatgtcatttcgggccagcacttttaggcctggcttcaattatgcacaagagtgtggaaagaattttatatctaatatctttaacatatttggttattcattctatatacaagaacattcatcttggactacgaggttttggtttgaaaaaagattttttaccatcgatctcctaacatttcttatctttgtcctttacacaccgaaattagatttaagacttttaaatttgatttatttgtgcccagcttattttgcaaaaaacagatatctttatctatttaccaaattgcgaataaatatatctcattagtatagaagaatattacttcgcggcatgaatttgctgaacaattatatcccccaaaaagcagataatcatttcaaaggtataaaattcgagcaaaagagttccacccgttgtacaaccgatataaaaacccgatccgaataacctgacactgatcgcgaccaaatcttaaagtggcaatcacaaaatcgtggtcactgtcacgggcaacccatcggcgttcacggcatgctccgtctgcacccgggtgcctaagctctccacactggtggccttgctgagatcgatggccggcacatcctcatcgtagtcggaggccagctcctcctcggccaggtagctgcactttgtactgggaaccgccaccgatttcaccacgtgcgcctgctcctggtcgtggtagaagtgggtgcggtccatgtaaatgattccgtcatccgtatcgtcgtccgtgtggcaaaccggatagtggccatagcccgcctcgcactggtacggattcgacttgacgtgcacgttccggcagctaccgccgcagttctggtggctctcggcatcgccgccattggctccatagcactgaccccggtgtagggagtgacccaccgaatggccatgggcattcatctgacccaccccagctgcactgctggagtgggccactgactgctagatgtgcgagtgggagcgtgctatggacagggagtatggactgaggtccttttgaattcgcatcgaatcgtagatggggaactcgcagcacaggatgaacttcaaagcactgggcacctccacgtagacagcaggaggcactggtatcagtggcgaggtggaggctttgtacttccggtactccagttgactggaaaaaggttggatagaataataaatcatttaactaatagacggctctataatttattaatgaactacttaaagtcaattatcttttcatatcccttactcgtagagaaaaaagggcttactagattattttaaataaatatttcaacttactctttgtacttctcatcggcgcttcgttctcgcaggggaatccccgacagaaagagaatgatcatcgtagtgaaaatgggcgaggcaatcgccacccactcgtggccactgatcacattgagggatatggcaaagatgccccaccagatgaccacttcgccaaagtagttcggatgccgcgacacgctccacagtccttttcaatttgcacacattgtattgtatatatttaaagttaattatttctagctcaccatcattgcagaacttgccctgattggccggatcctggcggaaggagaacttctgcagatccgcataggtctccgccagcaggccaacgatgaacatgcccgtgcccgtggagtccagtgtggtcatggtctttggggcacgcggctgcgagtggcgcggtgaattaattattattacaggcagtgacacaatgtacacccaaacagccttaaaaaaagaaatatgatttctgatatgtagcagtttttaataatttaagtgcttatttcatataacacagttctagtgaatccaaaagttatattgccaaagtggatgcaaataccccaggcatatatccattgcggcatttatgctcagatttcaatgacagtatttcaactggcaacaagtgattggaattcgggtgaaatgggaaataaatgaagacaaaacgatggcaggacatgccacatgcagcacgccaacgccagtggcaatgccaatgccaatgccggcagcaccacggacaataaacggactgcaaccaccagcaagccagccagcccacttggcagtacaaccacccacttagccactagccatcagacatcagccaaccaaaaccacccaaaagcaacccaagccacccaacccagccatccacttaacgtttagctggtgtcgcccacatgtgtcatgtcactctgccagagagaatggcgttttaattgttggtcggtctgggtctgagcctctggttctgggccacattgagattaccatttccaccagccatgtcgagctcgcacggacgacaggtgctgaaatatgaaatattcaaaacctctgggcgcgtgtcaattagtgacagtttgattgattttccaccagcaagttgaaggttctgtcattgagcgtcgaattgaaaagtggctgacgcaaacgatttttccctgaccccctccaccgaaactacacccaccaactttggtcccagcggaactcacctggaaggtccagaagaccgcatagcggatgatgttgcgacgggtatcctcgaactgtttgtcgcgacccaactttacgattcgatatagtaaatatccggacagccgagcgccccacaggcaaacgaagagcgtgaccatcagctggcgactatcgtaggcctggaacggaaattcataactgtagttcttaactaagatcttaaataagtgcttacagccttaaaataatcaagttaatatcccaataagctgttatcattactttaaatggaaataataaagctgttagcaatgcacgaaatggtatgaatttaatcccatttaattttaagatccaagctttaaaagccttaagaagtaggctaaaacagcaaaggtgttcctgggcaataaactggcgataaactgctgtttagatcacctccgcttgcaataaacatttactatctgccatttagacgaatgagaaatattcggcaggctctgggaaagttagagttcaaggctgagctgctatccttggccaggaaggcgcactcgtaactatttcggtatctccgcaataacaaaaattggcattttgctcacctagggtatcccgccattcgtgcccacaactctgtggtaaaaattcattggccaacgagcaatttgcacgagttttctcttttgccgcacaaagtcgaattttcttgtattttttgctggcgatattttattttacaaaaccactttcggtggtcatgcaaattttgcataaataaagcgcagcacgcacgactgccagccgttctatgatcctccgccctggcccaaaaatggacacgggatttgttggttggctggttcaataatgaatgagtcgaatgcactttgcatatttataaacggcattgacgggccgaactgaatcagaaatgcatttctcatggaggagccgttcgtcaagcgtcgccatgagaaatgctggaaaaattgttaaattgctttgtcaatggcagcgaatgggcgttttggcccggttcatgaccgtaaccgtaaccaaagtcactggcagaggacgaggtcaccgggttgtatggcattatggaagggcattcttattgaaggagcggggtggggggatgggatggtggtgcctcaaacagttgatagtttaatgggtttgtcgtatcgcagggcggacttgattgcccattttgtcgattgattgagctgcctttcagctttcaaccaggggggctcaagctattttatcgctcgatttattaagcgactctgaacggcgataaaccatcgacgggcgactgcataagctggttgtaaaccatttttatggccatcacagctgcatagtgtacagtacaagcaacaacggccacaagcaatggcagcacttccgtttccgctcgacgtcctgcgaccgccattttccacctcatccccctccaccctacgttctgcgcaaggctttaaataaattttgcattgccaacttaattcgagctgagggcggaaatttaattttaatttacgatcgatagccaattcgttagttcgccacattaatgtggcaacaaaaatttaattgaactgcagcttaagtgctccagcgagaattcatacttcaatatttactcctatgtttattttgcgagtgggagcaaaaattaaatgcacataaatgtgtttgtggtcgaaagaacagtgcattctgttgatttaccagcacacgcgtgtgtttggtcaacaaaaaccaacagcagataagaatgaatttatttctcaatttgtatttgttgtcatggccaaattgcttaaagcccttaaccagctttccatgggccaggccaacaaatcgatacattgggtggcgtttaaaactgaaaaccgaacgaaaagcttttaaggtctttgtttattgacgtcccttcaagcgtatcatattttattaatatcacagatatatccttactgagctcgccaagtaggcctcatattcattaaaataagaggatctagataaacaggataatgaagcagatagccgcctttaatgaacagtgaaaattgaaaccaaaataatttcgcatctcatatttcacttgataattggagcaatcttaattaaaaccttgttaaatattttaactttaattaagaccattgcaggtaagaactgatatttccagtggcttaaagtatttttaccttaaaagctgtgctacacatacatacatacgcactttgtaattgcgtgcagacactaattaaggtgaacataattttcctctttactgccgtgctaatgagcgggaaaacagcgaaattggccatcaatttggattaatcaatggaccaactggcttaggctggggagttcaatcggctggctttcgcttttgagcggattcgagctgttttcggccgcaaatagccttagttagctgcttaggcatcgtgttagcccggcggaaggacacgccgacagacggattgaggaccctcacgatgccaaggtcatgcccagccagaaggagacctatgcatgtgccagctgcatccaaccaccagttaccaactaccagttaccagctacagcaactacaaataaaacagaaacaacaaacggaacaacgacgaacaacagctgaaatgtgcgcctcgatgggcggagtgggcgtaaccttttgtttgtcggcattggatgtttgcgtctgtgtgcgttgatgtctgtatctgtgtctgtatatgcgtctgtggctgtgtgtgcgtatgcaaaactcagttttcaatgtcagcagccgaaaccactagggcccaaaaccaaaccaacacccactttacgcccagttgggtgacttgtttatggacacgcttcaagttcacagaatttaattttgctaacacaaaaagtaacgcacaatgaaaaccaacgagctattaaacaaaataaagcaaattgcacataaattatgcattgttcagaattgaactatagcaataaattacgcacatatcaaatgtaatatatattcagcttttaattggaatgcaattcaaagcaattttttcaccgaaattggtttgcagtcattggagatttattattggcatttttaataataacaattttttcgcacaaaattaaataatgaccaatctattatgtttttgatgttcaataatttattgcgcaaaaatgcatcaattgttgcagcaggaaagataatattgtttcttttttactttagatagtgtggtactaaaatgttttatttaaaatatagcccgagtaaacttgaaaattaatgaattcataagaaattaattaaaattataatgtcaaagaaagatacaaagcgatataactactagttttttttggcccgcaaactttttaattaatatacttaaattctattataaaactgcaataagatagtcattttagacctaccttcgatggacgatcgatttggccgagaaagaaagtgagcagggagatgatgatgaagttaacgccgccggcaaagtccgtcagcttgtccatttggagcacagagttgatcagaaagaagaccaactgcaggctccccaccacgatggcgctaatggcgaagtgatcgtagtccagtacatttacggccattgtgttgcggcgctcggctttcacctttcacccagccagacaggctttcacccaatccgctcgctttgtggacgtgttggcaacaggtcctggtctttgtccacctgacccacctgctcctcctgctcctctggctcctccttccctttgctgttctttaatattgcaaaatgttgtgccttcacatcgcttcatccacacctagccaaaagtcgccttcaaagtgctgtctgtgtgtgccactcccaccgcccacagggctttacatgctgtggtgggtggctcagtggttgggtggctgggtggtgtggatggcgggtggtggtggtctatggcgttggacgcctgccaaggagtcgctgtctgccttttttttggggccgcttgttgattacgtatttatgtgatgattgtttatattggggtcgtctctgcaaagtgcaataaataatgcaatttgtatatgctgtggcagctgcaagttatttgctaaatgaaaacttaattcaatttcccgcgctcagcggcacgcaaataccatctcccggcagccacattttacccctcatccaccagctttttaaacaaatttgagtgaaaccacctcgatatggcaacaatctcaagcctcgtttgtgggaatctgtgtgcattgagccggcaaatcgctggcgaaacggagactagagccatatgctatgctatcttggccaggggtgtaggtatgagaactgtcctgggggggttaaatccacccaaacgcccattacaaataatcagtaatccacactaatgcagatttggaaaatacatcaaattagtttaatgaattaacccatttgcggtggtctgaagtggcaaatcaaaagcctaatcgaattatgaagaagccaagccatcaaatgggcttacccaatgaaatattaaggaatcgatggggcataggcagtgcccccttgaacaaaatcctgcttaagccactggtgctgactttaagtgtctgccgagaaatgttttatatggcacatacttgagctgcctggtttaacttcttgagcctttatttgccccttggtctcgactgcatttgcacagcacttcctttgggcaccctcgactatccaaatatatccacacacacaaacacactgggctcttcacagatccttatttgggcaacattttcagcctgcatgtataattaacaagccgacttggttggttatctaggatgcagtgagccaatctgggcccgcacatatagtggctatagtttatggacgtggaaaaccgcagggcatcgatttttggggtgggagctttacaatggagaagctggggaaaatttactaccgaaggattagctgcggttgcaatgtttttgttttttttttttttttgtgcaactcaattaaatgtacatttttatggattattgcagagatattaattttcaattgatttacttatggcttgtgaataatttacccctttagagtccatttaaattcacttaaaaaagttatgaaactttaacgtgctcaagcgattttccattatttagaagtctggagacgcttttaaaactttactcttgacgggataaacttcacttggaattaatgttaatacttcgcaattaaaaagtttgcctgttcgtttctattaagacattcaattggattttattctgtccggtgctgcttcttaataatttaactcgaaaataaagttcatggcagctgtcggaactttttatcgccaataagttttactaagcgtgtgattatctacattttaaattaacttttacggcatagcaaagtccctgtttgcaaccaaattatggaaagtgcagcattagttctataaaattaaaatggcatttaattgaattcagaattttccactaatgattttttaattgcattggcattgccatttaccaggatgtcctcgtaatttatgcgctgttcgctattgtaattgcaatttgggtaattacttttcggctttgcaatcaagtgtgaaattagcaaatttttggaagcagaagtatttgctttcctcttccctaattgccgatgtcggacacacaaaccaaagccaagctaatcccattcgcgcaaacttgctcgcaagttgcaattctcctgggggcccacaaaagtaggcaatgctttttgtgcctcgcattgttgcaaaagaaatgcatcagcattgcacattcattaaggcaacacccgcggcgcattcaaggcccgaaaaacaaaggcggcaaccgtgttaaactcgtgccacctgcaaggcgaaagaaaggaaaaaaaacacctcagtgtatgcaaatgtgtagtcagtcatctgtgctcttgccacttggcttgcccctcgctgctccttgtcattgttgctgttgtttgtgttactttgagctctcagggcactgagaaaaatacctcttcgaatgaaaaatacatctattcgagcatttcttatgtatgtatatataaggacatttaaatcagctcttagaagtcaatcttttggattgcagttcaaagctttattggcgtgtgcatcagcgacgaggtggcctagtaacccccacttttttgcagtgcacttagcattgcttggcaacgcgtggcagagtcgccggcgttggggaatccaagcggacaggggtcgttcgtagccgcaagacattgacaaggtgtctgccaggctgtcactcacactcaccgcaactcactgcatttgcttgttgttttccctcggctgtgtgttcttagtatcttagagcaagagtgtgtgagtctgtttgtgtgcggcaaagctcaggagtgaatttgcatatgcggcaaggagcaccgaaacccgatttcgcccacattctggcaacaaatagttctttcccaagctgtgcccacttttaaacgcattttcgcgtgctttgcattttttgccagcgtcgtttgccattgttgccaccttcttgtgggcattaaggaatggcaacgatgcacttttccaccacaattgaacaagaaaagccaattccaattggggtttgcggccaataatttgacaaatcgaatccggcgagctatgcaaggatttgtcagcaaacggagaactattttagacttataataataataaaaacagaacattaaacatgttttcaaaaatgggagtgaaagttatataaattttatatcttgcagaggaagtttcttgtttgacgaaagtatttataagcagtggtattaaattctaaagtctgtaaactttaagataagtttattttgcacatcaacaaaaagtgtggaaaagttaagtctgcaaagttatgtatagtaaactctgcttggaaaaatcggctcaaagctaatttcacacctctttccgtgcacttacatgtgctttgcattagagggaaacaaaacagattaaatataaaccttaaactattacaacacgttttcccggtcgagccaagacaattctcgattttccgcgctcaactaccgtttattttgcactgcaagtatttgttttcctgcaatctagtgtgtgtccgtgtgtgtgtgtgtgtgttctcgtgctcttggcactgaaaattgcagccatgtaatggaattggctgcggttcaacggtgcgtatgattaactttatggcagcagcaaagtggaggactaaacaacctccatttagtgagctgcaaattgccctgctgtacgatacaccacttactcggctgcctgtttgccgtttatgctaatcgttgtcatagtttcggaactacaacgttgaccttaaagagtagttattagacatccagcacaaaccacgctttgtgctgaccctattgattgccggcttgctggatgtctctagcaattaatagtgtcaaacattccgtgctggcgaccaaacctaatttaattatacatgtccgaccgcaatttgctgcatccacatgccgttttggcccagtaattgaaaatagaatcacgtttgcacgtttagacaaaaggaatgctttgaggggtaattgtttctttggcaatccttgatctgagattttttgattacgatttaagattcaaatttgctagatattgcgaacaaaaatatttctggcttagactatttggttttagaatgaaccaatttaaatattacgtttatccagcttgaaatttggaactcacagcttcagttgtgcatatagttatgggtaactggcaccaagcaagtgcttctgtgaaattaaagtttgcagagtgatattatctatagaaatgtcctgtccactctgatcccttaatgcttggccataaccaaggattctgcagtgcaattcgacaaaattgttttcccttcggtgcgacgtagtgaaaatgtattaaacttaaatattcataaagtgcaagtcaaagccgggcaattcaataaagccgaatccatattgaattgactgccagcgttgggagatctccataaataaggcattctgttgcaaagattggcactttatgtaatcccagcgaacaaggcgtgggaattgacttaatgtggccagcatggccagcagggcagcatggcagcaccttgaacttcgacagagtttggccaaggactttttcggagggacgctgacgcggacaaggactcaacgggtggtcgcctgaaggaatattgacgttttttcaattaaacccgaccagcaggcactttgtcggtggtatttatggcgctcggttagttctatttttacgagagggcgaacaaacaaatgggtaccagtgtcaatagtgtaactgtagcttttccagctggctaaatatacgcacaaatatacatgtgcgcatatatacgatatatatcccatatcctgtggcagataaataagtcgcattgaagctaagcggaaaaaacacgcgtacacacacgcaccgttgggcgcacatacacatacactctaacatatgtacacacgaagacgcacgcacacacgtgcttagaaaaagagacattagagagtgtctttcgggtaactttgtccgtctttttccgcttttccgcttttctcagcgctaaaacaagtggaaagtcaagcaagttggacacgcgctaagttttacaatttcccgctgaaggtcttgtcgcccccttttccggccccgtccacgccccccgccctcgttcaacactcctgtcgacctgccaaacaactaacgcacatttccgtttccgcttatgccacaaaatggccaaaagtggcctggtgattagttacgatttttttctgtttgtttcctgccgctctaacgcttaatttctctccttgttgccgcgctggctctggtttttattgctttcaatgcctttttttttgcttcttgattgcagacagcatctacgaggcgaaaacaaacagaacggccgccgcgagttttttggccaacggaagggactcgagcaaccgacgcaacagacgactcagggtggactgaaaatcactttctcttctcccgcagcagcagcgcaatttctgcagccagcggagagaaagcctttcgccgtgaagcagtgcgcactgcttgctgcacggtgggcgccagagatttgaaattcttatctggattttcagatttagtacatgaagcaataattgaaattagtttcaaactgatataataaataatgtttgaatatatacatacaatttcataccttctattttttagccttaatttttggcccagggaacttggcatgcttctattataattaaagagttttactgcaatggatatattctaaactataatggttatattaaacaaataacaaagctagcaatttcaaaaacaaaacacttaacagacattttcgttaaatataaatatttgcttggctggaactttcgttaaaactgataggttcgtgcattcgctcagcggtggtaagaacactcgctaaacgtgtgagcagctctgtttgtgttccatctctagttcaacagctgttcaaatcgagtaaatcgtaattgctccttgaattttttttatttttgtgggcaactcctgcattggagtcggcggttgcgtaataacgcgcctcttcctggtttctggctgccacttggagttacagtatggcgttggcgctgcgcgttgcccgatgcgccgcgattccggccaactgttggccccgcgatcgccggcgactgttacacctgtgcagcaggtgagtagttgaccccaattatcagtcagcattaaaattcaattacccagcgccagcgataagaggccaacagctttctgcagcaggaactacgcaacgaagcccgaagcagcggttccaccacaaatcaagcgaaatgtggccgccgagataaccagcgtgggtaaggtcatctacgaaacgggctgggatgccaacaagcccattgaaaagccaaaggtccggcccagcagctcgtcgtccacacag

SEQ ID NO: 13439 - DNA, 1985 bp, DROSOPHILA
tcgtctgttgcgtcggttgctcgagtcccttccgttggccaaaaaactcgcggcggccgttctgtttgttttcgcctcgtagatgctgtctgcaatcaagaagcaaaaaaaaaggcattgaaagcaataaaaaccagagccagcgcggcaacaaggagagaaattaagcgttagagcggcaggaaacaaacagaaaaaaatcgtaactaatcaccaggccacttttggccattttgtggcataagcggaaacggaaatagacgaccccaatataaacaatcatcacataaatacgtaatcaacaagcggccccaaaaaaaaggcagacagcgactccttggcaggcgtccaacgccatagaccaccaccacccgccatccacaccacccagccacccaaccactgagccacccaccacagcatgtaaagccctgtgggcggtgggagtggcacacacagacagcactttgaaggcgacttttggctaggtgtggatgaagcgatgtgaaggcacaacattttgcaatattaaagaacagcaaagggaaggaggagccagaggagcaggaggagcaggtgggtcaggtggacaaagaccaggacctgttgccaacacgtccacaaagcgagcggattgggtgaaagcctgtctggctgggtgaaaggtgaaagccgagcgccgcaacacaatggccgtaaatgtactggactacgatcacttcgccattagcgccatcgtggtggggagcctgcagttggtcttctttctgatcaactctgtgctccaaatggacaagctgacggactttgccggcggcgttaacttcatcatcatctccctgctcactttctttctcggccaaatcgatcgtccatcgaagatcttagttaagaactacagttatgaatttccgttccaggcctacgatagtcgccagctgatggtcacgctcttcgtttgcctgtggggcgctcggctgtccggatatttactatatcgaatcgtaaagttgggtcgcgacaaacagttcgaggatacccgtcgcaacatcatccgctatgcggtcttctggaccttccagccgcgtgccccaaagaccatgaccacactggactccacgggcacgggcatgttcatcgttggcctgctggcggagacctatgcggatctgcagaagttctccttccgccaggatccggccaatcagggcaagttctgcaatgatggactgtggagcgtgtcgcggcatccgaactactttggcgaagtggtcatctggtggggcatctttgccatatccctcaatgtgatcagtggccacgagtgggtggcgattgcctcgcccattttcactacgatgatcattctctttctgtcggggattcccctgcgagaacgaagcgccgatgagaagtacaaagatcaactggagtaccggaagtacaaagcctccacctcgccactgataccagtgcctcctgctgtctacgtggagcagtcagtggcccactccagcagtgcagctggggtgggtcagatgaatgcccatggccattcggtgggtcactccctacaccggggtcagtgctatggagccaatggcggcgatgccgagagccaccagaactgcggcggtagctgccggaacgtgcacgtcaagtcgaatccgtaccagtgcgaggcgggctatggccactatccggtttgccacacggacgacgatacggatgacggaatcatttacatggaccgcacccacttctaccacgaccaggagcaggcgcacgtggtgaaatcggtggcggttcccagtacaaagtgcagctacctggccgaggaggagctggcctccgactacgatgaggatgtgccggccatcgatctcagcaaggccaccagtgtggagagcttaggcacccgggtgcagacggagcatgccgtgaacgccgatgggttgcccgtgacagtgaccacgattttgtga

SEQ ID NO: 13440 - protein, 431 aa, DROSOPHILA
MAVNVLDYDHFAISAIVVGSLQLVFFLINSVLQMDKLTDFAGGVNFIIISLLTFFLGQIDRPSKILVKNYSYEFPFQAYDSRQLMVTLFVCLWGARLSGYLLYRIVKLGRDKQFEDTRRNIIRYAVFWTFQPRAPKTMTTLDSTGTGMFIVGLLAETYADLQKFSFRQDPANQGKFCNDGLWSVSRHPNYFGEVVIWWGIFAISLNVISGHEWVAIASPIFTTMIILFLSGIPLRERSADEKYKDQLEYRKYKASTSPLIPVPPAVYVEQSVAHSSSAAGVGQMNAHGHSVGHSLHRGQCYGANGGDAESHQNCGGSCRNVHVKSNPYQCEAGYGHYPVCHTDDDTDDGIIYMDRTHFYHDQEQAHVVKSVAVPSTKCSYLAEEELASDYDEDVPAIDLSKATSVESLGTRVQTEHAVNADGLPVTVTTIL

SEQ ID NO: 13441 - DNA, 8811 bp, DROSOPHILA
cattctttttatcagattatgtttaaatatccacaattgaaaaaagtgagtgtttcgttattgaacttcatcgtaattagcctcgttagcgaaaaatgaagtctgcaacacttccggtgacttcacaacacgaactttaggaatctcatttagaaaaattcattttaaagttaagtagcttaattgttaagttccggcatcggttttaaattcccttaataagagatcactttactttaagagtcttaccttaaatcgctttagagttgttaacagcaaacggattaaataaaattcgtaaatacgcaacgatttccataatttctaaatgaagtcaaccattgcaaggcccagataatttaacaacacattttaactttttgaataaaaactgccatcgaaatcattgggaaaaaaccacaaaacaattcagaattttaattgcactcataaaccatttaatatgctaaataaagtgacctaatagattatgggttttgactcactaaacttaaatttcaattaggatctggaaaatgctacaaatttatttacttgaaggtttaatttaaaagtgaacaagcaaaaaagttgttttctttatacagcaaagtgtaggcaacaaattgtgtgtttttatgtgctccttaaaatgataagaacagcttaacaaaatcccagcaaacatcttttgtgcagagtatcacgttgcgataagcgcacacttcagaattttccccatctaaaaatataaattaaagttaggtgacaggagtggggaaacctttaaatctgtacaccataattttcgctgaaattaaaaagcttaattaatcttgtgaacataaggttttcctaaatctcatttccattcattttggtttccaaggattctgattgctagaatttttgaaccttaaagaccatttaatgatttcatatctatgtacatgtgtgggaaattttcacagcctgtttcgaatgattattcaacgaggttggatttagaaaaaaaatgtgtgcaaactttttgatttcgatggggaaataaacttttcgattaaagaaggggaaactttttgagttattaaattaatttaacaaatttgtatggaaataaatttgtaaatcgaacttttgtgtggtatccccatggtatgcgaaaaaaaaaattggagctagaagcagttttggcacctgtctgccttgatttccttagaaattcaaaattaatcgtttttttttgcgttttaataatgcgtgattatgcgtccaacgtgatacgttcgcatcgctgcctttgcatttttacggtgctccaattgaccctaatgctctcgatgctggaagttcaaatccaaattgaccaatcgccggagctccagcgacctatgacccgagtgcttttgggggcccaactaggggagcttgcctggagtccattgttttccggttttgccatgggtgccatgttctacggctatggtttgatacacctgcccagcaaaggacccctcgggtgcttcttctccaggctgcgaacagctggcttgtccgtgtggcaacaatgtagtcccgtgatgcttgtgccctggaccttgaaggtggcccagggcctaagcctattcccttgccatttgtgggagtttcttgcgaatgaggtgtgcttagagaccgacaattgtctgcagcacgtcattctggcttttgtactgtggatatacctgctaatcctggccatcactagcttggtctctgttgtgagactcaatcttcagatgctggctgacaggcacattcacagcagagaccacgagctgcgggcctatgtacggggaatcaatgaacttctcggatttgagatgataatggtcaccgaatgagaggtttggggtacctacaagcattttccataaattaaacctctattgtatgggacagtattagaacataacaaattggaaattgtttttatttgatagaagcaatgttatcgtgtacattttataaatgcagtaaacgaaattttaatcaagtttagtttaagcattttgaattgaactgaccgaaggaaaggaaatgtaatttaacatcctggaacttctggtgatttctataaaaattgctttattttttaacacagccttcgggtgaaaccaagtacacataatactgttttgcattgctttgttatgctttacgttggtcctccacaactggcacaacatgaataaattaagcgccatttggcgtggggagaacttcccgagtggcaggatctggtgttattattcactgctcatcgctgactttaattggccctatttacattaggtgacactcggcggactgccacttgccatcgaggatgtgaacaagaatcccaacctattgccgggcaagaagttggctttcaaaccggttgacattggtcacaagatgagcgcctatcgcgttaaaccgttgaggtaattcattcggatgctactattacgttaaataactcctgtatcagttgccatctgtaattttgctcttttccggttgccgttgacgttgccgcttctgtttccgtttccgtttccagggcgatgacacagatgcgggaagctggcgtgaccgcattcattggtcccgacgagagctgcaccacggaggcgctgctggcctccgcatggaacacaccaatgctatccttcgttagtagacccattacttaaatctgggtcaccggtgttcaattcaagagttacaccctttgccctttacttatgaaagactattttgtcacagtttacgaagaatgctcttgcttggaagattgattcacaatttatttgccaattgtcataaaaaaaagtgcaacaaaccaaaagccatataaatttattttcttgtatacaaaatacactacacaactttagagcccagttgcacaaattacatttgttatttaggacacagtttgaatttcttttttgagacttgctgcacatgtatacaatagtaacttttttatattccctagaaatgctccgatccaattgtctcaaacaaaagtacatttcacacctttgctcgaactttagcgccggcttccaaggtaactctctgattaaaacccagctaaatggattattactaaaagaagttacatgttcacaggtctcgaaaagtgttattagtctgctgaacgccttccattggaataaattctccatagtagtcagctcgaaaccgatttggggctcggatgtagcccgtgccattcaggtgagtataatgtgtagaatattccaacttaattacgatttttgaaacaggaattggcggaagccaggaactttaccatcagccactttaaatatatttcggactacataccaaccacaaagaccctttcgcagatcgataaaattattgaggaaacctatgccacaactcgcagtaagttgactttagttgacataacttttgtaataataatataatataatcaaatcctcattacagtctatgtcttcattggtgagcacattgccatggtggactttgtgcgaggactccagaatcgtcggctgctcgagagtggggactatatcgtggtttctgtggacgacgagatctacgactccaatcgaagggtgaacattatggaacgtagtaagtgaactgtgcggattggcagtccgagctagaattctaatgcatgcaccatctattccagattatttagatccttatattagaaaagaaaagagcaaatcgctggacaaaatctcatttcgttcagttataaaaataagcatgacatatccacaaaacccccatattcggtaatttatctgactcttagttatctaactgtgcgtatttttgttgcgtctttctaacaattgttaatcgataattaagctaatagttttttacaaatctcttggagtttttcatttactcaaagtagtgtctaatttaaagcatgggttttgtgtattccaatagaaaaagataaagatgtataatttcattgatttaataagcaattcctatactaaacacattcgagcggatcctatgtgctaatttcccgaaatatgtagagataaatttacgttaatgcgttaatgcatgccaaataaatatttgaaataaattacagaacaacttatttattttttaacatattatgcttgcagcgacatttgctcgaaaataaaagactatgcgcgaaaaactccatttcttgtgccatatcatcaacgtgtctttgacaacatatcggtaggaaaatcggatattatttaaaactccagttttttatgcatgacatcaattattttttaaccatttatttactctctatacgcgtaggttcccatatatggcctacatctttacgacagtgttatgatctatgttcgagctataactgaagttttaagactgggcggtgatatttacgatggaaacttggtaatgagtcacatctttaataggtcctaccattccatacaaggatttgatgtaagtatatcattatctccttattaaccatttagtctaagttaattgtaagccattaaacaatttatactattttctaggtatacatagactctaatggtgatgctgagggtaattacacagtcatcactctgcaaaacgatgtgggcagtggagcatcgataggttctttagccaagatgtcaatgcaaccagttgggttctttgcctacgacaagaactctgttattccagtgagttaacaagaagttaaatagtaactatctaataacaatattacaaccccaaggaatttcgctacataaagaatgatagacccatccagtggctaaatgggcgtcctccgctcgcagaacccctatgtggtttccatggcgaactatgtccccgaaagaaactcgactggcggtacctggtatcaggtccactgtgtgccctcgttgttgtcgtggctattgcactgcttatcaagtataatttcatactttaaataaattaattaatatataaatgtatctattttgaaggcattacaggtatgaacagactctggccggacttttgtggaaagtggacatgaaggatgtcaccgttataaatcttggcgaatacaacaatcccaccaataagaatattgtaggttacatatttataatttttttgttaactcaactatcatgtttaaaaactaatattttagttccaaatctgccgtcaaagcattttagtggttggtgagcccaacaagcggtcctttacaaatataggtaacatggttttagactataataatattactttctaaatctaacctcttgagcagctctatttcgtggcaatattgtggccatgaaaaagattcacaagaagagcgtagacattacccgttcaattcgcaaggaactaaaattgatgcgagaggtagaacgcctaggctgaagaataaatcagataaaatatatgtcaataacttattccttcaggtgcgacatgagaatattatcaacttcattggagcgtccacggatcacggatccgtgatcatcttcaccacttactgtgcacgtggcagtctggaggacgtgctggccaacgaagatttgcacctggaccacatgttcatctcctccctcgtgtccgatatacttaagggaatgatctacctgcacgactcggagattatatcccatggcaatttacggtcgagcaactgccttatcgactcccgttgggtgtgccaaatctcggactttggattgcacgagctgaaagctggccaagaagagcccaacaagtaagtacatttcattctctccggttttattgatcatttgtttgccaccatttagtttacttttggttccaaactactagaaaataaataagtgccacactgccgttctaagctggaaaatcctttcataaaatataaaaaaagtcatcgaactttacttgataatgttttatgacgtttgcaggagtgaactggaactgaaacgtgccctctgcatggcgccggagcttttgagggacgcctaccgaccaggacgcggatcccaaaagggggatgtctattcctttggcattttgctctacgaaatgattggccgcaaaggaccttggggtgacacggcctactcaaaggagggtgagtattaactactacgattatatagatacatcaaatatatatatatataaacacaacatgttgtgctgcagaaataattcagtttgtcaagtgtcctgaaatgctgcagcacggagtattccgacctgcattgacgcacactcacttggacattccggactacatccgtaaatgcctgtgccagtgctgggatgaagatcccgaggtcaggcccgatatccggctggttcgcatgcatttgaaggagcttcaggctggcttgtaagcaccaaatatgtgataaggttatcgttacctaactttataatatctaattccgacattccagaaaacccaacatattcgacaatatgctatcgataatggagaaatatgcttacaatcttgagggtttggttcaggagcgaaccaatttgttgtacgaagagaagaagaaaacagatatgctcctttatcagatgctaccaaggtgattgattcagtagctctttaaaaaatattgcttataattcgatctccttcagacccgtagctgaacttctgaagcgaggagatcctgtcgaggctgagtgcttcgactgtgtcactatattgttcagtgatatagtgggattcaccgaactctgcaccaccagcactccctttgaggtggtggagatgcttaacgattggtacacctgctgcgactccataatatccaattatgatgtctataaggtttgtaaccattggcatttcaatattttgctagaaactcatttccatttcaggttgagacaattggcgatgcctatatggttgtgtctggattgccactgcagaacggaagtcgtcatgctggagagatagcctcactggctctgcatctcttagagactgtgggaaatctgaagattaggcacaagcccaccgaaacagttcaattacgtatcggagttcactctggtccttgtgcagcaggagtggtgggtcagaaggtacgaaagaaggtttattccatcatatatataatatatctaaagtacatcttatacccaaatcagatgcccagatactgcctattcggagacacggtgaacacagcaagtcggatggagagcaccggtgactcgatgagaattcatatatccgaagccacctaccagctgctccaggtgatcggtagctatgtgtgcattgaaaggggtctgaccagcataaaggtatgtttaattacaagacattctttcgttataatcaaataactatataactatagggcaagggcgacatgcgaacctattggctgaccaaacgtcagcaacccgagttaacgccggatctgattagcaccgtggatactttggacacctactgctccgggccacgtgagagcatggaggtctcagtccaccaatattgtagtccggcctcgaataactacagattgggatcctgcaactgtgacaccaagtgtttatatagccgtcgttcggacgacaatgtaactaattcccatggaacatccgagtttccaaaggtcagtgaacccgcgcaggtcaactgcaatcaattatgtgtttgccgattgaacagcagccaaatgtttaataatcgaggtcctcgatcagcgcctagtatcacatttagactataaggactcaattctatatttaacgttaagctccttgatcgatgtaaattactggcgtccattgcggtttatgtgttgccaaattagcaatatctctttaacaatattttacattattattatacaaattccagaaaaatattccatcattttgctgttcaatttgtccgtccagttaaaaagctgagttattcaattatttatattttacatcaaatgaaataggtactcagtttgccgaatggatttttcccaaataacaacatttactaataaaattaattgtaattttatcataacgtgttttgcttcagttaaatatgctaatttttagttatttgaaagttgttcttcagcgcctgccagcattcgtaatatgcggcatccagtttttggcaggtctcctcgccccacttggtaacggccaaacttagagaggattcgaacatgaaggccttcaaggaagtatataactaggttactaagccccattccagactatcaataatccaacccacctgagttccctcggccacgcgttccggcaccagtttggcattcgaggcaccttcaaagcacttgacatctggaccatgtggcgtcatcatggaatggagggtcgctcctcctgccgcaaagccatcctccttggcctcatacttgcccagaattaggcccatgaactcgctcatgcagttccctaaaaataaagatgaccatcagatggaaatgatagtaacttaatatgcacatactgtggtaatagggtggcctgaaggtgtgctcctgcactgaccaacggggtggaaagatcacaaagtctgctatggccgttccagctcgtaagctgggacaagtgagcacggtaaaaatgctggggtcacaatggtcaaagctaaccgagttaatcaccatgaacttggacagatcgtacttgaagggcacatagttaccatgccaagccaccacatcgaagacggtgtgattttgcttggccacgaag

SEQ ID NO: 13442 - DNA, 3458 bp, DROSOPHILA
ggatttagaaaaaaaatatgcgtgattatgcgtccaacgtgatacgttcgcatcgctgcctttgcatttttacggtgctccaattgaccctaatgctctcgatgctggaagttcaaatccaaattgaccaatcgccggagctccagcgacctatgacccgagtgcttttgggggcccaactaggggagcttgcctggagtccattgttttccggttttgccatgggtgccatgttctacggctatggtttgatacacctgcccagcaaaggacccctcgggtgcttcttctccaggctgcgaacagctggcttgtccgtgtggcaacaatgtagtcccgtgatgcttgtgccctggaccttgaaggtggcccagggcctaagcctattcccttgccatttgtgggagtttcttgcgaatgaggtgtgcttagagaccgacaattgtctgcagcacgtcattctggcttttgtactgtggatatacctgctaatcctggccatcactagcttggtctctgttgtgagactcaatcttcagatgctggctgacaggcacattcacagcagagaccacgagctgcgggcctatgtgacactcggcggactgccacttgccatcgaggatgtgaacaagaatcccaacctattgccgggcaagaagttggctttcaaaccggttgacattggtcacaagatgagcgcctatcgcgttaaaccgttgagggcgatgacacagatgcgggaagctggcgtgaccgcattcattggtcccgacgagagctgcaccacggaggcgctgctggcctccgcatggaacacaccaatgctatccttcaaatgctccgatccaattgtctcaaacaaaagtacatttcacacctttgctcgaactttagcgccggcttccaaggtctcgaaaagtgttattagtctgctgaacgccttccattggaataaattctccatagtagtcagctcgaaaccgatttggggctcggatgtagcccgtgccattcaggaattggcggaagccaggaactttaccatcagccactttaaatatatttcggactacataccaaccacaaagaccctttcgcagatcgataaaattattgaggaaacctatgccacaactcgcatctatgtcttcattggtgagcacattgccatggtggactttgtgcgaggactccagaatcgtcggctgctcgagagtggggactatatcgtggtttctgtggacgacgagatctacgactccaatcgaagggtgaacattatggaacgtagtatacatagactctaatggtgatgctgagggtaattacacagtcatcactctgcaaaacgatgtgggcagtggagcatcgataggttctttagccaagatgtcaatgcaaccagttgggttctttgcctacgacaagaactctgttattccagaatttcgctacataaagaatgatagacccatccagtggctaaatgggcgtcctccgctcgcagaacccctatgtggtttccatggcgaactatgtccccgaaagaaactcgactggcggtacctggtatcaggtccactgtgtgccctcgttgttgtcgtggctattgcactgcttatcaagcattacaggtatgaacagactctggccggacttttgtggaaagtggacatgaaggatgtcaccgttataaatcttggcgaatacaacaatcccaccaataagaatattttccaaatctgccgtcaaagcattttagtggttggtgagcccaacaagcggtcctttacaaatatagctctatttcgtggcaatattgtggccatgaaaaagattcacaagaagagcgtagacattacccgttcaattcgcaaggaactaaaattgatgcgagaggtgcgacatgagaatattatcaacttcattggagcgtccacggatcacggatccgtgatcatcttcaccacttactgtgcacgtggcagtctggaggacgtgctggccaacgaagatttgcacctggaccacatgttcatctcctccctcgtgtccgatatacttaagggaatgatctacctgcacgactcggagattatatcccatggcaatttacggtcgagcaactgccttatcgactcccgttgggtgtgccaaatctcggactttggattgcacgagctgaaagctggccaagaagagcccaacaagagtgaactggaactgaaacgtgccctctgcatggcgccggagcttttgagggacgcctaccgaccaggacgcggatcccaaaagggggatgtctattcctttggcattttgctctacgaaatgattggccgcaaaggaccttggggtgacacggcctactcaaaggaggaaataattcagtttgtcaagtgtcctgaaatgctgcagcacggagtattccgacctgcattgacgcacactcacttggacattccggactacatccgtaaatgcctgtgccagtgctgggatgaagatcccgaggtcaggcccgatatccggctggttcgcatgcatttgaaggagcttcaggctggcttaaaacccaacatattcgacaatatgctatcgataatggagaaatatgcttacaatcttgagggtttggttcaggagcgaaccaatttgttgtacgaagagaagaagaaaacagatatgctcctttatcagatgctaccaaggttgagacaattggcgatgcctatatggttgtgtctggattgccactgcagaacggaagtcgtcatgctggagagatagcctcactggctctgcatctcttagagactgtgggaaatctgaagattaggcacaagcccaccgaaacagttcaattacgtatcggagttcactctggtccttgtgcagcaggagtggtgggtcagaagatgcccagatactgcctattcggagacacggtgaacacagcaagtcggatggagagcaccggtgactcgatgagaattcatatatccgaagccacctaccagctgctccaggtgatcggtagctatgtgtgcattgaaaggggtctgaccagcataaagggcaagggcgacatgcgaacctattggctgaccaaacgtcagcaacccgagttaacgccggatctgattagcaccgtggatactttggacacctactgctccgggccacgtgagagcatggaggtctcagtccaccaatattgtagtccggcctcgaataactacagattgggatcctgcaactgtgacaccaagtgtttatatagccgtcgttcggacgacaatgtaactaattcccatggaacatccgagtttccaaaggtcagtgaacccgcgcaggtcaactgcaatcaattatgtgtttgccgattgaacagcagccaaatgtttaataatcgaggtcctcgatcagcgcctagtatcacatttagactataa

SEQ ID NO: 13443 - protein, 430 aa, DROSOPHILA
MRDYASNVIRSHRCLCIFTVLQLTLMLSMLEVQIQIDQSPELQRPMTRVLLGAQLGELAWSPLFSGFAMGAMFYGYGLIHLPSKGPLGCFFSRLRTAGLSVWQQCSPVMLVPWTLKVAQGLSLFPCHLWEFLANEVCLETDNCLQHVILAFVLWIYLLILAITSLVSVVRLNLQMLADRHIHSRDHELRAYVTLGGLPLAIEDVNKNPNLLPGKKLAFKPVDIGHKMSAYRVKPLRAMTQMREAGVTAFIGPDESCTTEALLASAWNTPMLSFKCSDPIVSNKSTFHTFARTLAPASKVSKSVISLLNAFHWNKFSIVVSSKPIWGSDVARAIQELAEARNFTISHFKYISDYIPTTKTLSQIDKIIEETYATTRIYVFIGEHIAMVDFVRGLQNRRLLESGDYIVVSVDDEIYDSNRRVNIMERSIHRL

SEQ ID NO: 13444 - DNA, 5558 bp, DROSOPHILA
tgccaattaggaagcacaacaaacacgctaccgcatgaattgcaccaaactgcatcttcccgttcgctagctttcaattttaaatcattttctaacagtatcctctcgtttacacgtacaactggcaaaaaaaacaaaaaaaaaggaacgggtccagcacttcctctcaatcgaatgaacacatccaccacctacatcagcgctcgtcgaaagccacgagcgacatctttgcgagcggtaagttcaaaacattttagaagattacttaagatatatttacaaaaatacgaagttgtttaattgaatatggaatgtcgaagatcttgccaaagatatttcattttccttcggcaaactattaaaatattaatacatatgtatgttctcctactcgttacgcctctattaaactagaacccattatcgtgcggcgagacgtcaccactgcggtagctgtcatatcaaaaaataaaactgattcaccggtgcgccgatcaggaagctcaggtggaacagaagcaaacataagaagcaccgagttttgagtgcgaatacaacgtgaaccaatcaaccaaagatcgaatacccccattttgttgagtgtatatgtgtgcgtgttttagtccgagtcctttaaattgtattgtaagtgtcaactcaatgtatttttaatgaaagtatattaaaagtaattaattaaaagtatatacaatattcacatgcaagtatttttgatcgtaattagcaagtttccgtaaagcccaaaatgatgcaatgaacaatgaactatctaaactattccacttaaaacgaagcctacttatgagctgcgagctcggattgagaagcgttttaccattaagtttattgcgccagcatccagaaacgtgcaaaagacacctgtatattcgatctaatcatatggctagcttaagtacaaacgggtagaaaaatcacttgactgttcctgttgcaattgcttattcgtcgagcacacccactaccaaatgcggcacttgggctggtcgggattcatgggcgttcctcgggcgcatttgaaggtcctggcaaactcctccgagttcgagagcactccccgcaaacgcatctgtcccgggcaatgagaatcggtgagcgcgtatcgcgatgctgccggcgtataggtctcacaccatagattcccaaacgagatgaagaagagctgctcatgggaatagtgctccaagccgggcaacttggaccgctcccggcccacttccttcacgtaaaggcggtacgcatagaaggcctcccgcattccgccgttgtctgcgatattctcgcccagcgtcagttcgccatcaatctgcattgaaagcatgtattatacataacggaaaattcaaattattcataagcaatgtttccctataattttactaacaaccagtattctactagtatatgaaaccagtgtacatgccatatttactcacatattcatcaatgtctgcgaggtggtagcggctatattgttccacaaagcactcggtgcgattgacatactcgtcaatggtcctatttgaccaccactcgaccatgttccctgcccggtcgaatctcctgccgctgtcgtcgaagccatgtgtgagttcgtggcccaggatggttccaatcgagccgtaattgagcgccctgccgaggacacagagcagcacacgggttatggccattccaggagaggattagtgctaggttcgggtgcgggtgcgtgcctgggtgtctgtttgctcggctatctgtgtgctcagtgctcggtttttagtgcttagtgctattcctgggtgaacttactcgagaccaaggtcgtaaaacgggtattgcagaatggcaatgggcacagctgcaaaagaagatagtgtcaggattaggcactacgcaagtaagtgttgtccacacccattcacagcaccactaaagttcagagagtcgtcaaactgtcttgacttgtttacattactctgtggttaaatttgacactttgacttagtaaacaaaaactaactcaggcaaaaacttcgtataattatgaaaatgaattcaattgttttctaaactttcagtggatttttcttaaagtgcacttactgattgcattcgattgaaacgtatgaaatgcattgacatttgaaggggaagtggcccagccaatgggctctggcttatccatttcgttcagtttgtccatcatctgccagtgcacaaagtccatgaggttctccaggtgggtgctggcattcacctctgccccctcgtaataggcatttaacacgctggcatttcgcagccaagggggaaatccgataaagctcttcatctcagctgacttttgaatggttttccgcttggtagctgcatccatccaagaggtggactttaccaggcgatcgaaggagcgtcgtatatcactaagcatccgctcaactttgggcagcttttccttggtgaagtccgcgtcggccaggacatagctcactgccattccgagcaaactgtttactccatttgcgcagtagagggatctcggcgtgctgccctctgttccaatggccacccgcatatactctgagtggagcaatcgcatcgaactcgatgtgtgcaggaccagctcctcgatggtgctcagaaacaggtatgattcgatatgggaagctggagtgtcgtcaagatactccacaatgttctgcagatacgtaatgtctgcctggctggttattattgtcagattctgggtcatttggatattgccggcgtggcgggtgccctttagaatcaattccatgtaacgaacccagatgggcagtgtcttgggtgctatattcttgtcagtttggttctgcagatcctgcagggtgatgtagacaatgtcatctgccgggttcttcgatggcttggtcatgttttcagcctcctccttgaactgtgattaataattaaatatatttcaattaatttatattacgatgtacctatatacctacctcatgcacttttcttgctactcgaacgccctgtttgaccaactcggtgatgcccagagtggcctcctcctggttaacattcggatccacgtagagcagatacttttcgatcactttccggacgtaatgcagataggcggtcattcccgtgctagtctgcttggctgcctcctcctcctcgctctcccggtcatcctcgctgtcgtcctcatcatcgctgttttgcataaaaatggtcttgcgatgaatcttacggagcattttgtgggagtcgtcgttgttgctaaaggttattcaagttactttagaaattaaacttatttattaagcttatttgttactcacaaaggaaacgccgaatcagtctctggagtccccagggcaatgcggttgatggtgcggttgaaaggatccggaaagacatcgaatcctatgataaggtccatggtgaggtgttgtttaatggaaacaatggactgcagccagttgtatttgacattggctgcctctgtggcatatttggaaccacttcccagggtgagattcaaggcggagggcagaacgggtagtccaaaacgcagcagatagtttatcagcggctccagatcacgcttatccagcagcttcgtatccatgcaggctctgtacatagtcttggccttgcccaccgcttctggttccgatttggtgatattcgagcggaggaactcgcggaccacacgcattatgtgcgcctgacgctcccggaaccaatcgttcgaggtcaccgaatccggacgcggatgctcgttggcccacctgccgcaggtgaattggtaaaagtcctcgcagggatcagtctgctcgtccatcgcatagatgaggctggccgctgtgcggaggcactccttgctacggcaaattgagctggatttcttaactgtcataaagcataagagtgagtttcattttaatttgtactaaaaatattaaataatacgtacggcctaggcttatgactatgattgctatcagcagaataattacaagggccagcagtccgccaagcaccactttgtggtaataactccgacgaaaccttcggaacaatgaccattagaactttacacaatggttaataacaatgaggggagacacttacttggattgtatgccaattaggtttggggatatgggctcgtatggcagctgctttccattcgcactctccgtggccgaattctgtccatgtccattggcagttgcgtttccattgccactgccattggctcgaatcggtgccgaaagaaggctgaggttacctgtaattgggtttcaacaatctttgattacaatgcccatacggagtactaattggtctctggccaagctcaattaaatttgagaaatggatttcaatcgatggcagatacatatgaagatacgttttattaacactaattagtcaaacgttgtcaattgtgtttgtacctccaacacccattccacccaccgcttttcaatgttcgtgtataccctgttatcttgatctggcgcatttttctgtctctgtcgtcataggacaggtgatcctattcctggtggtgtccctaatcgcctggctaatgcatacacctgtcactggcaatgtcctgcgaatgcggacctgcatagactccaaggcgaagacaacaagcgtttgaaactggtgacaacgttcaacgggttcaacggccccaaaacatttcgcgtgtccggcagcagtttaacccattttaaaatattaaatcccattaagctccacgaaccgatctcaaatttgcatgcaaaatagggacagtatagacttatctggtcaaacacctaattcgggtcatttacatgtttgcacacttttataacgaaggatattatcggtgtctataaatatttgttttgcaaacatatagcctttcgtcctttgtcagatgtaatcgataggtagaacataatagtaaaatacaaaattccaaaataataaaaaaaataacctattaataatgtttcgttctctatccgtgctgatgttcaatacttctcaaatagagacaaatctctttggcatggccgacgatgtgtacaataccattgagatcttcaaagaggccgccagtttcgaggccaagattggtagaccctatagaatgatatcgagccttatagactgcttggtcttcatggtggtggctctaatggtggtcggtttcatcatgtacgatcgcattatgctgtttacaaaactggctaagatcaatcagagatataaccaagaggtgactgtaaaagcaaaaagaattcgaaagcccaaaacatccgattctctcccagaagaagatgataccgaaaatgctgtggatcaggcagaagaagacggtatcagcgtggcacattccgaatatgcaacagatgacgatgtcgcaacccttcaacccattgacgatgaagatacaattaaagtcgcaatgttcggaactcccaattgggcctttaaatggctagccactataagaaacgaaagtt

SEQ ID NO: 13445 - DNA, 2619 bp, DROSOPHILA
atgcgccagatcaagataacagggtatacacgaacattgaaaagcggtaacctcagccttctttcggcaccgattcgagccaatggcagtggcaatggaaacgcaactgccaatggacatggacagaattcggccacggagagtgcgaatggaaagcagctgccatacgagcccatatccccaaacctaattggcatacaatccaacaaggagtgcctccgcacagcggccagcctcatctatgcgatggacgagcagactgatccctgcgaggacttttaccaattcacctgcggcaggtgggccaacgagcatccgcgtccggattcggtgacctcgaacgattggttccgggagcgtcaggcgcacataatgcgtgtggtccgcgagttcctccgctcgaatatcaccaaatcggaaccagaagcggtgggcaaggccaagactatgtacagagcctgcatggatacgaagctgctggataagcgtgatctggagccgctgataaactatctgctgcgttttggactacccgttctgccctccgccttgaatctcaccctgggaagtggttccaaatatgccacagaggcagccaatgtcaaatacaactggctgcagtccattgtttccattaaacaacacctcaccatggaccttatcataggattcgatgtctttccggatcctttcaaccgcaccatcaaccgcattgccctggggactccagagactgattcggcgtttcctttcaacaacgacgactcccacaaaatgctccgtaagattcatcgcaagaccatttttatgcaaaacagcgatgatgaggacgacagcgaggatgaccgggagagcgaggaggaggaggcagccaagcagactagcacgggaatgaccgcctatctgcattacgtccggaaagtgatcgaaaagtatctgctctacgtggatccgaatgttaaccaggaggaggccactctgggcatcaccgagttggtcaaacagggcgttcgagtagcaagaaaagtgcatgagttcaaggaggaggctgaaaacatgaccaagccatcgaagaacccggcagatgacattgtctacatcaccctgcaggatctgcagaaccaaactgacaagaatatagcacccaagacactgcccatctgggttcgttacatggaattgattctaaagggcacccgccacgccggcaatatccaaatgacccagaatctgacaataataaccagccaggcagacattacgtatctgcagaacattgtggagtatcttgacgacactccagcttcccatatcgaatcatacctgtttctgagcaccatcgaggagctggtcctgcacacatcgagttcgatgcgattgctccactcagagtatatgcgggtggccattggaacagagggcagcacgccgagatccctctactgcgcaaatggagtaaacagtttgctcggaatggcagtgagctatgtcctggccgacgcggacttcaccaaggaaaagctgcccaaagttgagcggatgcttagtgatatacgacgctccttcgatcgcctggtaaagtccacctcttggatggatgcagctaccaagcggaaaaccattcaaaagtcagctgagatgaagagctttatcggatttcccccttggctgcgaaatgccagcgtgttaaatgcctattacgagggggcagaggtgaatgccagcacccacctggagaacctcatggactttgtgcactggcagatgatggacaaactgaacgaaatggataagccagagcccattggctgggccacttccccttcaaatgtcaatgcatttcatacgtttcaatcgaatgcaatcactgtgcccattgccattctgcaatacccgttttacgaccttggtctcgagtaagttcacccaggaatagcactaagcactaaaaaccgagcactgagcacacagatagccgagcaaacagacacccaggcacgcacccgcacccgaacctagcactaatcctctcctggaatggccataacccgtgtgctgctctgtgtcctcggcagggcgctcaattacggctcgattggaaccatcctgggccacgaactcacacatggcttcgacgacagcggcaggagattcgaccgggcagggaacatggtcgagtggtggtcaaataggaccattgacgagtatgtcaatcgcaccgagtgctttgtggaacaatatagccgctaccacctcgcagacattgatgaatatattgatggcgaactgacgctgggcgagaatatcgcagacaacggcggaatgcgggaggccttctatgcgtaccgcctttacgtgaaggaagtgggccgggagcggtccaagttgcccggcttggagcactattcccatgagcagctcttcttcatctcgtttgggaatctatggtgtgagacctatacgccggcagcatcgcgatacgcgctcaccgattctcattgcccgggacagatgcgtttgcggggagtgctctcgaactcggaggagtttgccaggaccttcaaatgcgcccgaggaacgcccatgaatcccgaccagcccaagtgccgcatttggtag

SEQ ID NO: 13446 - protein, 639 aa, DROSOPHILA
MRQIKITGYTRTLKSGNLSLLSAPIRANGSGNGNATANGHGQNSATESANGKQLPYEPISPNLIGIQSNKECLRTAASLIYAMDEQTDPCEDFYQFTCGRWANEHPRPDSVTSNDWFRERQAHIMRVVREFLRSNITKSEPEAVGKAKTMYRACMDTKLLDKRDLEPLINYLLRFGLPVLPSALNLTLGSGSKYATEAANVKYNWLQSIVSIKQHLTMDLIIGFDVFPDPFNRTINRIALGTPETDSAFPFNNDDSHKMLRKIHRKTIFMQNSDDEDDSEDDRESEEEEAAKQTSTGMTAYLHYVRKVIEKYLLYVDPNVNQEEATLGITELVKQGVRVARKVHEFKEEAENMTKPSKNPADDIVYITLQDLQNQTDKNIAPKTLPIWVRYMELILKGTRHAGNIQMTQNLTIITSQADITYLQNIVEYLDDTPASHIESYLFLSTIEELVLHTSSSMRLLHSEYMRVAIGTEGSTPRSLYCANGVNSLLGMAVSYVLADADFTKEKLPKVERMLSDIRRSFDRLVKSTSWMDAATKRKTIQKSAEMKSFIGFPPWLRNASVLNAYYEGAEVNASTHLENLMDFVHWQMMDKLNEMDKPEPIGWATSPSNVNAFHTFQSNAITVPIAILQYPFYDLGLE

SEQ ID NO: 13447 - DNA, 3251 bp, DROSOPHILA
cccaggacaataacttctgcaatccctcgaagccagtcagcctagagtctttggaaaacatgatggctgccatatatgctgctcacagcttcgtctcgctgcgcctaggcgatcatgtgaccgcgctcgagatgtcggaaaaactgctggcctgtgaacgcttgtccgatgcacacaagtacaatacagtttctatttaatcttcccatgtttggtttaacatatttacctttttttcttcagattgctaggtcacatgtacgctggcgaggcgttgatgcttatggacaaggccagcgaggcacgcgaccatttggaccctacttttgtgggcacactaaacgccttcgattttgagacgcgtgactggcaactgaagtcggtggacgccgctcagaacgttgtgcggtataatctggccgttgccatggctctacagaacgacctgcctcaagctaaagcactcctggccaatttaactcattcgctggttgccaacaaggcgcttgctttgcgacgcttcatggacctcaaaatgggtcccgttcctggcgggacgccgagttagacaacaaattgtgtatataactagacggaattaaagtgcaagaatgaaatgacgaggaagcgaactatttgtttgacgatcatcagtttttcagcattttacagggtgcaaacaaggtgtataaaacaatgtctgttaactaatccatatgtgcttatatatttgtacacagagaattggtgttggcaatagcaaattatctcacaatattttacgttgaacttttgcatactccagtcattgagactttttcataggaattctacaaattagattaccctctacgttaaagcgttggacacttaaattttaagtatctatctcaggaattttaaaagttgggtcagaattattttgacttgtgcaagttactcttactcgaaatgccgtataaaacgcttgtcattctgagtgtctgtactcaaatagtcaatggaataacttctgtaagtgctttttagtcgataattatagctataggcaagtgctacgctctcttttccaaggccgaaatcatagcctcgcacaactatccggtggaaattcacacagtggtcacacgagatgggtatttactcaacgcgttccgcataccgaactcaatctattgcgagcaatctggaacaaagccggcggttctcttccagcacggaatgaccgcctcctcggatgttttcctagtgaatggacctcgggatgcattgccattcatgttggccgacgcctgctttgacgtttggctgagtaactcgcggggcactcggtattcccgacgccacgtgtctttggatccctccgatgaggacttctggcgcttcagctggcacgagattggaacggaggacgtggccgctttcattgactacattctgggcaccacaaatcaaagtgcggtgcactacgtgggtcactcacagggatgcaccacgctggtggtgctactcagcatgcgtccggagtataaccagtttgtgaagaccgcaatcctcttaggtccgcccgtctttatggggcacacacacacgctgggacaaatttttctcaggacgctcataatgtctatgcccgactgcgaatttatgttccacaaccggattttgaataaaatactgaggagaatttgtgggcttttcgttgtgagggtgtactgttcgaccttttttatgatcgtcaacggaaaattttcagatcacttgaacacagtgagtatcaaagtcgaatggtcaaaatatatattgtatttattctgaacattaacatttccagagtgcgattcctctgattgccgccacgcttccagcgggagtttcttcccgccagcccaagcacttcatccagctcacggacagcggcaggttcagaccattcgatttcgggatcctgaggaacttgatcaactacaggagcctcacacctcccgactacccgctacataacgtccgccccctgacgccagtccacatattttatagcgatgatgacctatccgccgcaaaggaggatgttgaaaacttcgccaccagtttgccggaggcggtgatgcatcggatctccacgccgtcctggcaccacatggacttcgtgcactctatgaccgtcgctaatgtgattaacaagccggtcattgaaatttttaaaaggtttgagcaacctatcgactgtaaaggaagtctataataaataatatcgagtaccagcccgccattatcgactacgtccggtcttttacggaagagtaggttttctttcatgtacaacatctttcacttaatgataagctgtaaaatgctgcattacctagagagttccccacaaaattttacgttaaagcgttacatattgatttttttttgatgaaatgtataaatgagattagatctaacgttaaaccgataaatattattcatatatcagcgtttttttcacttattcctcctcgatatgtcgtacaaagcgtttgtcttcttttgtctctatattgaccttgccaagggactaattacagtaagcacacgcatcattagtcgtagttcatgtcttttaaatcctcctatcaaagtccgaaattatagcctcgcacaactatccggtagaagtacacacagtgctcacacgagatgggtatttactcgacgcgttccggataccgggctctaaattttgtcagcaatctggaccaaagccggcggttctctttcagcacggaatgtccgcgtcctcggacgttttcctgctaaacggacctcaggattcattggcattcatgttggccgacgcctgcttcgatgtgtggctgagtaactcaaggggcactcggtattcccgacgccacgtgtctttggatccctctgatgaggccttctggcgcttcagctggcacgagattggaacggaggacgtggccgctttcatagactacattctggacaccacgaagcagagagcgttgcacttcttgggtcactcgcagggatgcaccacgctggtggtgctcctcagcatgcgaccggagtacaacaagttggtcaagaccgcagtcctattagctccggctgtctttatgcgccacacaagcaccctttcgcagaccgtcttcaggagtttcataatggccatgcccgacaaggagttcatgtaccacaacggagttttaaacaaactcttgagtaatgtatgcgggcta

SEQ ID NO: 13448 - DNA, 1187 bp, DROSOPHILA
atggaataacttctgtaagtgctttttagtcgataattatagctataggcaagtgctacgctctcttttccaaggccgaaatcatagcctcgcacaactatccggtggaaattcacacagtggtcacacgagatgggtatttactcaacgcgttccgcataccgaactcaatctattgcgagcaatctggaacaaagccggcggttctcttccagcacggaatgaccgcctcctcggatgttttcctagtgaatggacctcgggatgcattgccattcatgttggccgacgcctgctttgacgtttggctgagtaactcgcggggcactcggtattcccgacgccacgtgtctttggatccctccgatgaggacttctggcgcttcagctggcacgagattggaacggaggacgtggccgctttcattgactacattctgggcaccacaaatcaaagtgcggtgcactacgtgggtcactcacagggatgcaccacgctggtggtgctactcagcatgcgtccggagtataaccagtttgtgaagaccgcaatcctcttaggtccgcccgtctttatggggcacacacacacgctgggacaaatttttctcaggacgctcataatgtctatgcccgactgcgaatttatgttccacaaccggattttgaataaaatactgaggagaatttgtgggcttttcgttgtgagggtgtactgttcgaccttttttatgatcgtcaacggaaaattttcagatcacttgaacacaagtgcgattcctctgattgccgccacgcttccagcgggagtttcttcccgccagcccaagcacttcatccagctcacggacagcggcaggttcagaccattcgatttcgggatcctgaggaacttgatcaactacaggagcctcacacctcccgactacccgctacataacgtccgccccctgacgccagtccacatattttatagcgatgatgacctatccgccgcaaaggaggatgttgaaaacttcgccaccagtttgccggaggcggtgatgcatcggatctccacgccgtcctggcaccacatggacttcgtgcactctatgaccgtcgctaatgtgattaacaagccggtcattgaaatttttaaaaggtttgagcaacctatcgactgtaaaggaagtctataataaata

SEQ ID NO: 13449 - protein, 319 aa, DROSOPHILA
MTASSDVFLVNGPRDALPFMLADACFDVWLSNSRGTRYSRRHVSLDPSDEDFWRFSWHEIGTEDVAAFIDYILGTTNQSAVHYVGHSQGCTTLVVLLSMRPEYNQFVKTAILLGPPVFMGHTHTLGQIFLRTLIMSMPDCEFMFHNRILNKILRRICGLFVVRVYCSTFFMIVNGKFSDHLNTSAIPLIAATLPAGVSSRQPKHFIQLTDSGRFRPFDFGILRNLINYRSLTPPDYPLHNVRPLTPVHIFYSDDDLSAAKEDVENFATSLPEAVMHRISTPSWHHMDFVHSMTVANVINKPVIEIFKRFEQPIDCKGSL

SEQ ID NO: 13450 - DNA, 2678 bp, DROSOPHILA
aaatcgaagctgtcgaagaagttcggtctgttggctaataaaaagtcggcactctcgtcgacataatcgccatttacgtcgggattgagttcctggagaagttgcatgcaagccaatgctttagatttgcccagatagctggaatcgaggaagaaactacggaaaaagtgactttataatggtggtcagggaatgtgtgatggtctaccgacttgttgcccagatcctcctccttgacggtgctgccatcggccacagtgaagcctccgataccgggtagcaccagtcccttggcagtttcacagccgacggccgtaacattcaccaaacatactgtggctgcctccaatagcgtctgtccatgctctccccacagcctaaataggtgtcatcagtgctatgcttccgaatttatcaattaaaacgctcctcacctgatttgtctgtcgtatttcttgcttttatccgaaagctctggcgatttgggggctggcgaggacatttcactagatttttgtgcaataataagccggttgcaaataatccagtactgtaaagcgccggcagccaatacttctgacacaatttgtttattgggtggagtgttggaaaaaacacgttggtaattttaactgttgcttatttaaaacatttattgactattacgtattacatttcatttaattttattgcattaaactacatctacgtacaagcaatcagtctttacaaataaaatgtataaacagttgagaaattaaaaagtgaaagtctgagcaaaccaaataaagtgtctggttgacagtttttgaatagcattccatggctatggttttgggtgagttttaatattgattttcaacatgcaattaatttaattaaataataccgctaactgtttgttggctgggcagtgtaggcagcgcattttgcaacactgggagggctaatgaacagctgttttatcgtgtaatttcacaacaaaacaacgcatacatcgctgtgttttcttctgcatttccgtccgattgcgatccaatttgaactaaataaatatcagtattatcacggagataatgccggccaaaaagagaactgccgcgtcgaccagcaaaaatagcgattcgccattaagtccgcacacagacgatccagcgtacaaagaaaaaagaaagaaaaacaatgaggtaagtttaagagttttggatgtaaacagagagcaaagattgggaaacatgttgctgtggcgccgtggcccccagaagtccccaaaaatagatgcccactattgatttattactattctcggaacaggctgttcagcgcacacgcgaaaagaccaagaaatcggccgaggaacgtaagaaacgcatcgatgatttgaggaagcaaaacgatgctcttaaggttcagatcgagacgagtgaaaaacatatatctacgcttagagatctgatcattcagggtgagaaaacggaggacggccatcgaatcatccaggagattctcgctgaaccagatcccgatcccaaggacaatgactaacgaggagcttctcctgatttaccttcttatattttcatacttttaagccatttcccatggttgttaaccatgtgtatcatcttagtttttcgattaaaatggtgcaattgctcgaattctattacaaagacaagcactcatgcagacgagaacagtgtttgttaaaatcctacataaatggttttcattattggtgagtttttatcatttctcaccaaatacttgtttttgttgtacttttcttttacttttgtttatattgtaacacttaatcactgtatccatgttgcactgaatctaaattttaaaattatctatatttagtaatagtgatttctattattttcgacatgattcatacagctaaaatcatgcgagtcttgaatcaaataaagtgtctattatgattttacccatatcagtgttattttatacccaatacttcagctgtttacaactactactactattattatttccttgaaagttgatgaactcattaatcagaaatacaacccagattccatcatatacatatgttctacgtttaagtagaacttccggcaaattagatactaaccgtcgtaaacgtccaatttctccatgtgtaggctaaagacctcgtccattttccgagatatgaacatatgaactaaaactatagctattgagaaagtgtcgttgtgccgataggtttttggtttcgggtgtcccgttaggtcttgctctctttgcttttgttgtgggcgctccttccgtcttcttctttcaaacactcacaaaaacattgatttactgcacttttcgcacattcatttgatgcacaactcgacggcgatttgatttggcgggtggttggtttcgtgtcgaaatggaagttggattgtggggcttttttcgcgttcaataaattgccgtcttccgctaattagcaccacccgcacactgattccgattcaatatcaatttgaagttgctcacatggcacgaggcgaaataaactgaaatgtgttttcagtttttacagcgttgctttgttgtatttggctggtcggcagctgaacgtgtatttccttattttttatttataatttcacgtaactttattttggttgttttggccgctctcgctc

SEQ ID NO: 13451 - DNA, 551 bp, DROSOPHILA
ctgtgttttcttctgcatttccgtccgattgcgatccaatttgaactaaataaatatcagtattatcacggagataatgccggccaaaaagagaactgccgcgtcgaccagcaaaaatagcgattcgccattaagtccgcacacagacgatccagcgtacaaagaaaaaagaaagaaaaacaatgaggctgttcagcgcacacgcgaaaagaccaagaaatcggccgaggaacgtaagaaacgcatcgatgatttgaggaagcaaaacgatgctcttaaggttcagatcgagacgagtgaaaaacatatatctacgcttagagatctgatcattcagggtgagaaaacggaggacggccatcgaatcatccaggagattctcgctgaaccagatcccgatcccaaggacaatgactaacgaggagcttctcctgatttaccttcttatattttcatacttttaagccatttcccatggttgttaaccatgtgtatcatcttagtttttcgattaaaatggtgcaattgctcgaattctattacaaagacaa

SEQ ID NO: 13452 - protein, 113 aa, DROSOPHILA
MPAKKRTAASTSKNSDSPLSPHTDDPAYKEKRKKNNEAVQRTREKTKKSAEERKKRIDDLRKQNDALKVQIETSEKHISTLRDLIIQGEKTEDGHRIIQEILAEPDPDPKDND

SEQ ID NO: 13453 - DNA, 7980 bp, DROSOPHILA
aactatccgcaagcgacaacaataataataaaaagcgctggcaaaaacagcgatcttgagcggagtgttaataatattttgttcaatgaaaagccgtgtggttgttgctattgtttatagttttgttgtggctttttaagcacgactcgcttatgttcttcacgcacacacacaaatgcgccagtcgacacgcattgagagctgcatacaaattatacagccagaagcttttatttttatattattttattcgtagccatgacagtgtgagaaggtcaccgctcacacatacacgcgcttagaaactgaacgcacaccacaataacaataacaatgcaaaaaagctaatcgcaacagcaacaacagctcacacatatttacgcagtcaatagaaatagacaaaagtcaaagaagccggcgcatttcgctctcccttgccacctgtctctgtcacgcgctgcagctgtctctgtcccgcattctctgcaactaacgcattttgcatagctttactatagtctatatagcaaaagctcctccataatttgcaggcctcaaaagctttcatgttttttttttaagtgcgaattcgaattctatgcagaaatgggcgttcggaagtggggtgttccgggaaatgtaaattgtagattattatctttattactaaataaataaaataatatcgattgaaaaaatgatcgttctttgttcttcctaatgggtttttaagaaaattggtattaggttttaaaaattcagaaaactcgagaagtaaaatgcaaataaagcggtctgtaaaattgatgatctccggcgaaaatatgtagttattgggaacaaccgcagcagcagattatcttggcctctgccttcgagacagtcgtcaaccggtttgtcaatgtctcgcgcgttttttaaacaattcaaacttatgcagcgaatttgtgtttatttcatatttattgattggcttctggccgtgtggtttcttcttcgattctacttgcagaggccgcacagcaagccgacatagggcgacattggctgattgacaattcggctgattggggcaatcggaaattgggagccatttccacggaatccacttgtcttcggggcaccgcccaccgacgcccaccgccgcccgcccccaaatgccccagcgcaccttcaaacaccataaatgcgtgccaaaagcagcaaactgggaactaatgcaaatttggtcaatgccatcgatatcgatgctaatggcaataaaactttatacatctatcgcattcgctgtaagataaaatcggccaagtcggcaaactgtgagactgcttccccgaactccatcatttacctgtgacaagtgcggcggccacaaaagaccaaaataattaactaaactatataaaatgcgcccgagtgcgcggccaagcaaatacaacaacatcgagtggcacgtcaatgtgcaacaagtgaagcaacccagaaatgcagaaaaacacttttagataactttacactgccttacggttaacataaatcgttaatattaacttacaaattacgcgtagttcaatatacaaactatacaacaagcaaaaaacaatcaaaatttatatatttacaacaacaacgaaaccttttacaaataagtgaaaaaacaagaaaaaaacattcagcaacgtcgaggatcgtcagcgaacaacgacaacaaaaagcgaaaggtgagaatgaaaaaccctaaataatatattttttaaggggtaccatagcgtaaaatgtctcataaatcatttccatttattttcaaaaagactaaacattttcactattcttttggtgtaggagatttttgtaatatgcctgctttaatgacccattcaaatttcatctacaaataaagatatttaagtataaataaatcattatcattataattgttattattattaaaagtgattgggatgcatttgtggtttacacccaaattccagtatggaaacggtcgccttaaggtcaccacacccagggaaaactggaaagctttcaactttcgcgaaagaaccccgttgtggagagcactcgatcagccggcgactggggatggggcgcattggggagcactgagtaccgctcactggtcagtcggcgatcgtcagttgtcgatcggcgcacccaaatcgggaattctcattgccagctagtcgctggggaaaccaggaagtgaatgcgggctgcacagtgtagattctcggctaagtacacatgcccagccgttttaacttagcatttctatgcaatctcgcttgccgattgccgcgctaatcagagattgcgtatacgcactgtggcactgtgattactcgccaagctaaagaggcatgaagaaaagcaatgggagggtggtgaagggggggggggaagggtggtggattcaacgccaaccgatattttgcataaatgttgaggagcttgggccaaatgtctaattatgatttggcccgcggggaacggcgaacagtaaacggcaaatggccaacttggcgccagctgaagctaaaaacaaggctggacgttttccattggcttttcctttcgcgcttcttgtttgttgttgttgttgttgcgcagctctttcgagttttctttcgctttttcttttcgcctgaacttgcagtttggctggaaagtgaaatagttgcagccgcccgagtcgcttgtattgaataatgaaaaacgagttttccgccgcgcatgcgcatcataatggcaataccaacagcaaaagcaacaacaacaacaacagcaacagctaagctgtggaaaacccgaagaggccgaaagaaaagtggcgataggtagggagaaagagaaatgatgatgacgcgggtgccaggcagcgcaatgttgtaatgtctgtgctgcaagttgaatgtgttgcactgcggccattgatgttgctgccgtttctaatgctcataatgctgatgctgctgcatgttgcatgttgcgtgtgtttgttgctcgtgtgccgcacacaaagttgctattgtttttgttctttcgacttctaatgctaatatctacatgatatactgcttctgcaaagatgtttaatgctttcctttatttattgcttgtatagcagatgtaatttcttttataaaatgctatggattcagatgaatttattagagttttgtaattgggttgttattatttctttcggctctttactcctcctatttagtaagtctcgtatctcttagcttctttcagttcggatagtttattttcacttagtatagactaaagaatttgtttaaggtaacatttataataatgttattctcattttgcttagttatatgtaatatgtaataacagtcatatttaacagctgagataataaacgaaagatctgtttttttgttattgataatagtagatatcttatttgttcccactttttgtgctttatttagtcgtaaactaatgatgtacaaatgttttgaagttgaaacaatgtttctacatattcttaatgccattttgtatagtcaatgtatagagaactgtatttaagatccttactttcttttctaaatcagacccttgcttaagtttaattatatattttttataaaatctagtgacttagctgaaggtctttaaaactaattgccgatactgctccttgtctgaagttattaaaataagattgcaagtctattgttacttttttacggctgcatgtttaagtatagcagatgttgttgtttctccagtctcctattttataatatgtttttttttcagctaacgcttgcacctaaagctgaaaatgttgttgttgttgttgttggcgagtgctttcaagtttgctgcagttttattttttcctatgcgcatttttctcttcgtattccgcctcgtttgcttcgtagttcaatgttaacgaactttttgcgccgtgaatgcagattgttgttgcaatctgcagttgcagttgcagttgctgttgttgttgttgttgcaaatggtgctgttggtgttgctgttgtttttggactttcacttgtaatgaatttggcgagtgcaaaacttgttgttgctccatgctgttgttgttgttgttgccgcagttcagtaacatgttatgtaaaaagcgtttttccagctttgcttctattttcgtttttctcctgcttttttgcacacttttttttttttttgattatttgtatgcagttttcagttttagcttgccacaaaatttgtgccgcacgtcttgccccgccgccgtggatgcaacttgccccgatcgccgagttttctttccgctcttgcttttatgttgtaattcgcaatttctaatgttattgaactttaaacacaaacacaatcgcaaaaccgaaaaaaaagttgcggcgcgcggaggaaaactttgattcagaggaaaattagttataaccggaagccacaaggcaaaaattgaaacaatgcaacgagacgactttctatattttcatccccttctcgccttttaactatgtatatatgtcggtatatatatatatatatattgcctgcagatcggatcggctatgtataaatgtaaatattttaatggatgcccaatgatgcggcattgttgggatgcagatgcaaattgagatgggccggaatttccccaagaaagcaagttccctgtgcaattaaaacgccttgattttagataagttggtgcgaaattgaaaagaagggagttgagcatttgataaatgtattatgaacagctgatgtttgaaataattgcatgagcactcaatgtataatgttatttaatgaataagaaaaggttttgaaggtttacagatttgatgttgttttctattattatgtattttattactattacttatgtatgcctttacttattgaaattctctcttcttttttcagactccaaaaccaagccaaaataatattaaaattaaaaatatatatacaagaggattttaatatccctacactgttaagtgcgtcgaagaactaacaacttttacacatccacaaggaacctagtatcttcacttttcgtgtgatctaataaacagatgcgaagtcaaaactctatacaaattttgaagaaccaaaccaaaaccgtcttaaataaagtgcctaaaacaacattttcacacgaatcttatgagaaaattgtaaagcgaacggagatcgaaattttataccaagtgtgataggtatacaaatcgaggtattgcaagttcgtatcgagcagtgtttccgcagcgaaactagaaaactagtggacactagataccctttcctggtttgagacgcgaggaataccctggacctgggtggcatcaagattgagcagaactttcgcgactggcaggggtattcaggaaacggctacacgctggcagttaacagtgtttgcagtgcaggctttgccctatcagcgatgccctttatcgacgatgcactgctctggtgtccagataacgatggtcgtcttgttggaggtctagacttgggaacatgcatagccgtaagtacaaggacatatgtaccttaggaaatttaaatcgtcgatagaaatagaaagagatacttttatacctatgaagtggacatggacccttaatgatttttatataatatgtacttccaattaaattttacatgtgccaagctattaaacaacatttatgactcgtaatgagcaggacatcaagaatttgaaaggtggtggtttttgaaagcatttttgttgcatacttttagagtagacaattttactttattccttcgcttctaagactgatttcattctttagaaaaagatatatataacattttttaaagtttttgttaatataaatatataattttattcaaaggatgattctacggctaacggaacggaaaacttgaacccctcgatccaatcagctggcaatccgaacaacccgcagcagagcgtcggtggcgagatcctgggatccgtggagtccgccggcaacgaactgaatggagcggcggcccgcaacgtgaacgtggtggtggaaccgctctgcggcggcgactcctccgacgagctgttccgcagcttctccgagagcaacttcgagatcgagagcctgctgtccgatttggccaccgtcgaggtgaaagtcgaaaatgtacatccgccaagaacagaacagagaagtttacaaactgtcataatacatttctacatatatatactacatatccatatcatatttagacccacagattctatatggaattttcatcattgttttgttttccctctctgttttccgctcatctctccccccccccccacaccgctgaaacaactcctgctcctcccgctgcaaccaactgtttcccaggaggagaacaacaacaatgtcatcaccgatgatgacttcgccagcgtcgctgccgccgtggtggccaacgatgatctgctagccaaagagaatgcccagctgagtgcccagggtctggtcgattcggtggccgccagtctggccgattccggcgatgccggtggtcagcaggcgctactggccttcggctcttccagctcggcagcctcggcgattgcagcagcagctgccgccctctgtggcgatttgatcaacaacaacaacaacaacagcaacagcaacaacaacagcaatggcaatggcaatcacggcggcgggggaggaggagctagttccggcggcggagtagccggcgactgtgccaccaagctggagtacgccctcatgggcggacagccgctggcggaggagccgcgcttcgtgaccagcgccgccgccaatccccttctcgtcgagaagctaatgtccaagtgcctgaacattgagaagcgaatggacaagctcagcggtaagtcgacgattttattacctttatgcaaaacgaaaaactaaaatttaacgagtacattaaagagtattttcaaaaatctacgtgagcacaacaaaattgatccaagagtaaacaattcaattccaaatagatgtttgattatttaaattggctcaaataagattgcttggataaaatgtttcaagatattttcaagtctatattttaaatttggcgccattgcaatttggcgctgccactattttcaaactttggtagtgaagccacttagttatttcgacgttatttttacatgaacaatttacaactcaaacataaaatggtggcgccatctacagctagtacgttgtaactattatgataattgggtatatctacatgtagctgacatgaatcttacatgtatcttacattaatttacataaaaaagctaaacgaccggagtacagttttagatgcattgaacacatgctgaaagttttaggttcattaaaagctcaagtatattgtgtgctcgctaaaaagctttaaaagctcttgctttcaaattaatttaaaatttggtttctaagaattctactatatcgaatttataaagaagggaatgtttttgatttaacaatatatattaatatataagggacagagttgaaaatggtacatagattaatgtgtggaagcatattgcaacaaattcaatgctttaatacacgacctaaactttaaggtctgaaaattttcattatgaaaatatgtatttcaactaattgaatttcccatctggccgtattaaaactcgtcctccagagaccgaaactgtcagccaaacaagtgcccgaaataaataaaaaggccagtaacttgtttattaaatcccgacaggatgtcctcctcgcaaggcgccgccccccaacggccacccaaaaacagtcaaccacctaacgactgagccaccgtgccactcaaccactcaaagtcgcagactaaaatataaatgtcgacgctcgggttgttgtctcgtcgttgtcgacgtcgtcgtac

SEQ ID NO: 13454 - DNA, 2168 bp, DROSOPHILA
ttctacttgcagaggccgcacagcaagccgacatagggcgacattggctgattgacaattcggctgattggggcaatcggaaattgggagccatttccacggaatccacttgtcttcggggcaccgcccaccgacgcccaccgccgcccgcccccaaatgccccagcgcaccttcaaacaccataaatgcgtgccaaaagcagcaaactgggaactaatgcaaatttggtcaatgccatcgatatcgatgctaatggcaataaaactttatacatctatcgcattcgctgtaagataaaatcggccaagtcggcaaactgtgagactgcttccccgaactccatcatttacctgtgacaagtgcggcggccacaaaagaccaaaataattaactaaactatataaaatgcgcccgagtgcgcggccaagcaaatacaacaacatcgagtggcacgtcaatgtgcaacaagtgaagcaacccagaaatgcagaaaaacacttttagataactttacactgccttacggttaacataaatcgttaatattaacttacaaattacgcgtagttcaatatacaaactatacaacaagcaaaaaacaatcaaaatttatatatttacaacaacaacgaaaccttttacaaataagtgaaaaaacaagaaaaaaacattcagcaacgtcgaggatcgtcagcgaacaacgacaacaaaaagcgaaagactccaaaaccaagccaaaataatattaaaattaaaaatatatatacaagaggattttaatatccctacactgttaagtgcgtcgaagaactaacaacttttacacatccacaaggaacctagtatcttcacttttcgtgtgatctaataaacagatgcgaagtcaaaactctatacaaattttgaagaaccaaaccaaaaccgtcttaaataaagtgcctaaaacaacattttcacacgaatcttatgagaaaattgtaaagcgaacggagatcgaaattttataccaagtgtgataggtatacaaatcgaggtattgcaagttcgtatcgagcagtgtttccgcagcgaaactagaaaactagtggacactagataccctttcctggtttgagacgcgaggaataccctggacctgggtggcatcaagattgagcagaactttcgcgactggcaggggtattcaggaaacggctacacgctggcagttaacagtgtttgcagtgcaggctttgccctatcagcgatgccctttatcgacgatgcactgctctggtgtccagataacgatggtcgtcttgttggaggtctagacttgggaacatgcatagccgatgattctacggctaacggaacggaaaacttgaacccctcgatccaatcagctggcaatccgaacaacccgcagcagagcgtcggtggcgagatcctgggatccgtggagtccgccggcaacgaactgaatggagcggcggcccgcaacgtgaacgtggtggtggaaccgctctgcggcggcgactcctccgacgagctgttccgcagcttctccgagagcaacttcgagatcgagagcctgctgtccgatttggccaccgtcgaggtgaaagtcgaaaatgaggagaacaacaacaatgtcatcaccgatgatgacttcgccagcgtcgctgccgccgtggtggccaacgatgatctgctagccaaagagaatgcccagctgagtgcccagggtctggtcgattcggtggccgccagtctggccgattccggcgatgccggtggtcagcaggcgctactggccttcggctcttccagctcggcagcctcggcgattgcagcagcagctgccgccctctgtggcgatttgatcaacaacaacaacaacaacagcaacagcaacaacaacagcaatggcaatggcaatcacggcggcgggggaggaggagctagttccggcggcggagtagccggcgactgtgccaccaagctggagtacgccctcatgggcggacagccgctggcggaggagccgcgcttcgtgaccagcgccgccgccaatccccttctcgtcgagaagctaatgtccaagtgcctgaacattgagaagcgaatggacaagctcagcggtaagtcgacgattttattacctttatgcaaaacgaaaaactaa

SEQ ID NO: 13455 - protein, 306 aa, DROSOPHILA
MPFIDDALLWCPDNDGRLVGGLDLGTCIADDSTANGTENLNPSIQSAGNPNNPQQSVGGEILGSVESAGNELNGAAARNVNVVVEPLCGGDSSDELFRSFSESNFEIESLLSDLATVEVKVENEENNNNVITDDDFASVAAAVVANDDLLAKENAQLSAQGLVDSVAASLADSGDAGGQQALLAFGSSSSAASAIAAAAAALCGDLINNNNNNSNSNNNSNGNGNHGGGGGGASSGGGVAGDCATKLEYALMGGQPLAEEPRFVTSAAANPLLVEKLMSKCLNIEKRMDKLSGKSTILLPLCKTKN

SEQ ID NO: 13456 - DNA, 3108 bp, DROSOPHILA
cgcagacctccacaacttttaattatagttcattatagacagattcagtgagcattttgaattaatagccaatcgaagagtatggtatttcacgtgaaactgtctcacattttggcgtttgattaagcaaattaaacacaaacagcttgcaaatatccttgtttaacattcgggcgactaatatttgctttttcttgtggttatgttaaccacagttaaatactactactactcgtcctgttttaaggggattctaggaaacaaatccctactaaacttgataattaaaatgagtcagaagtataacttaggcactgtaaaataaacaaactatcccgctcatatataaaatgaccgatggtggaatacattgttggtctctttcccttatcagactgttggggctcaagagctcgctccaaaaatatcctatctgacgattaactgtgcgaatctgaagtagaaagcgtgaaacttcaatcttcaatccacccggtgcacatacttgttgttaaatacttgaaatgctcgagagctaattgggccacaaggacacacagaccacctacggcagccagtttgttattcaaatatttgtgcgtcatgcctcacgtgggtggtgccttccactatcatattgtgcaaataaatgtggcagttgacttttccgctggagaaattgcatttgcagttcgctcattaattataattacaaatatgtcaaacaaagtgtgaaaatgctttcggtgaaaatggcaaagattggctatgactgtgagaataaagaaatggattatgtaaattatatgagacctttattatcagggtatttatttatgctggattatgtataaacatatttgatcttggtaaagagcaaaagagtcgtaagaaaccattcctatgaataaaatatcatattttttggcagccccttttagatttgaaaactttaaaagaattcgaatattttttaagcatcgtttttattgcacagcaattagttaatcatgccgaagggagccttgctgttcacgggcacatagaagtcaccctcgaccatgtaggcgttggtatcagctcccatgcgaacgctggagtaggtgcttccgcactccttggcaacggcttcctcgtagtctccgcacttcatggttccgaagttgtcctcggagacggcctcggcgtagtaggttgttgagcgtccgtgggagcaggctccagtcacatccagagggcagccgggctgggtctttcctccgttgggatagaaagctcccttgccgatgggcttcaggaatcccagagtgccaccgttggtctggatagactccacataccaggcatcgtcggaattcagacgcttgttgggcttgttgtagctgaagaggggcagggcggggtccagaccaatgatggtgtgcacctggccgtcggtgttcttgccggcatatccagccacatgggcgcccaagctgtgaccaatcacatatacgtcattaagattcagaccgtggttgtccttcaggaagttaatcatcttggcaaccttctttccggtggcagcgacagccataacagaggtggcataatccacggaacgggcacgggcccagtcaacaacgatcacgttgtagtctcccttagagaggaatgccttgcggatgtccgagttcatgctgttcaagtagctctgggtccagccgtggatcacgaaacgggtggggtgagcagggttgaagttggacttggaaatggacttggtagtggcgtagatgtgcttgctgctcgaggggttcttgggcgtgaagaggtagaagttcacgggaacggtggtcaagccacggccctcaagcttctcctgggcctccatccactcctcagcgacatccatgtccacccactcaaaggagccgtcctgctggggaacgtaccagccgttctccccgttgacgcgctcggattcctccagagcataagccgaagctaatgaaagtagaataagatattgaattggggcttttttaagggtttcattatacgattctatacttaccggctagagcaaagattgccaaaatcaggaaagtcttcatattgtagttgagcccacaactggtggttcttcagttcgcaaacagtgtcttttataggtcccctggtggtcgacttatcgacaattgattagatcgtacggatttactttggctgactaggtggtatgggtacattaaattaatctgattgcttactcttctttatttatttggaattccgaatctgatcgcatttttatctactgatagcctgtccttagttggctctctagactattttatttaatgaaaaagaagcaaaagttctgtgacgcttattgtctgcgatttattttgctacgccgaaaggttcagttccatttatgcatgactagtagagaaaacatcttctgtttttgtatacaagctggctttctaggtttaaagacttccttttaaagcaaaacttttattaggcgctgtaaaatcattctagataaatgtttagctacctgtggttttccaaagcaatttaatggttctcgctttcctaggccgatattaaataatttttgcattcagcctaaaagcccgccaaataaatttatgcaccaactaagcccaaaattgtgaactgctacatttttccaggaaaacacaagacgttattacatttccaatgacgcacatacccacagctcaatttgtacgtgatttctttttttttacaaacatcatgccatcggtctctgaaattaatttggaattttttgctcaggctttgcacattttaattttccgatattggcttatagcagtagaataccaaacgacgtcctaacaacatgtaattatttcacctgtttcgtcattcgcggcacacatttgcagttttacatcgttgttaatacagaattaatgagatgttcattaattaagggctgctggttacacattgaataatgttgtagaactgtggctttcgacctactctctgattaaataccaaaccaaaaacctttatctttcactgcacaaaaaacttgaacctgaactttagactatttagact

SEQ ID NO: 13457 - DNA, 1038 bp, DROSOPHILA
ctcaactacaatatgaagactttcctgattttggcaatctttgctctagccgcttcggcttatgctctggaggaatccgagcgcgtcaacggggagaacggctggtacgttccccagcaggacggctcctttgagtgggtggacatggatgtcgctgaggagtggatggaggcccaggagaagcttgagggccgtggcttgaccaccgttcccgtgaacttctacctcttcacgcccaagaacccctcgagcagcaagcacatctacgccactaccaagtccatttccaagtccaacttcaaccctgctcaccccacccgtttcgtgatccacggctggacccagagctacttgaacagcatgaactcggacatccgcaaggcattcctctctaagggagactacaacgtgatcgttgttgactgggcccgtgcccgttccgtggattatgccacctctgttatggctgtcgctgccaccggaaagaaggttgccaagatgattaacttcctgaaggacaaccacggtctgaatcttaatgacgtatatgtgattggtcacagcttgggcgcccatgtggctggatatgccggcaagaacaccgacggccaggtgcacaccatcattggtctggaccccgccctgcccctcttcagctacaacaagcccaacaagcgtctgaattccgacgatgcctggtatgtggagtctatccagaccaacggtggcactctgggattcctgaagcccatcggcaagggagctttctatcccaacggaggaaagacccagcccggctgccctctggatgtgactggagcctgctcccacggacgctcaacaacctactacgccgaggccgtctccgaggacaacttcggaaccatgaagtgcggagactacgaggaagccgttgccaaggagtgcggaagcacctactccagcgttcgcatgggagctgataccaacgcctacatggtcgagggtgacttctatgtgcccgtgaacagcaaggctcccttcggcatgattaactaa

SEQ ID NO: 13458 - protein, 341 aa, DROSOPHILA
MKTFLILAIFALAASAYALEESERVNGENGWYVPQQDGSFEWVDMDVAEEWMEAQEKLEGRGLTTVPVNFYLFTPKNPSSSKHIYATTKSISKSNFNPAHPTRFVIHGWTQSYLNSMNSDIRKAFLSKGDYNVIVVDWARARSVDYATSVMAVAATGKKVAKMINFLKDNHGLNLNDVYVIGHSLGAHVAGYAGKNTDGQVHTIIGLDPALPLFSYNKPNKRLNSDDAWYVESIQTNGGTLGFLKPIGKGAFYPNGGKTQPGCPLDVTGACSHGRSTTYYAEAVSEDNFGTMKCGDYEEAVAKECGSTYSSVRMGADTNAYMVEGDFYVPVNSKAPFGMIN

SEQ ID NO: 13459 - DNA, 2595 bp, DROSOPHILA
ggcatgtttccatcaagattacagggtatatagcgtatagctatattatgtgtattcaattgctcaatttcgggactttcgcactaagggcatttcaaaaattggccatatatgttaagtaaaatcgtataaactaattcagtagtcaaagcactggcacaaagaagtaaatgctcattccagaaacatccgaaatgaatgattcattctggaacatacgttttcaatgaggtttagaacagcatgtaatgttcgtattaagccttcatagtagcatagcattgtaattagcatagatacacaaaggaaccattatttgctagtgaacaaagggcagaatgttgaaggaatgaaaaaaagataataaaatcaagttagagtctacgttagtactaatcgaaaacatcatttttaattttgattataaaataataaacctgattaccgatcgatcgggatttaacctgggatttgtgatcaaagaccagttcgaattgagttatttgaattgatctagtattgtttactactaatatcgctccttatgagcttaacactctgaattcccaaacatttgctttgacatcaagaaacttcaacgaaggacagagtatagcggtataaatagataacgatagttgactcatgtttctgaaaacatgcgattgattacatatacattagttgcaataaaatattctgtcaatattagtcaatattgattccaattcttttggaaactggaactaagcactccgaatttctaaacgtttgctttgatatcaagaaactttaacgaaggagagagtacgacggtataaatagtcagcgatagttggcggattttcttgtaaccatgaaattggttacaagaacatgacttgcaagaaaatcttctgagaatctggacggttacatccagttaataatgattccaatttctttggaaactgaatcaggattagcggctatgttttgggaatcaacggatcgtgttttccagcgatctgctcacctgtgaccaagttctcgcttgtgaccatggtagccggcggttccatctgcgcccactgccagtccattgagcaccgactgatccatgtcggtttcgccgatcgtctgcgtgcgttcccgttccttttccggcttggcgatgatcgtggagctggtgctggaatgtttctgcagcggcttttgctgttgtggctgtggctgtttctgctggttttgctttggctgtggcatcttggagctgccgcggattacaaggccacaaatgctgcgccgcgtcgctgctgctgattaagctctttcgcccagtgggcgtggaacgtcggtaggcgcgcggggtggttgtgggggctaccagcagcgataagtatcttatcagctgttattttggcggacgacgacgtcaccaagatctggagttggaatgaatctgactgatcgatcgtttggaaaactcttcgagtgagaaaaacaaaaaaaaaaaaaaactgacaatttgggatttcgtatctacgattcctattcggatgcgaattcggattttccacttggatggcaaaataaaattccgaacgatttcggtcaacgttcgaatttcaactgaaagtgcaatgtggaaatggaggaaggaagcggcggcagagccaaatgagagcgccgaagagcgagagagcgggggtcgagacccaactctctccgttttcaatactgaaggcagagcgtcggcgtcgaaagctctgctctccctctttctctctctgtgtctagctatcccccatgcccccatcgcctccaaacaaacacacactcactcacttttgttgttgctgctttagacggtgtcaacgtagaccgttcgttcagttgttgttttgatgccttttatgcaataaatacaaaatgttttctactttgttttgctacccattactcagctagggaataatcgatcgcgcgatcactcacacagcaaacgagcgagctctttctatgatttctatgactctcgtgtttaggcagcgttttattgacttcattgcacttttttgtgatcatatgaaaagtaatcttcgtttgcttagctttcttttctcagtttataactaatatgtacatatgagcaaattaggtcgtaaaacacaaatttgctttttataatacaatacactccgcatacgaatgacgtctagatagaggggcacgtatggtcaccaaagtgatcgcgatgcctgctcagtgtacagggtgtcgaagcttcgacacacccacttcccatcgccagctctgcggtttatcttcacgcgctgcttgctcagtcgaaaatagcttctatggccaaacaagcacgaataagccaaaccaaaccactaacaatgactacacccacttgtgcgcatggaaattttagtgtgtcagtcttggattggaaatgcttggaaagcggcaaagaaatgaaattatgcacacaaaacttagccacacacgcatacagttgaggtggagcaaataatagctctgcaactatttccttatcttcccggcgaaaacaagtggcttacacagagagaaaaagtcgaagtaata

SEQ ID NO: 13460 - DNA, 595 bp, DROSOPHILA
gaccgaaatcgttcggaattttattttgccatccaagtggaaaatccgaattcgcatccgaataggaatcgtagatacgaaatcccaaattgtcagtttttttttttttttgtttttctcactcgaagagttttccaaacgatcgatcagtcagattcattccaactccagatcttggtgacgtcgtcgtccgccaaaataacagctgataagatacttatcgctgctggtagcccccacaaccaccccgcgcgcctaccgacgttccacgcccactgggcgaaagagcttaatcagcagcagcgacgcggcgcagcatttgtggccttgtaatccgcggcagctccaagatgccacagccaaagcaaaaccagcagaaacagccacagccacaacagcaaaagccgctgcagaaacattccagcaccagctccacgatcatcgccaagccggaaaaggaacgggaacgcacgcagacgatcggcgaaaccgacatggatcagtcggtgctcaatggactggcagtgggcgcagatggaaccgccggctaccatggtcacaagcgagaacttggtcacaggtgagcagatcgctg

SEQ ID NO: 13461 - protein, 77 aa, DROSOPHILA
MPQPKQNQQKQPQPQQQKPLQKHSSTSSTIIAKPEKERERTQTIGETDMDQSVLNGLAVGADGTAGYHGHKRELGHR

SEQ ID NO: 13462 - DNA, 3148 bp, DROSOPHILA
tcacggcgttggtgctgatgcggccctccatctgggctccgttggccagaagatcctcggcatcctgcatgtccatccactcgaagcttccatcaagcttggggatgaaccagccattctctccattgacgcgctcctcaatgggcagggcactcactaatagaaatagcttatcaattacttgcgtctattgccaatatggatgaaaacttaccggctgccagtaaggcggcaagaacaaaaaacaccttcatgttgggggtctcaaattattgtggtggagaaagcattcatttcacgctttatataggcctgaaataataaccgtaatcaccattaaatatcagtaagcacttgaggctttgacagcttctgaataataagatagggccgatacaaacgattagaacgttgtactttgatagcgttttctccaacgaagttgataagggaaaaacctaatacagtagagcttttcaagttgcatcaacacaaagataaggtccagggtcacaacactaaccttgatattattttaatattatttgcatattataaattacacgaattaaaagtcttgtacttttataacttttctttttcctttattctttaaatcgaatcttgtaaaagttgattaaagttccttaattcgtttgtttattttaaccatgaaaccattgttacaattaactaactaatgactaacgatctcaaggtaagccatataacggtcaagtgtaaccataaatgttaataaacggaagtggttggctagcaatcttatggtttatgggcggctagattcgacaagcaagttcattgaagaaaacaagtcatttttcgtcgcctttttatgttcgaaaaagccagatatcaagtggaaatcaaagggatttcgcagaggaaaacacagttttgtaatgcccataaaaaccaaatattgcctattagtaataaaacggagagttacagttttttgaagtttattgagtttctattagttaatcatgccgaagggagccttgctgtttacgggcacatagtagtcaccctcgaccatgtaggcattggtatcagctcccatgcgaacgctggagtaggtgcttccgcattccttggaaacggcttcctcgtagtctccgcacttcatggttccgaagttgtcctcggagacggcctcggcgtagtaggttgtagagcgtccgtgggagcaggcgccagtcaggtccaatccgcatccgggctgggtctttcctccgttggggtagaaagctcccttgccgatgggcttcaggaatcccagagtgccaccattggtctggatggactccacataccaggcatcgtcggaattcagacgcttgttgggcttgttgtagctgaagaggggcagggcggggtccagaccaatgatggtgtgcacctggccgtcggtgttcttgccggcatatccagccacatgggcgcccaggctgtgaccaatcacgtacaaatcgttcaaattcagaccgtggttgtccttcaggaagttgatcatcttggcaaccttctttccggtggcagcgacagccaaaacagaagtcgcgtaatccacggaacgagcacgggcccagtcgacgacgatcacgttgtagtctcctctggagagccaggcactgcggatgtccttgttcatgctggcggtgtagctctgggtccagccgtggatcacaaagcgagttggatgggcggagttaaagctggaggcatcaatggacttggtggaggcggtgatcttcttgcccttggtggggttggaggaggtgtaaaggtagaactttacgggaacggtggtcaagccacgactttccagcaactcttgggcttccatccactgttcggcaacgtccatgtccacccactcggaagtgccatcctcctggggaacgtaccagccgttctccccatggacgcgctcagattccttgatcggaatagccgaggctgaaaggatgtgttacatgttagacagtattctttaaaaatggaaattcttaaattcttaccggccagagcaaagaatgccaaaatcaggaatgtcttcataacgtagcggagcccacaactgatggtagttcagtccgaaacccatagcttttatacgtccccagtgggccaacttatcacggagtgattaaatcggttggccgtactttggctgcctgggaggtttaggtcatttgaattgccgttctgattgccggtcatactgccattgttttttttttttttaagaactccaaatctgatggctcttttatcggctgattggcttttcaattgcgccattcgtgaacgatttgcgaactgattcttcgattgttggatgttaacgagtatggaaatttgtatgtgttgccagtaaattccaatcgagacacgagtcatgaatggtggcaaacagttgccttcactatcagctatcgattacaatggttggcgtcctcagccaacttaatcttctgtaagtcgggttaagtggacgtaattgtaggtatcattaaatgggcatttaatttaacactccagtgcatttttgttttgctcgacttgtgttatcttggtcagctggtggtttgtaatcttacttaacgaaggtgtaaagctggggcattaaaatccggaaaataacaagcaaaagtatttttaagtccaaatcatcttctgtttcagcagtaaacaggaagtgtaatatcacaatgcagccgcctaaccggaagttacaaccttgaaatttgttcaaaaatgtaggcataatttcaggctctttttaaattggcgttttctcttaatcatcgcttattgagaaattaatccaattaataacgtgaatatgaacatgaacagaaaccgcagacctccacaacttttaattatagttcattatagacagattcagtgagcattttgaattaatagccaatcgaagagtatggtatttcacgtgaaactgtctcacattttggcgtttgattaagcaaattaaacacaaacagcttgcaaatatccttgtttaacattcgggcgactaatatttgctttttcttgtggttatgttaaccacagttaaatactactactactcgtcctgttttaaggggattct

SEQ ID NO: 13463 - DNA, 1066 bp, DROSOPHILA
gacgtataaaagctatgggtttcggactgaactaccatcaatgaagacattcctgattttggcattctttgctctggccgcctcggctattccgatcaaggaatctgagcgcgtccatggggagaacggctggtacgttccccaggaggatggcacttccgagtgggtggacatggacgttgccgaacagtggatggaagcccaagagttgctggaaagtcgtggcttgaccaccgttcccgtaaagttctacctttacacctcctccaaccccaccaagggcaagaagatcaccgcctccaccaagtccattgatgcctccagctttaactccgcccatccaactcgctttgtgatccacggctggacccagagctacaccgccagcatgaacaaggacatccgcagtgcctggctctccagaggagactacaacgtgatcgtcgtcgactgggcccgtgctcgttccgtggattacgcgacttctgttttggctgtcgctgccaccggaaagaaggttgccaagatgatcaacttcctgaaggacaaccacggtctgaatttgaacgatttgtacgtgattggtcacagcctgggcgcccatgtggctggatatgccggcaagaacaccgacggccaggtgcacaccatcattggtctggaccccgccctgcccctcttcagctacaacaagcccaacaagcgtctgaattccgacgatgcctggtatgtggagtccatccagaccaatggtggcactctgggattcctgaagcccatcggcaagggagctttctaccccaacggaggaaagacccagcccggatgcggattggacctgactggcgcctgctcccacggacgctctacaacctactacgccgaggccgtctccgaggacaacttcggaaccatgaagtgcggagactacgaggaagccgtttccaaggaatgcggaagcacctactccagcgttcgcatgggagctgataccaatgcctacatggtcgagggtgactactatgtgcccgtaaacagcaaggctcccttcggcatgattaactaa

SEQ ID NO: 13464 - protein, 341 aa, DROSOPHILA
MKTFLILAFFALAASAIPIKESERVHGENGWYVPQEDGTSEWVDMDVAEQWMEAQELLESRGLTTVPVKFYLYTSSNPTKGKKITASTKSIDASSFNSAHPTRFVIHGWTQSYTASMNKDIRSAWLSRGDYNVIVVDWARARSVDYATSVLAVAATGKKVAKMINFLKDNHGLNLNDLYVIGHSLGAHVAGYAGKNTDGQVHTIIGLDPALPLFSYNKPNKRLNSDDAWYVESIQTNGGTLGFLKPIGKGAFYPNGGKTQPGCGLDLTGACSHGRSTTYYAEAVSEDNFGTMKCGDYEEAVSKECGSTYSSVRMGADTNAYMVEGDYYVPVNSKAPFGMIN

SEQ ID NO: 13465 - DNA, 11095 bp, DROSOPHILA
acgggacattagttcgactcataaataaaacaacaattttactatatataccaattgtatataccaatagcaaatgggagactatatcttagcattaaaatatatatacacatcataccaagattttctccctgttgttaactgactttttttcccacctgggtaatttccgcttaattagtgcaatgacagtgaccagcagtcgtggatccaacttcttaggcgggggattggattgtccgctggcgctctacagagtaataggaccattgaaggacccaaggacgtgggtggacagttggataggtggatgggtggatggataggtggcaagtggtcgtaatccaagaagtactaaagagacgggagcctttgtccattttgccttatttacgtagcactgagctcggagctctggcgctctattttccatttgtttatttcaagtcggattgttgactttacgatgctggtgctgtttttgcaattgcgtatgtccgtagcaataaaaaacacttgtagctgcgtaaaaatacgaatgcgaatgccaagtatggcatacttgttgtgactgtcgggaagttagacgccatctgaattaccagagaagaagagttttgcaatgcaaatatagtgattttcatttaattcatgtaggatgtgcattagtcatgcccaagtgcagtcacactgcgtgcaataaagatttcactaccgttgtaaaaaaaatattacgtgcaagtaaaatatatacaattttctgagtaatcaaaaccattgatatttttacctattgaaatcttagttgccaatttatgttgattccaaaagtatgcaacaaatatttatgtttgcttacagtgcatccgcctgacaacagatggcgctttgtatcatcattgctatatgttttcatatgttttgcatgccaacatatttaatcgtttttacttcaaaataatgaaaaatacaacttacattctgtttttaaatatatttttcgtgtttaaaaattacaaaagtgttgccagagattggcaatctaacagctacgtaaattttctttttatcataaaatttattttctttttggaatatcacaccaaaacaggtggcacgttccttccgcccggactttgtgctcattcgtcagccgccgcgcgacggatccagtgactatcgttccacgatcttgggtttaaagtacggcggagtgcccagcattaattcgctgcactctatctatcagttccaggtgagtagcgttggacttcatatcgggcttactttacaactgatcttctttgatactcttaaggacaagccctgggtattttcgcacctgctgcaattgcagcgacgcctcggacgcgacggctttccactgatcgaacagaccttcttccccaatccacgcgatttggtaagtatacgcggtatgaacattaaaagctagacactaattaagtagctactaaggagccggttacaagttcgaaagcatcaattattaaataacacattaggcataacgtacgtattaaagctctggatagagaaaaacggtagcataacaaggacaagcgaaggacttggggcaaaaaaaaaacccgcattggtttacggattgctcatgcactttctgtagagctgcgtgcgtcgccagcggcatcgggaaatcactccattgaccgtctgcactttatgcggcatgcaggcactgtagttcgtctcgcattttccaaaaggcgaccacttgcatgtatcggcatagtttcgtcccttaaagcatctctctccaaagcagggagttacctggtagaaaccacagtttacttagattgatgtctgatgtgctttactcctaacttactgtgcaattggtggccttggcatatccaccgctgaagccatgacgctctgttatggtcatcctggtgtactccttgtagtagctgcatatatttaatgtcggcatcctacccgctactatataaacttttcccagatcgagatttataccacacattgcgtcatcttggggcgtggacaggcgcccatcgcgtagcattcgtcgtgcttcggatgtagcctagtaaaataataaaattaataagattattttctttagttaagtttttagttagatgaaaagggctttaatgttaaattaagttccataccgttgcgctggcttaccttgtaggtgcgtttgatgtgaactttgtaggtggtcctgccgggctcgatggtatccgatttgcgaaggactcgcagttgcacaactgtcaaggattggcatttgtttattgaattcaccggagattctcagactcttaggtcgtgcaaaacttaccgtagtccgcctgggcgaagtgcgtctgtgggtgagatggcatgcagctgcaggcatccgctgggcgaccgtaaaacgcgaaaacggcgaccaggaggagcgtcaataaacccaaatgctttctaagatccatgactgcgttggttggcgagctgataaaatggctatggctttgcgtcaccgccagtgagtccccgagattactgtaaaggaagtggaaaatgaaggaaattgagggaaaattgagattgcttcttacggtaacgacaatgatttaatgggaaaacgcatataatagctttcgtgctgaaggtcactgagagtttaattatgtctgtcttacttatgtcgttcggcttatcaatggaggccaggcagcagcaggcgacagccttccatcaatcgagccatcaatccgctgctcaattatgcatttaatatattacacatacgccctgtatgtcagcaattaatcgcgcctactgtcacaaacacgcacgcacaagctgggatcatcaagagcatttatgggcgaagcacttgactgccaaatcgcatccatctttattcttcatagattggattggattgtcttaagcctgaatccatattctcctttcatcaatattttatttccgacttacgcaaagtcgattcagcagtcaatttagaatgcataaatcgtacaaaagtagttcaattgcccgggcatttcaattgaaaattgtttatgggaaattcatagaaaacttgagacgcacaaatcgaaatccattacaaaaccgctaccataccccatatttcgatgtgctaccacatagctaccatagctatagatagagatgcacaaactctcatgtttatatgtatgcctccatatattaacgcaaaaatattgtataatatcgagagtgtaaaaagcaaggcggcaatcagctgcagctcccgattcgaactgatcggggcagatagtcaggttccatatagacagacctatggccatatgcctatctatcccgatttcccgcccctcgcagttccagttctcctctgtttatggagtctacaacccggcagctctgcagctctcggcaatgtggcaattaaattgatataaaattgaattaaaagcattttgcggaaaagccactagaaaacgcacatgcatacgcactcgcagggagcgcggaaaatgaggaaaaatcgggggcagacctgcatgcgtgaatcgctgggaggttgctattgattgaatgcaagccaagcaggcaggagtaatgcatcaaactattcattaagtggcagcccaagtggcggcagacaagcagacgcgctgactaatgggttaaactggaacatacaccggtagaaaatgagtctgctaatagagtgaataattatgtgatatccgatatactagctttattgacagcactacaaaactaatggaattgctgtcttatcattaagatatttagaaacaatatcgtggcgagaactaaacttccgaaactgaaaataaacattctattttatttttaataatacaagtttataattagatcacccttagtggtttgctgggaaaaagattgttctactgtacacaatggttatctagactataaagagaaaagcttagcatgtttttccgtattttttccctgacactgtgacactttgcccggcaattaacggcgcggatttgtttaacaaacaggccgacaagacagtactaccaacaacaatattgaggggaacaaaaaatggaaaacaaacaaacagccggccgagaagcaacaaaaagtggcacaagcacacacactcagtcgaaaacgtcatcaacgtttagcagataaatcaagttgggagccaattgccagcaagaaaagcgttttcagaggcgttgaaaattcgcacgatttcattgggacctgggactacttttcccctcgcagagcgatacccatctgtgtgtgtgtgtatacataaaaaagtctccttactaatatatgcacccatgtctgaatgcacaattagctgggccatatatcactcaggcatagtttaaagtctaccaaagccggcaaaaatgcagcaacagttttgggatttattgttttttttttttatttttcgagctggaaaaacgctccccgtgtttgttgacaagcctaacacatgtcaattaaatgttatatattatggcacacggcggccactcacacagactccaaaaagtggaacgtgccgcatttgacgtcactttgtgccccgtctaattgacacacttgttggacttgtctgccacgaagttcttgtgtcgtcaccattatcgatgttgacatttgacactggtttcaatttcgagtggctgtcatccaattatgcgggccaaaaaaaaaacaaaaaaaaaattaacaagagggggcaacaatttcaaaagatattaactcaaatatcggatcgagttcaattggcattgatttccactctgaactcagggcacttaaagttcgtcgttcacaacaaaatgaaaaatatttacggacaaatatggtgaggggaatttcgctataaggaaatggaatataattcaatcaaacttccagcgattaagtttaaaatatttgtataattatatcgacagttctaaactggaagcacgacaggctttttgattataattatttattcgcgtattagttgtacactacttaacaaacaaaaaaaactcaaaatattaaagtatttatttataaaataacaaaattcacaacattcattggattttatttgcttaaatgtttaaattacaaatccgtcttcgtaatatttaatctttacccaaaaggctcagccatttggcattatgcaaattttatgattaacactttcccatagaaaggtagacagaaaacagaatccagacagatttcccaggtgaatgcaaagggatttgctaaggtcagacatggaaaaggccaaggctcggtgatgatgataaaaaaaatgggggaaaagtggacagaaaggttttcctgctaccaaactaaagcgctttcggtttagctctcctttttttgggtggtttgtttagttggttgaagactgctcgccgaaatggctgaacaacccaaagccacataattaatgcgattttggtttgcgttccgtgctttctttgcaaatttgtgttggccagtgtgctatgtagttgcccgttgagaggtttggtttatgagcacttaattggggccattaataccggctaatgcctaagtgaagtgtgtggacccacaaaagaattgacagccagaggcacttcacatagcatcgaacaaaacactaaatgcatcgacataaaaacgtatttatagctttcggatatttcgactacattgcccagcatagtccccacatttacgatgcttaaaattttgcgcctccaaaaaaggcatatcaaattgtggctgcttcgatcattttgcgggaattgatttatggtttcttggtctataaagtagcggaataaaaagtataacttattttttatggtgttaaaaattggttttatctacaaatgattcagtattgttgcagtaggtcatcagatcatttcgacatgctaatcaacttattctattgcaatttgtcacattactatgacacggatacataattctaagtaaatatgacacttctaatgaggtaatgaaatataagtttagtgagtacccaaacttcgaatcgaatgtcaccgttatcgactggatttttcagcggtcatttacttttggatattgctctttgcggcaattcgcctacatatttgtttttttttttattgctgtgccaatttgatttttacttacttagattttcattccaacccgatgatgtcatatcgtcgcagaagatattcaacttatcagaatccgggataaattttaattggagcaagcaaatattagccattgcaactgagatgacaactcgcaagtgggcaaaaccatgcacatcgactttttcattaccgacttttgcagtccagtgaatttccgccaacttcccataacgatgctgaaaaactttctttggccggaggcattcggttgactggcttttcctttgtcggcgatgccttcacaacaatgggggaaaattaagggggaaatatcaaagtcacgatcgggcaataggcaatgccataatcagcatgatcaatgcggcccaaacaaaagggggttatggtatgcccatttgattaatgccactgcttgatccctgacccggaatggttttcctgcccggaatggccaaataatgtggcttcaagttggctaaagataatgataccagctattggcatttacatgcactcaacaaacacctgaaccagtggcacgtacatgcataattaacatcggtattgaaatcccaatccgaggtgataagaactggtaaagtgttgtctcgaccgactaattgaatcgccagcgtattggatgcagtggctcgatggttgacagctccattcaggtgtgacgaaaccttgtctggcagacaactatgctcggaatgtcggaatttttattgccttgcgcctcattaacccatgcacaagtatgccggcgaaatctgacatcattgcgccgaaaataagacttctctcattttgccactcaactgcatcagtcgatcaagaaaacaaacagaaaatgcaagcccaaattcgtcacgttttttttttggggatttcattttgagacgcgaaattaaagagcgaaacagtaacgccacaaatttctcaacttataacacaaattgtctggcggcgtggcaaaatcaacaaacatttcacccaggatgcgtaacgaaaattcaattaaaaatgctaatgtatctgaagaggatggtaggtgaaggggggggggggaagggttcctacaaaatcggagacccgaaggtctggggcctggactcacattgcattggccggaccataaaaatataaatctttaatgagcgaaacccatatagcatgtgcatatatataagaccgcaaagtaaacatatgcatatgccggaaaatacaatattatgtataatgtgggttctggctcggaaatacaatggtgcgcactgtgtggtcttgcatttagttatcaaattgctggaatttgcataaaaatcaataaactctgcacaaataacccggctggcagttcaattaaatattcaagtgattttctgtgacaataccgaatcggttttcgtcaacttgggtgatttatctcagcccaacaaggctccatttaagacccggttgacagctcttgttaaagacattgagggacattgagataaaaggagcagaaacgcagcagggaagctgacaaattgacggcccatggcccacacacaaatggaggagctccgggttcccaaaaaaacaaattcattgtcgataaattgctgccagacctgtgaaatttacgcacattcatgggggaggcagaaattattaatggtggcgaaagaccaaaataccaaaccaaagtctctttgtcgcgctgtcttatttgtacaataatatttaattgcaagatttgcacaagaaaatttattaaaggcaatgggatgagcagaatgtgggtgtgtcggcataaacaatccagatccaatgttttcgtatctgtatcgccaaccgtatatggctttcggacttttttggggatttaaaagcattcgccaaatatggcaaattgaatgatgtgcgagggaaaagccacattcacaatcatcgattatgacaattttatttgcccagcttttgtggttttttattgtttgcgaattggatacaatgcgtaatcttacattacattatattgatcgtcgttctcggagtcgctgaaataggcctgatattcataataaagaaacatatcaatttacaatgattattatcatgtgaaatgtttaatatacgttttaaatggttctagttttattattcaaggtaatttatctgaccatgatgagtacaaacactctagtatctttaggacacattttttttttatttcagtgtagcctactaaccggattttctctccctcaataagcaattgcggttaagataatgttaaggtgccatatggcaatatgtgtcgtaagaaaagcaaacaatgcattcaattcaaaaattagcagactttagaaatttaaattccattcgataataagtgttatctgatggcaaaaaaaaagaaaataaaagtcaacgtagtatataatatcccagaaaagctgaaaagccaatacgaaatacaagctcatttaaatggcgcacaaacaaaacgaaaagccaacagtgaatccaaagtcaaatgaaggaaaacgaaattatgaatatccatgcgaaacaatgcgagttgtcaaaagaaaactcaatggaaaagaaaggggaaaacccacttgaaatgcatttccctggagaagtctttactcccctcccttgtgatgtgcttgtacattttattggtgttttttttttttttgtgagagtcgagaagcattaaatgtttttctttatttttagacactaaatggccaatgccaaaacacacatgacgtatgcgtaatatggaaatacctctggcgcacacaaccgtttcgctttccttgacatccaacaaaattgttacttgtacatcacagattcaaatgggctttacgatcagactggattgcacaagcaaactagttgtatatttcttaatggcctgcagtttgtttacaaattggcgacaataaaaactattaagacaattcgaaaggccagaagaaaactcggggcgctccaaaagatcagggaaggcagatgcacagctaggcaaataaaaacaaattataaataaacgccaataaatagaaatgagcgtttcgttggaaaactgtgtcgctgtgtcacgtcggcacatttcccactgcgcgttttaaatagccccaaaataaaatacacaacgcgtctgtgtcgcgcgttttgcataccttcaatttcaatttcaatcttctaaatgccaaacaactctaaaactaaaactaaaataaaataaaaacaaacatggctgtgtactttggcttttgagttgcaacttgtttttgaggtggaaatttgcacctcaggggaaaatgcatcaaagaagagaaaagtttaaaaatcaattgataagagaaaattaattttaaaatatttctagctaaaaactccacaaaagctattttgaatctgctctttgagctgaaacttttttttgcctttcaaacatatatgaaaattctgtttgcggaaaaataagcaaaccattttattccggctatttaacttctgacacaacacttggcaatgcggaaatttttaaaataaattaacacaattaagcattcaagtactcaattcttaaattaccaaaaattagcaaaataagcctagtttgttacctttaagctgcaacctattttgtgtgtaaaactagcacttcaggcttttaaacacttgaacccgagggcacaaaaatcgggaaaaacaattgaatgtattttcaccggcactcgcactcgcactcgcactcgattcgactcgtcagcactttatactacttggtactatatatctcgtacgatgtcgcgatttttccgtcgccgattttgtggcgttctagctcgctgcgcttgcggttctgcactggatcgtcaagtcaaccgattcgactgttttcttcactcaagttgttcgggaagtgagagatcggatcgatcgatcgtttgagtcgaatccactcgtgtctttataacttgagtgtttcttgcggcagtcgggcgatcaaaagcgccataaattcgccccaaatgagtggaaagtggaggagagtcgattgcatttttctttgcgtttattttgttaccttggcagctttattaattgcgtgcaggggcctggtttatgctctcggccatataatagcatacaatatgcatagttgtagttacttggcgccatggccaaaaagagatcgccacacgaaacggcagagaatagcgcatctgtcaggccgcaaatcaactaataattcagctatgcccagtcgtaaactcgccagagatccaacttcctcttcctctgaccatgtggcgcacacacgtgctgttgctccggtcatgcttcatatcatactccatgctccacctacagcacgttgccataatctgcatacccgacccggtaacgccaccgcactacagatctacacggcgagaaacggttggggatacttaacgttgcactactgatggcttaagaatattataataatattacaaaattataagatttaatataatagggttttacaattgtgatcagtatagtggtctgtgccaatgttgaaacttatttaaatcgttttcttcctgtgcacttatacaccagacaccactgtcaatcgatgaacccgcttcagggcactacgaatgcgtcacagtgcatattttaagtccgctgatataaccgagatgcagttccctagacggtgggtactcaggcggaacacgtagcagcttccaagaatgctggctatgtgggggtgtgacgtctcattctgatagtcactcttattctcggtccagatacatctcagatacctatatatatttatgttcattgagagattt

SEQ ID NO: 13466 - DNA, 1344 bp, DROSOPHILA
cgcagcgagctagaacgccacaaaatcggcgacggaaaaatcgcgacatcgtacgagatatatagtaccaagtagtataaagtgctgacgagtcgaatcgagtgcgagtgcgagtgcgagtgccggtgaaaatacattcaattgtttttcccgatttttgtgccctcgggttcaagtgtttaaaagcctgaagtgctagttttacacacaaaataggttgcagcttaaagatggatcttagaaagcatttgggtttattgacgctcctcctggtcgccgttttcgcgttttacggtcgcccagcggatgcctgcagctgcatgccatctcacccacagacgcacttcgcccaggcggactacgttgtgcaactgcgagtccttcgcaaatcggataccatcgagcccggcaggaccacctacaaagttcacatcaaacgcacctacaaggctacatccgaagcacgacgaatgctacgcgatgggcgcctgtccacgccccaagatgacgcaatgtgtggtataaatctcgatctgggaaaagtttatatagtagcgggtaggatgccgacattaaatatatgcagctactacaaggagtacaccaggatgaccataacagagcgtcatggcttcagcggtggatatgccaaggccaccaattgcacagtaactccctgctttggagagagatgctttaagggacgaaactatgccgatacatgcaagtggtcgccttttggaaaatgcgagacgaactacagtgcctgcatgccgcataaagtgcagacggtcaatggagtgatttcccgatgccgctggcgacgcacgcagctctacagaaagtgcatgagcaatccgtaaaccaatgcgggttttttttttgccccaagtccttcgcttgtccttgttatgctaccgtttttctctatccagagctttaatacgtacgttatgcctaatgtgttatttaataattgatgctttcgaacttgtaaccggctccttagtagctacttaattagtgtctagcttttaatgttcataccgcgtatacttaccaaatcgcgtggattggggaagaaggtctgttcgatcagtggaaagccgtcgcgtccgaggcgtcgctgcaattgcagcaggtgcgaaaatacccagggcttgtccttaagagtatcaaagaagatcagttgtaaagtaagcccgatatgaacgggcggaaggaacgtgccacctgttttggtgtgatattccaaaaagaaaataaattttatgataaaaagaaaatttacgtagctgttagattgccaatctctggcaacacttttgtaatttttaaacacga

SEQ ID NO: 13467 - protein, 210 aa, DROSOPHILA
MDLRKHLGLLTLLLVAVFAFYGRPADACSCMPSHPQTHFAQADYVVQLRVLRKSDTIEPGRTTYKVHIKRTYKATSEARRMLRDGRLSTPQDDAMCGINLDLGKVYIVAGRMPTLNICSYYKEYTRMTITERHGFSGGYAKATNCTVTPCFGERCFKGRNYADTCKWSPFGKCETNYSACMPHKVQTVNGVISRCRWRRTQLYRKCMSNP

SEQ ID NO: 13468 - DNA, 5514 bp, DROSOPHILA
gcacattttaaaattttaaatgaaattgaatttcatccaatgatctatccaataaagttttagtgggtctctttcctggctcctcgaagcttccgattgcctatcgacttctggtttccgtttccgttcgacacgtgtgcttaactgtttgtcggcgcgcccattcccaccgcccgccaaatgtcaaatgtcaactgcagccgcgcagttcgcaattcgcagttagcaaaaaaaaaaaaaacgtgctcttcgactggctgtgcaaacatttgcaagactgttatttttttgcctttagaaaacacgcttcaataacattcaaaactcgagacgtgcgaggccttggcttgtcaccgaagaatattcgtatctcctaatatctgctgggcgctacatgtgttgtaaatttatgagctgtcatataaatctttgcacttgggcacccttatgcgatacgtgtgtgccccgaattggaggggcgtggcgcctgtttgagggctgataagaaatgtgggatactggaggaacccttttacgctcacaaatgggggcatttttcatttgcatgcatggttacttgaggaaattcataatttttatgccagtcctaggcccatctaattgggtacagagacttagttgccagggttgtcactctcatttgtttaattaatattgccaccgagctaagcatttgcttgccgactgccacatgtgcacttttctttggggcttgtcagcaatttgcaaagtgctggtctgagatttttccactttacaaatccaagaagtcgcaccttacaacaaaagtttaaatgaatatgtgaagcttatatataatttagccatttcatagataccttgaatgtcttctataatgttttgtaaagttaatataattttattaaatgctttgctttaaatacattatataaatagataatatttactataacattatattttggcacgctttttctccgctctaccagcttcaatttcactgggtctccgattgttcggcttgcttgaggggattgcccttgtcgtcgatctccatggacggcaccaaagggggcttaaatccatactccagctgaagattgcgcccgaagtcgggactgcgcttcagggagtgtccgttgcgccatcgctggaactcatcgaactcgctggtgagcggggaatccccaacgtctgagttcgcagatgttggagctggaacgacgccaatgtaggacttaaccattttggtgggagtcgaggcggcggcggtggccaaatcggcgggaagggtattatagatatatcgggatccctgcaaccaaggtgagccctgtggcggcggtggaggtcgaaggtcgaatttcatgtcagccaaactgaaggtggcgaccttgggcgcctctcccctcacgggtttcactggttgcttgatggccgccaccggcttgctcaacttgaccgctttgggagattgggggataggggttttggcggtgagctgtggcagcaacttcttcagcatccgtgtgtaatagttttgcaacactttcggtggaatgtgggcaacggagtgggtccagggcgttagggaattggggtgggagtagtggggaaatgacagcgaggagtgtcccggcggcatgggcatgtgaatggccacggggacatgtatcggaatcgccatcggtcggtccacaaacttttccacaatcttctccacatgcacgggcttctccacaatgcgctccacctcaacgggcacatgcttctcgacgattttctccaccaccctctccacgggatatggaacgggatgttcgacaatggtctccactgggtacggacgatccacgtagtgctccacgtggacaggcacgggcacaggttgtggaacggcatatggtatgggtatgtgcttctccaccacctgtttgacatgatgatcgtggtctttaagtttttccacgtgatatggctgcagtgagggatgctcatgatgctccaggtgatcttgatgcaagtgaggctcatgctctggctgaggctcatgatggattatgtgatgatcttgatgaatctgatgtatctggggctccgggtgttgctctggttgcgtatacactggacctgggtgaaccgtttgttcactatgacctggagctgtgagtccggaatgatttgtatccaaatggacggaggcatgcgagacggccacttcctggggcgtactatcgtattccacgtgaataggatttttagccagagatgcgtaactcttggaaggatcaggtgcctgcgaaaggtgattctgcggatatggctgggggtaaatggtctcgtgctgctccaccaatcggccatccttctccgtgattagcttgttgtggatgttcacagacttctgaacctccacaaaggtgtatggagtggacttctttggagctggagctggagcatgttggatgatggtctgggagggctcggcatgagcctcggcaacgtagttatggggagccgggtgattcactgtgatctggactcctggctcaaatggcgtatgcgcaatggatggtgccgccgaggagtggggtggacttggagtgttcaaggtcacaaacaccagactatttggagtggcggaaacgggtgtgggacctgcatagccagaatattgctggacatccggcgcaggcgacgatatggccttggtgtgcagcaactccgactgctgctgcggcttgctctgctcttgtggtatcacctggctaagctcctgttgataggccaactgggcagcaggtttcacaaattggccggcgtagtctccttccttcggcgtccgtggattcgggcgctgtggaggattctgcacctcgtagtggaaactgcccttcgggaggggtccgtcgccacttccggagacaatgggattgaagctcttgaggaattgccgtgatggtgcctcttgactgggatgatgctgctggaatctctgctcactgtgcgcctggaagtgatccaaggcctgctgcgcaggctgcgactgggactccttgggtgtctgaaaatatgtgtaatatgtgtattatcatttcggattctccaatgccatcctacctttgcctctgcctgctgaggttttccctgtggtccgtcgtgtacgatgtgcacattgatctcctgatcctgaccgggacccttttggttggcataactctcgatgccattgaaatttggaactggaactcgctgctggtaggcctcccggcccacgtggcgtgtctccgcaatctggttgtcattgatctcctgcccctcttccaggtccggatcgtgttcgcccaggatcacaattggagaactttctgctgccactagagtctcgttgtcatcgccctccggttggagcagcacactgggcagcactggagccgccacagcagctcgattgatcctaagcagctcatctcgggaaatgtggttactgccatctcggaatcccggatccctaatctgctcaaccactatctccgtgtgacctggtcccaattctcgacggtattccttcgtcactgtggtttggtaactgtagtaggtggcattcggcgctggaggcttcgtttgcttttcagtgctggctgcctctgtggtactgaccacatccacaactgttggccggaccaccgccttattcgtggtcgtagacgtggtggtggatgtatctgtattgccactaaatcggaaaatgtccgagaatcccttggggaacagattggacagcacctcgttcacggtttccgttcgcgagcgggtcactgtctgctcaatgggtctttgtcgacgagccacttccactggcagctcatcgttgatctcgaactggatgtaaccatgtccattggtgggactgtctgaatctttgggaggcagagcagtgggcagaaagcctggaacactgtagaaaataaccctcttgttatttataattatttgcatatttaagttgaaagacagcaaaactatctttaagatttttgatgaagccttttcatttttccttttgactgttgacttacccgacgaactccgtttcggtttctgtttctataggatcttccccttcccgtttgagttccctctccagatccggatccacgcgcacttcgtcggccaagtttggaccttcgatgacctcgcggatgagttgctcggctggctgcttattaagctgtcaaaagcgacgctcattgcctgtcaaaatctttcactaaactcggacttacctccttgccgctgctgtcactcagggcttcagtggccgctgcctccaccgtcaaattctgggggagatcgccaggggccgagactgctgctgaggatggtggtgttgatgaggatgtaaggatggggggctcatccgaaagggccggctggacgatgatggccaagagacagcagagcgtggctgccgccgttagcagatgtcgttggtggcggtggggccacatggagctattacggaaatggccaaaagcagaaagagttagctggaagttgttgggctttttggcgtgcgaatagtggtatcgatgctggtggtggtggtggtggtggtggtgtgaataaccccggcgaccacgacaaattccaagcgacaaatggaggagtcgtcaagcctgtttgggcccgctccaaaggccatccaatagcctccacttgaaaccaagccactcgaatccactgcactccactccactcctgactactatggccactcacttgtcgggctgtttgattttaaccgatacgtcgctggatgatgatttttcctaagtggctgccaaggcaggcactttggcgcttctctttctcctttgctttaaaagagattttccctaaaacgtttgtcgtttttcctgccaagttgttgaacttggcgctgcgtttgcgcttggggcttatgtcattgctactggcaacgtaatgaattattaattaaccccccccccccaaaaaactccattgaaccccttctccccctgcccgctgcaacaacgcatttaatttggaaaattgaaattgatggcgtttaaaatggttcgtacgggttttcacatagtttggccactgcgcctgtattttgataggcattaaatatgcatgccaaaacatatttcacctgcaatattcatggctaagtggcccgtggcgctttgcagccggtcttgcagactatcttgttggccaaataacacaagaaagtggagctttcagtagggaaattgtggctttaattgggcatggataacgatctgaacggagctattaaacgggaggcatttcatatgcatatgtcctaagtcctttcgattggcaataaatataaggcacctttgatgatggtgctgccttcactgaatatatccatacaagtcctttgcgttaaatcacaagcaaattgcattcgttactaactcaatttgcacattgaaattattcttgctttac

SEQ ID NO: 13469 - DNA, 3089 bp, DROSOPHILA
atgtggccccaccgccaccaacgacatctgctaacggcggcagccacgctctgctgtctcttggccatcatcgtccagccggccctttcggatgagccccccatccttacatcctcatcaacaccaccatcctcagcagcagtctcggcccctggcgatctcccccagaatttgacggtggaggcagcggccactgaagccctgagtgacagcagcggcaaggagcttaataagcagccagccgagcaactcatccgcgaggtcatcgaaggtccaaacttggccgacgaagtgcgcgtggatccggatctggagagggaactcaaacgggaaggggaagatcctatagaaacagaaaccgaaacggagttcgtcggtgttccaggctttctgcccactgctctgcctcccaaagattcagacagtcccaccaatggacatggttacatccagttcgagatcaacgatgagctgccagtggaagtggctcgtcgacaaagacccattgagcagacagtgacccgctcgcgaacggaaaccgtgaacgaggtgctgtccaatctgttccccaagggattctcggacattttccgatttagtggcaatacagatacatccaccaccacgtctacgaccacgaataaggcggtggtccggccaacagttgtggatgtggtcagtaccacagaggcagccagcactgaaaagcaaacgaagcctccagcgccgaatgccacctactacagttaccaaaccacagtgacgaaggaataccgtcgagaattgggaccaggtcacacggagatagtggttgagcagattagggatccgggattccgagatggcagtaaccacatttcccgagatgagctgcttaggatcaatcgagctgctgtggcggctccagtgctgcccagtgtgctgctccaaccggagggcgatgacaacgagactctagtggcagcagaaagttctccaattgtgatcctgggcgaacacgatccggacctggaagaggggcaggagatcaatgacaaccagattgcggagacacgccacgtgggccgggaggcctaccagcagcgagttccagttccaaatttcaatggcatcgagagttatgccaaccaaaagggtcccggtcaggatcaggagatcaatgtgcacatcgtacacgacggaccacagggaaaacctcagcaggcagaggcaaagacacccaaggagtcccagtcgcagcctgcgcagcaggccttggatcacttccaggcgcacagtgagcagagattccagcagcatcatcccagtcaagaggcaccatcacggcaattcctcaagagcttcaatcccattgtctccggaagtggcgacggacccctcccgaagggcagtttccactacgaggtgcagaatcctccacagcgcccgaatccacggacgccgaaggaaggagactacgccggccaatttgtgaaacctgctgcccagttggcctatcaacaggagcttagccaggtgataccacaagagcagagcaagccgcagcagcagtcggagttgctgcacaccaaggccatatcgtcgcctgcgccggatgtccagcaatattctggctatgcaggtcccacacccgtttccgccactccaaatagtctggtgtttgtgaccttgaacactccaagtccaccccactcctcggcggcaccatccattgcgcatacgccatttgagccaggagtccagatcacagtgaatcacccggctccccataactacgttgccgaggctcatgccgagccctcccagaccatcatccaacatgctccagctccagctccaaagaagtccactccatacacctttgtggaggttcagaagtctgtgaacatccacaacaagctaatcacggagaaggatggccgattggtggagcagcacgagaccatttacccccagccatatccgcagaatcacctttcgcaggcacctgatccttccaagagttacgcatctctggctaaaaatcctattcacgtggaatacgatagtacgccccaggaagtggccgtctcgcatgcctccgtccatttggatacaaatcattccggactcacagctccaggtcatagtgaacaaacggttcacccaggtccagtgtggtggagaagcacatacccataccatatgccgttccacaacctgtgcccgtgcctgtccacgtggagcactacgtggatcgtccgtacccagtggagaccattgtcgaacatcccgttccatatcccgtggagagggtggtggagaaaatcgtcgagaagcatgtgcccgttgaggtggagcgcattgtggagaagcccgtgcatgtggagaagattgtggaaaagtttgtggaccgaccgatggcgattccgatacatgtccccgtggccattcacatgcccatgccgccgggacactcctcgctgtcatttccccactactcccaccccaattccctaacgccctggacccactccgttgcccacattccaccgaaagtgttgcaaaactattacacacggatgctgaagaagttgctgccacagctcaccgccaaaacccctatcccccaatctcccaaagcggtcaagttgagcaagccggtggcggccatcaagcaaccagtgaaacccgtgaggggagaggcgcccaaggtcgccaccttcagtttggctgacatgaaattcgaccttcgacctccaccgccgccacagggctcaccttggttgcagggatcccgatatatctataatacccttcccgccgatttggccaccgccgccgcctcgactcccaccaaaatggttaagtcctacattggcgtcgttccagctccaacatctgcgaactcagacgttggggattccccgctcaccagcgagttcgatgagttccagcgatggcgcaacggacactccctgaagcgcagtcccgacttcgggcgcaatcttcagctggagtatggatttaagccccctttggtgccgtccatggagatcgacgacaagggcaatcccctcaagcaagccgaacaatcggagacccagtga

SEQ ID NO: 13470 - protein, 832 aa, DROSOPHILA
MWPHRHQRHLLTAAATLCCLLAIIVQPALSDEPPILTSSSTPPSSAAVSAPGDLPQNLTVEAAATEALSDSSGKELNKQPAEQLIREVIEGPNLADEVRVDPDLERELKREGEDPIETETETEFVGVPGFLPTALPPKDSDSPTNGHGYIQFEINDELPVEVARRQRPIEQTVTRSRTETVNEVLSNLFPKGFSDIFRFSGNTDTSTTTSTTTNKAVVRPTVVDVVSTTEAASTEKQTKPPAPNATYYSYQTTVTKEYRRELGPGHTEIVVEQIRDPGFRDGSNHISRDELLRINRAAVAAPVLPSVLLQPEGDDNETLVAAESSPIVILGEHDPDLEEGQEINDNQIAETRHVGREAYQQRVPVPNFNGIESYANQKGPGQDQEINVHIVHDGPQGKPQQAEAKTPKESQSQPAQQALDHFQAHSEQRFQQHHPSQEAPSRQFLKSFNPIVSGSGDGPLPKGSFHYEVQNPPQRPNPRTPKEGDYAGQFVKPAAQLAYQQELSQVIPQEQSKPQQQSELLHTKAISSPAPDVQQYSGYAGPTPVSATPNSLVFVTLNTPSPPHSSAAPSIAHTPFEPGVQITVNHPAPHNYVAEAHAEPSQTIIQHAPAPAPKKSTPYTFVEVQKSVNIHNKLITEKDGRLVEQHETIYPQPYPQNHLSQAPDPSKSYASLAKNPIHVEYDSTPQEVAVSHASVHLDTNHSGLTAPGHSEQTVHPGPVWWRSTYPYHMPFHNLCPCLSTWSTTWIVRTQWRPLSNIPFHIPWRGWWRKSSRSMCPLRWSALWRSPCMWRRLWKSLWTDRWRFRYMSPWPFTCPCRRDTPRCHFPTTPTPIP

SEQ ID NO: 13471 - DNA, 4702 bp, DROSOPHILA
aaatacaacccagattccatcatatacatatgttctacgtttaagtagaacttccggcaaattagatactaaccgtcgtaaacgtccaatttctccatgtgtaggctaaagacctcgtccattttccgagatatgaacatatgaactaaaactatagctattgagaaagtgtcgttgtgccgataggtttttggtttcgggtgtcccgttaggtcttgctctctttgcttttgttgtgggcgctccttccgtcttcttctttcaaacactcacaaaaacattgatttactgcacttttcgcacattcatttgatgcacaactcgacggcgatttgatttggcgggtggttggtttcgtgtcgaaatggaagttggattgtggggcttttttcgcgttcaataaattgccgtcttccgctaattagcaccacccgcacactgattccgattcaatatcaatttgaagttgctcacatggcacgaggcgaaataaactgaaatgtgttttcagtttttacagcgttgctttgttgtatttggctggtcggcagctgaacgtgtatttccttattttttatttataatttcacgtaactttattttggttgttttggccgctctcgctcgctcttttactgcacggccttgctctcgcttttttctctcgcgcagtgttgcaaagttttcagcgaggaacagctgattcagtatttcgttaaaaaccgttaaaaagcgtggttgttttgaaattgttgaaattcttgaaaatttttttttatcttgtttatgttcttatattaaaatcctggtcagacttatattttaaatattaagttaatcatattgtctatgaaatttgcaaaaattggtatataattccaagcatttgaaaaaacttcacagtgacacttacattcaccccaaaaaaagtaaaaaaaaaatagtcaggattacaaaagttatatttccagataatggtacaaaattttttcgatttataatgctgttgccattaaagaacccaaagaccgttgaaagcgaggtgaacccgaatgtgacgctactgaagcgccagatcgccgaggatggaaccaaaacacaggcactgttacttcaagcgttccgcttcgagttgcctagtgacgccaatgcatctccactcctccaggatcagttccagccacagtcagtcagcaggaggcattaagcccgctttggcatcactagatccacctaaaacacccaatagcatcgagaaaacaaagaaatccgggggatttctctcttttttgtttggcaaacgagacaggcgggcgaggaatcagagtgagacaaatggaaaccatatctcattggaggatcatgatgtcaggaagcttatacgtctctatagcaagcataatagcctttacaaccgccataatcgctactatggtaacaaagatatcgacgatgactgctacaacagaatggtgcgctcatttccgggaagaagcgtctcggaactgagatcctgtctggaggagctaaggacgctctttgagcgggaatacaccattatcgaacgtgctcgaaggaagtgtggagagataatgagtccttcaattcgctactataatgaatttcttttcctggtgccacatcttaatatacacttcgacaaggatcttcctgccagtggaactagcccactcgccgccggaaaacttttgcaaaatccgatagccaacccagagatgttgtgccaaaagttgaccaatttcacggattttcctctggccggttttcccggcaatctactaaccaagaggcccaaaaaagacccccaagaccggccaaacaagaagatcaaaccaattcctgatcaagaaaatgcgaagcaagaaaatcccatagagcaggaaattcaggaggcagaaaaagtcgctgatcatgaagtttcggtagaagagaaaatcagcgggttggaggatcaggaacagaaagacgcactctctccatcggagcagaagaacatacaaaacagtaaggataaaaccagtcatcatcattccaattgcaagatgtccagccatgagaaggatttagtatccaccaatttgacctgtccctgcaagccggaagtggaatcctcacaaagcccagtttcctgcccctggatagccgaaaattcaaagtgtgaacccccgtgtcgggaaacaccaccacaatctacgcgaaattccgtatccagtccgcaaaattcagatatttctgaatccagcaaagaaccggctcacttgatggagaaggaaccatccggtcaggaatccgcgaatagccagcaagtgcagatgctttgcgatatgatacgtaccgagctaaccactgctcccgattttatattcttcgatgccaagtggcggatcatcgagattctgagagaggtgcacaagcgccaattggttcaccagaaggccattccactcaacaatacacgccgaccgattccgccgcaaaaacgaaaaccgggtgagcccaatcagatgcttaagaatccaaaatgcatgtcggataggagtgcccacgaaaagggacaacagaggatgtgcgagcatcacaagggcagccattgcacctactgctgccggaacaacaactgaagtggaaaccaaaacccatccaccagcatccatcgctatcagcaatagccgtgacccacttaaccaagtgataagccaatccgagcgcaaaagcaaagccactttctctccgtcgcaaaagcagttacatcttgaagcaccatggatgtggacgaactgatcagcagctccaagctactcaagcattggccaagtttatttatcactctggcgctgatatggatcgtaaaaagattgttttttaaagggaatcgcgtattaaaaacatataatttagatgaacaagtcgaggaggagggtaagttttaagattatccacggtgaacataaagctattctattctattttccagttgaacactttgccgatcttggcgatgaactgcaaccggctctggaggataagccccatgtgcccttcgttcccggccagaatctcaaccctaatggagccaaacgcttatatgaactcatgcgtggacgccgtagcattcgctcctttaatagccatcccaaaccggatctcagcgtgatagaggactgcattcgggcggcgggaacagctcccagtggcgcacacacagaaccctggacgtactgcgtcgtacaggagccggaactcaagcgatccattcgggaaattgtggaacaggaggagctggtcaactacagccagaggatgcatccgcagtgggtcaccgatctgcgacccctgcaaaccaatcatgtcaaggagtatctcaccgaggcgccgtaccttatactgatcttcaagcagacctatggattgtcggagaatggaaagcgaatgaggaggcattactacaacgagatatccacttcgattgcggccggtatccttttgtgtgcccttcaagcggcaggactcgcatcgctggtcaccactcctttgaactgcggtccagccttgagaaacctgctcgggcgacccgtcaatgaaaaattactcatcctactgcccgttggttatccgaaagatggatgcacagttcccgacttggcgagaaagaatttgtcaaatattatggttactttttaaggtttatttacgtccgtgcagcttacgaaatagttcaataaaaccaaactaaaatttatggtaattcttatattttttctattgataaacgaaattttcacattttccttaaatttattcttcattataattgttaatcaaaatataatattcttaaatatttgaaacgatagtctccaccatccctgccaaccgatatacggctgctttccagcaccacgctttttggcctcttgtcaacactatcgataacgatagctacggtaagtgacacaaaagcaaagggaaaatttctacgtgcggttcgtgtgctgtgtgttgaaattacaaatagccaattatccggcattaatcgttttagggctctctcgattttaattgtattatattgtactataatacagatataaacccgatttgatcgagtgtaacggaaatcgacgcgattcccatcaaggtggtccgtacctaataagtgttcacgaatgagagcaaagcagatggcggagagcgtcctgcgtttcaatgtgtgtgtgcgtaaacgagtagaaagcggcggtaaaaaccttctcgtgtaacacaaaacaaattatacaaaacattcaatctcaatatcaaaacgttactgtattgtctattgaaaaacaagtacaagcgtacgcagggaaattggaaaatccattgaaaatcgagagcaacagtcgccggagcggaatcagcggacgaaaacaaaaacgctttaaaaacgcagccgatacagaaagtgccagcgtgtgagtgtgcatatgtgtacgtagttgtgggcaaagagaacggtaaagaataagaaatcgaaaaaaaaaaataaaaaactaactgtggaagtgaaaaatgcgcgactgataaagattgtgataatcacggcataatataacaagcaaaaaagaagaatgaaaagaaaccgcaaccgaattggttgaataatatttaagccaacgccagtgctgcataaatcggtgca

SEQ ID NO: 13472 - DNA, 2247 bp, DROSOPHILA
atgctgttgccattaaagaacccaaagaccgttgaaagcgaggtgaacccgaatgtgacgctactgaagcgccagatcgccgaggatggaaccaaaacacaggcactgttacttcaagcgttccgcttcgagttgcctagtgacgccaatgcatctccactcctccaggatcagttccagccacacaagcataatagcctttacaaccgccataatcgctactatggtaacaaagatatcgacgatgactgctacaacagaatggtgcgctcatttccgggaagaagcgtctcggaactgagatcctgtctggaggagctaaggacgctctttgagcgggaatacaccattatcgaacgtgctcgaaggaagtgtggagagataatgagtccttcaattcgctactataatgaatttcttttcctggtgccacatcttaatatacacttcgacaaggatcttcctgccagtggaactagcccactcgccgccggaaaacttttgcaaaatccgatagccaacccagagatgttgtgccaaaagttgaccaatttcacggattttcctctggccggttttcccggcaatctactaaccaagaggcccaaaaaagacccccaagaccggccaaacaagaagatcaaaccaattcctgatcaagaaaatgcgaagcaagaaaatcccatagagcaggaaattcaggaggcagaaaaagtcgctgatcatgaagtttcggtagaagagaaaatcagcgggttggaggatcaggaacagaaagacgcactctctccatcggagcagaagaacatacaaaacagtaaggataaaaccagtcatcatcattccaattgcaagatgtccagccatgagaaggatttagtatccaccaatttgacctgtccctgcaagccggaagtggaatcctcacaaagcccagtttcctgcccctggatagccgaaaattcaaagtgtgaacccccgtgtcgggaaacaccaccacaatctacgcgaaattccgtatccagtccgcaaaattcagatatttctgaatccagcaaagaaccggctcacttgatggagaaggaaccatccggtcaggaatccgcgaatagccagcaagtgcagatgctttgcgatatgatacgtaccgagctaaccactgctcccgattttatattcttcgatgccaagtggcggatcatcgagattctgagagaggtgcacaagcgccaattggttcaccagaaggccattccactcaacaatacacgccgaccgattccgccgcaaaaacgaaaaccgggtgagcccaatcagatgcttaagaatccaaaatgcatgtcggataggagtgcccacgaaaagggacaacagaggatcaccatggatgtggacgaactgatcagcagctccaagctactcaagcattggccaagtttatttatcactctggcgctgatatggatcgtaaaaagattgttttttaaagggaatcgcgtattaaaaacatataatttagatgaacaagtcgaggaggaggttgaacactttgccgatcttggcgatgaactgcaaccggctctggaggataagccccatgtgcccttcgttcccggccagaatctcaaccctaatggagccaaacgcttatatgaactcatgcgtggacgccgtagcattcgctcctttaatagccatcccaaaccggatctcagcgtgatagaggactgcattcgggcggcgggaacagctcccagtggcgcacacacagaaccctggacgtactgcgtcgtacaggagccggaactcaagcgatccattcgggaaattgtggaacaggaggagctggtcaactacagccagaggatgcatccgcagtgggtcaccgatctgcgacccctgcaaaccaatcatgtcaaggagtatctcaccgaggcgccgtaccttatactgatcttcaagcagacctatggattgtcggagaatggaaagcgaatgaggaggcattactacaacgagatatccacttcgattgcggccggtatccttttgtgtgcccttcaagcggcaggactcgcatcgctggtcaccactcctttgaactgcggtccagccttgagaaacctgctcgggcgacccgtcaatgaaaaattactcatcctactgcccgttggttatccgaaagatggatgcacagttcccgacttggcgagaaagaatttgtcaaatattatggttactttttaa

SEQ ID NO: 13473 - protein, 748 aa, DROSOPHILA
MLLPLKNPKTVESEVNPNVTLLKRQIAEDGTKTQALLLQAFRFELPSDANASPLLQDQFQPHKHNSLYNRHNRYYGNKDIDDDCYNRMVRSFPGRSVSELRSCLEELRTLFEREYTIIERARRKCGEIMSPSIRYYNEFLFLVPHLNIHFDKDLPASGTSPLAAGKLLQNPIANPEMLCQKLTNFTDFPLAGFPGNLLTKRPKKDPQDRPNKKIKPIPDQENAKQENPIEQEIQEAEKVADHEVSVEEKISGLEDQEQKDALSPSEQKNIQNSKDKTSHHHSNCKMSSHEKDLVSTNLTCPCKPEVESSQSPVSCPWIAENSKCEPPCRETPPQSTRNSVSSPQNSDISESSKEPAHLMEKEPSGQESANSQQVQMLCDMIRTELTTAPDFIFFDAKWRIIEILREVHKRQLVHQKAIPLNNTRRPIPPQKRKPGEPNQMLKNPKCMSDRSAHEKGQQRITMDVDELISSSKLLKHWPSLFITLALIWIVKRLFFKGNRVLKTYNLDEQVEEEVEHFADLGDELQPALEDKPHVPFVPGQNLNPNGAKRLYELMRGRRSIRSFNSHPKPDLSVIEDCIRAAGTAPSGAHTEPWTYCVVQEPELKRSIREIVEQEELVNYSQRMHPQWVTDLRPLQTNHVKEYLTEAPYLILIFKQTYGLSENGKRMRRHYYNEISTSIAAGILLCALQAAGLASLVTTPLNCGPALRNLLGRPVNEKLLILLPVGYPKDGCTVPDLARKNLSNIMVTF

SEQ ID NO: 13474 - DNA, 6117 bp, DROSOPHILA
aaagatacgcctatatataattaaatttagcggtaataacttctctacttttcaaagccacttaaataagaaaagcaaaccttatttttttagcctaaataacttattgaactggaatagaaggtggaaaatttgacaagagcacgcatgaaatttccgtaatcaatatattattaaccaaagatccccacaccgaataccctggaaagataaaaatgaactattggtggaaatatcaacaccgctcccaatttatatagaatattttatacatacaaaacatatacatattgtaaaaaatgagaaaaacggtaactaaaatccaatcagcaattttcaaaaattgtatgtaaatagttaatgatatttcaatttgttacctaattattttgttaacaactttgtaagattcctttaatttaatgttaaggatgaatacctgccatcaccttgacgacattttgttgttttcgttttcattttccgcattcaaatgttgttcacaatatgtttttggaaaatacgtagttaaatgaaagctaaattgcaaataaaagcaaatacaataaaaatattaaaaataaatgcagtcttatctattcggcgtgagtttgattatatgggtaagtacttttttttgaaccctattagaaagtaaataaatgcataatacaattaaagttagaaagcttgccatatttttttacaaaagctgaaatttttaaatcatttttaatcacagggtcgtccgtgggttaaaattgttgttttgcgtgcaaaaatcgaaaacaactcacacacgcacactcaagaagaacaaatcgcgcgagaagaaggagagaactttaagatccaagtggcgctctccgatcctctcagtggtttggttatcacccagaaaaaacaacaatcgcactgcaccggcgagaggcattcgaagtcaggttcgatggcccgagaaacccactctcgaagtcagttcaatttgtttgctcggcggcgcagatcgtgagttgcggaaagtaattggcaaaaattaacgcaatctaccggttgtccagatttttcagtgtattcattacccacccaaatatgcccctcaatataagaaaagtgctggtctgcgatgctgtggacaaatcctgcgtggagctgctggaacagcatgggattaaggtaaggttcgccaatcccctgacgtgacagtcgattatttgttggagtaagcaaaagcttacacccatacaagtgctcaaaagtacagtgcgccctcggataaaaatacaaataattaaactaagtataaccacacaaaaaatgttttttcgacgaaaactaacactaaaaagatattaaatatttgaaagtctatgcctacaatgcaattcatttaaattaagctattcgattgcttttacttatcgagtacacactgtatgtgaatttgcaagcatgtaaaagcgcttagaagtggacaaatagaaaataagtgcatttaatttattgcacaatttaatcaacgttgttgaccatatattttccttctttttttttgacaaggttacctacaaactaaagctccccgtggaggaactgtgtcaggaagttaaggtaagtggcttagggatttcagtacaggtaaataagtaaatacatacacacgttcagatgtatatgaacgagttaagtcgctgggatgaaagctttgcgaatgattcaagtgtggttaaaaacatgtgcaacgctctgagatatgggtgcattgtatatgtgtgtgtacatatatgatagtacgcgtgggcgttacataataataacatttcaattagtctgtaactaagcaatctaagcacatcaaaccgaaagtatatttcaaaactactgcagtatggagattgtatttaacaaaattaaaactaatgataaggaattgacccctttttttaacattatcatctttgttatggaatatagaatgtttttacaaatcttattttccttgtctccaaactttaagccttattgggttaatggctaagagaatattttcaccgcagttataaagataaaataaacaaaaactagaaaaaaacattttgtggcttcttcaaatcaaaatcaattactctcataatttatttaaatttgttttctcttgcacgaaaacagctttaaattttgacaagcatgtttgtctcaattagttaaaccgcttcatgtctgtatgggcacgaatgcatgttttgaattttatttgatttagagacggatacttttaattggtgattttattgaataacataaaagcaaattgcaagggtcagaaaataagtacttgacaacaaattttttttcacgttcgcagagagaaaaagaatttagtctgaaccaaatggtttttatacccgttagattctttgaaatttatgtaacaggtagcaggaaagcatataaagtattatatatatattattgattagattcattggccaagtcggtatgtccgtccttctgtccgcccgtctgaacgcaaactaccacgcccacaattttgacaatttctatcgatataccaaagaatttttgtaatttcgctcgttcgcactcccacaaaccaaataacgggtatctgctagtcgagtatctcgactatattattctctattgttcattttaaactgcccagcattttaaaccacttttcgaaatgcactttcagattttattctacaaaataaaaaaaactattccttttaaatggcaataatctgctgtgaacaattgggccagacattgttatcaccatttattactatcggtccaatagttcttatcaatcaaacggccgatcagacgatgttgcctcaacattaaataaattgtttccagtaggatcacaaattgccggaaaatatcaagaggttcaataatcttagccagaaacatacatacgccagacgaattgcttttatttatgataaagtacaggtgttaggtggtatcaatcacgtttccagaagaaagcagtaatcgatgccatccagatggccagggaaatgagttaggcaattagatgacaaatatttatatttacccagttgctaattattaaattacaccgcatttcagaatttcgacgcagccatcgttcgttcggataccaaaataaccgcggaagttttggccgccggatccggcagcctgaaggtcgttggccgtgcgggggcgggtgttgacaacatcgatgttcccgcagccacagcgcaaaatgtcgttgtcctgaagtaagtgctccgtaagcctccggtgcattgcagggcgggaaaagagtagccacgaacactatgccacaagaccaacttgtatttgtagctgaaagtctgatatagaaagtacaaacagtacaaagtacttatttatggttaattagagctcttgccatgcaatatatttcatggatattttaccattctgtttatagttcaagttggtaaacaattcaatccattttcggctccgatttcatttatttgcatttttaaacagtttctaatttatggaacgaaaatattaattagttgttctcggaaatgaatttatgtagccctttatggcagatttatcaattgcgaggaaatattactgttcagtaaaattgtggtaatctcaataatgatcataaacatgggtattcaaactagcagtgttttatggtatgcagcgtagtgtaatctccgatggcgcagctcacaaataattatgcgcattccgaatcgcaggattggcagttgatatgccatcccagcccagaatacccatgacttgggtcaattgacgccgtttgacacgcataattaagggacgacgagtgtcgatggagttgcgtgggtgtttgggtggctatgggttgtgggtggtgggtgctgggttggccacatccatgtcagatgtcctggaaagctggaaaattgccatatttcccacctcccattcaattcttttttggcggaatttgcataatgctgtctagtcacaacaaacgccacccatttgcccaccagaaacgctcaacttagcgcaacagctagtgtctagcgaggcatttagggaatgtttaactaaactctcgtcgctttcagcactccgggtggcaattccatttcggcctgtgagctgacgtgcatcctaattggctccctggcccgtcccgtcgtccccgccggtcagagcatgaaggagggtcgctgggacaggaagctctatgccggcacagagctgtatggaaaaaccctggccgttctcggattgggacgcattggacgcgaggtcgccattcggatgaagacctggggcatgcgggtgtgttttgaatggggtatttacttattttggaattttaatcgaactctgagtgctttgcagattattggttacgatcccatcaccacggaggctgaggccaaggcggcgggcatcgagaagatgacgctggaggagatttggccactggcggactacataaccgtgcacacgccgctgatcccagccaccagaagtaagtcgcgcattgatagaatatttataagagattaagagattaacatttaacagcagtatgcataaaattcaagctaaactatatagatttctttgctgaatcccatcagatctcatatcggcggagacactggccaagtgcaaacagggcgttaaggtggtgaatgtggcccggggcggcatcatcgacgagcaggccgtgctcgatggccttgagagcggaaaagtggccggcgcggccttcgacgtttatcccgaggagccgccaaagtctgcggtcaccaaggccctcatcagtcatcccaaggtggtggccacgccgcatctgggcgcgagcacttcggaggcgcaggtccgtgttgccgtggaggtggcggagcagttcatcgccctcaatggaacctcgccgaagtacaccagttatgcgggcgttattaacaaggaggcactcgcccattaccagtgaagcaaatcgaatattcacaaccatcagcacattctaaattcgatattcagcatttataaataaataagtttacaaccagggatgtaaacaacgtaaaaaccaaaatacacaagtaaaaataaaaagaagaagagttttcttaaaatactctcagatctaaatatttatatatgtatattattattcctagaaagttaccatttcaaggtatcgaaatgctacaaggacttagacgaaagctgacttgttttccgaatttcgtactaccgttttgtattttgataaaaaaaaatcaaggcttttaccagaaagcaagtttaatgttgattttacatatagccattcaaggaaaagcggagtttcagtgaactttcctgccaacttttgtgtgtcataatcttcagcatgtgcgaatacgttcaactgaaccaacattgccaggtgaaagttcatttatggcaaaggcaccacttgatattcttaaacaatttaacaaatttaaaagagaccagtagtatgatacttattctgattcaattgcagcagcttaatggaaaagcgctccatttaaagaagaaattcataaattctgcaacagaatcacacaatgggagctcatataatggacaaaaatgtatatggaactgtgaattctttttccctggaaatgaggaagatattggcaaatagcaataaaagaatatttcctggctgaaaatggtttacttattgaatagctgtagcaatttatgacaaatatacgtgatttatgtggtgaaaatagctttggaaaatgaaaacgagacaaaatggttgtgaaatgaaatattaagtgatgttaaatgtattaaatcaattgcggaagtgcaagacccattttcgcttgtcctgtcttcattccaatgcaaaaggaacttattctgtcaatgcataatttacgacacaggaagtgccaattccgtattattgtatgcaaacgtgaagtttcacaagatgatatgaattgtcatggcttctctggacaactcataaaaggagtaacgtgccattggaaactaggagaagttaaaattaaattttcatttcaatcagct

SEQ ID NO: 13475 - DNA, 1185 bp, DROSOPHILA
cgcagatcgtgagttgcggaaagtaattggcaaaaattaacgcaatctaccggttgtccagatttttcagtgtattcattacccacccaaatatgcccctcaatataagaaaagtgctggtctgcgatgctgtggacaaatcctgcgtggagctgctggaacagcatgggattaaggttacctacaaactaaagctccccgtggaggaactgtgtcaggaagttaagaatttcgacgcagccatcgttcgttcggataccaaaataaccgcggaagttttggccgccggatccggcagcctgaaggtcgttggccgtgcgggggcgggtgttgacaacatcgatgttcccgcagccacagcgcaaaatgtcgttgtcctgaacactccgggtggcaattccatttcggcctgtgagctgacgtgcatcctaattggctccctggcccgtcccgtcgtccccgccggtcagagcatgaaggagggtcgctgggacaggaagctctatgccggcacagagctgtatggaaaaaccctggccgttctcggattgggacgcattggacgcgaggtcgccattcggatgaagacctggggcatgcggattattggttacgatcccatcaccacggaggctgaggccaaggcggcgggcatcgagaagatgacgctggaggagatttggccactggcggactacataaccgtgcacacgccgctgatcccagccaccagaaatctcatatcggcggagacactggccaagtgcaaacagggcgttaaggtggtgaatgtggcccggggcggcatcatcgacgagcaggccgtgctcgatggccttgagagcggaaaagtggccggcgcggccttcgacgtttatcccgaggagccgccaaagtctgcggtcaccaaggccctcatcagtcatcccaaggtggtggccacgccgcatctgggcgcgagcacttcggaggcgcaggtccgtgttgccgtggaggtggcggagcagttcatcgccctcaatggaacctcgccgaagtacaccagttatgcgggcgttattaacaaggaggcactcgcccattaccagtgaagcaaatcgaatattcacaaccatcagcacattctaaattcgatattcagcatttataaataaataagtttacaaccagggatgtaaacaacgt

SEQ ID NO: 13476 - protein, 332 aa, DROSOPHILA
MPLNIRKVLVCDAVDKSCVELLEQHGIKVTYKLKLPVEELCQEVKNFDAAIVRSDTKITAEVLAAGSGSLKVVGRAGAGVDNIDVPAATAQNVVVLNTPGGNSISACELTCILIGSLARPVVPAGQSMKEGRWDRKLYAGTELYGKTLAVLGLGRIGREVAIRMKTWGMRIIGYDPITTEAEAKAAGIEKMTLEEIWPLADYITVHTPLIPATRNLISAETLAKCKQGVKVVNVARGGIIDEQAVLDGLESGKVAGAAFDVYPEEPPKSAVTKALISHPKVVATPHLGASTSEAQVRVAVEVAEQFIALNGTSPKYTSYAGVINKEALAHYQ

SEQ ID NO: 13477 - DNA, 3083 bp, DROSOPHILA
cagttaacaacgatcacgttgtagtctcccttcgaaagccaggctcgggtgatcttgacgttcatgccatcagtgtagcgaccattccacccgtggattacgaaacgagtaccctggttcttatcgaaatgagagtcttcgattgatgaagcatcagccctgatttcctttcccacggttgggttatgtttggtgtacaggtaaaaggacacgtcattggaacgtgtttcgatgagtgaatttctatttaagagctcctcggcatcctgtttgtccatccactcgaaactgccgtctatctgaggcacataccaaccattttcaccattgacacgttcctcaatgggaagagcacttactagaaaccaagaaatgttaccactaaatcgcaataatacgctctataactcacctgttgccaacaaagccgctagagctatgaacactctcatattgatatcttcgcagaatctaacgcactaagccaatttaccacagcttttataggctgtaagttatcaaaaagcagcaccacatataagatcaggatagtattgtaagataatcttatcatttgagggctatttattcgtttttaatgattgtatatttaatccccaatatgacgacatttacccgcataggaaagcacacaaaagctacacaaatatttgtaatctatgtcatgtatttaatctattgccagtcagatcaagatattctcgattgatttcgagtgcttcgaaaatcccagtgtacttcaggtatgagtactttttgaacggtggtaggtcctccaaaatcgatgggggttgctaagtataatttaggggctggcgaaatacgactcaaagagcaaatcataaatacaagtcaaattaagtcaattaataattgaaatacaaatgttcatatttttcaatagaaggcctaattgaatgaaagaaagactataattttttgagtattcagtaatgtattttattcagagaacatggttctactcaatcttgccgaagggtgcctcgctgttcacggggacatagaagtcaccctcgaccatgtaggcgttggtaattgctcccatgcgaacgctggagtaggtgcttccgcagttcttggcaacggcatcctcgtagtcatggcacttaatggatccaaagttgtcctcggtgacggcctcggcgtagtagagaacggagcgtgcgtgagagcaggatccggtggcgtccagtccgcatccgggctggctcttgcctccattggggtagaaggctcccttgccgatgggcttcaggaatcccagtttgccgccgttggtctggatggactctacgtagtgggcatcatcggtggatagacgcttagcgggcttatcgtagctgaagagggggagggcaggatccagacccacaatggtgtgaacgcgcttgtctccgacggtctttccggcgtatccagcaacatgggctcccaggctgtgtccgatcacctccaagctatcgtagtccaagccgtggtggtcgtgcaggtacttgatcatctcaccaaccttgccaccggctccaggaacagccagaacggaagaggcgtagtccacggatcgggcacgggcccagtcaacgacgatcacgttgtagtcgcccttggacaaccaggccttggtgatgcgggtgttcatgtcgtcggagtacctctgggtccagccgtggatgacgaagcgggtgccatgatccttgttgaagtgggaatcctcgacggagccggacttggccttgatctccttgccatcggtggggttcgacttggtgtagacatagaagttcacggcgttggtgctgatgcggccctccatctgggctccgttggccagaagatcctcggcatcctgcatgtccatccactcgaagcttccatcaagcttggggatgaaccagccattctctccattgacgcgctcctcaatgggcagggcactcactaatagaaatagcttatcaattacttgcgtctattgccaatatggatgaaaacttaccggctgccagtaaggcggcaagaacaaaaaacaccttcatgttgggggtctcaaattattgtggtggagaaagcattcatttcacgctttatataggcctgaaataataaccgtaatcaccattaaatatcagtaagcacttgaggctttgacagcttctgaataataagatagggccgatacaaacgattagaacgttgtactttgatagcgttttctccaacgaagttgataagggaaaaacctaatacagtagagcttttcaagttgcatcaacacaaagataaggtccagggtcacaacactaaccttgatattattttaatattatttgcatattataaattacacgaattaaaagtcttgtacttttataacttttctttttcctttattctttaaatcgaatcttgtaaaagttgattaaagttccttaattcgtttgtttattttaaccatgaaaccattgttacaattaactaactaatgactaacgatctcaaggtaagccatataacggtcaagtgtaaccataaatgttaataaacggaagtggttggctagcaatcttatggtttatgggcggctagattcgacaagcaagttcattgaagaaaacaagtcatttttcgtcgcctttttatgttcgaaaaagccagatatcaagtggaaatcaaagggatttcgcagaggaaaacacagttttgtaatgcccataaaaaccaaatattgcctattagtaataaaacggagagttacagttttttgaagtttattgagtttctattagttaatcatgccgaagggagccttgctgtttacgggcacatagtagtcaccctcgaccatgtaggcattggtatcagctcccatgcgaacgctggagtaggtgcttccgcattccttggaaacggcttcctcgtagtctccgcacttcatggttccgaagttgtcctcggagacggcctcggcgtagtaggttgtagagcgtccgtgggagcaggcgccagtcaggtccaatccgcatccgggctgggtctttcct

SEQ ID NO: 13478 - DNA, 1025 bp, DROSOPHILA
ccaacatgaaggtgttttttgttcttgccgccttactggcagccgtgagtgccctgcccattgaggagcgcgtcaatggagagaatggctggttcatccccaagcttgatggaagcttcgagtggatggacatgcaggatgccgaggatcttctggccaacggagcccagatggagggccgcatcagcaccaacgccgtgaacttctatgtctacaccaagtcgaaccccaccgatggcaaggagatcaaggccaagtccggctccgtcgaggattcccacttcaacaaggatcatggcacccgcttcgtcatccacggctggacccagaggtactccgacgacatgaacacccgcatcaccaaggcctggttgtccaagggcgactacaacgtgatcgtcgttgactgggcccgtgcccgatccgtggactacgcctcttccgttctggctgttcctggagccggtggcaaggttggtgagatgatcaagtacctgcacgaccaccacggcttggactacgatagcttggaggtgatcggacacagcctgggagcccatgttgctggatacgccggaaagaccgtcggagacaagcgcgttcacaccattgtgggtctggatcctgccctccccctcttcagctacgataagcccgctaagcgtctatccaccgatgatgcccactacgtagagtccatccagaccaacggcggcaaactgggattcctgaagcccatcggcaagggagccttctaccccaatggaggcaagagccagcccggatgcggactggacgccaccggatcctgctctcacgcacgctccgttctctactacgccgaggccgtcaccgaggacaactttggatccattaagtgccatgactacgaggatgccgttgccaagaactgcggaagcacctactccagcgttcgcatgggagcaattaccaacgcctacatggtcgagggtgacttctatgtccccgtgaacagcgaggcacccttcggcaagattgagtag

SEQ ID NO: 13479 - protein, 339 aa, DROSOPHILA
MKVFFVLAALLAAVSALPIEERVNGENGWFIPKLDGSFEWMDMQDAEDLLANGAQMEGRISTNAVNFYVYTKSNPTDGKEIKAKSGSVEDSHFNKDHGTRFVIHGWTQRYSDDMNTRITKAWLSKGDYNVIVVDWARARSVDYASSVLAVPGAGGKVGEMIKYLHDHHGLDYDSLEVIGHSLGAHVAGYAGKTVGDKRVHTIVGLDPALPLFSYDKPAKRLSTDDAHYVESIQTNGGKLGFLKPIGKGAFYPNGGKSQPGCGLDATGSCSHARSVLYYAEAVTEDNFGSIKCHDYEDAVAKNCGSTYSSVRMGAITNAYMVEGDFYVPVNSEAPFGKIE

SEQ ID NO: 13480 - DNA, 18727 bp, DROSOPHILA
tgcttacatacacttgcattgagtcataatcgtgtcgattgcagcagcgacgtccgctctcctgcacctcttccccttcctcatgctctgcagccacccaatctgctccctcttgtccttcgtcccctttcgctcatcccccgtttcagttcctcttcgctgtgcaaaaacacagaccagatgatcgcttagcccttttgacggggcctgacccatttggcgagccaccgatagccttctccagagaatcgcggagaagcagagaggacgcgataaaggagagctgaagaaaggcggagggggggggggggcagttgagccctgagagtggagagcactgggtctgggtcgctgaatgttgtgattgttgtgttacttttagttttaatcgctcccgatgatgtgtaatgatctttaaggggaaataatcagcctttgttggggcatcggggaaaatgtggtaattccgttaattcatattaagatgatcgtatttcttaaaataggttttaaaacattaataaagaggttttttccattcacaattaaacatatttctgccatgcaaatatttagatatcattgtttaacattttattttttattcttaattattcaataactttacattgcgaatttttttaaataatgcctatatcactatatagtgttacggatggatgtagaaaggtaatcttgggttgctgataacccctttttagtgcgttgacttgaaagagtttccagagacttcggatagttcggattgcattgtaaaactttgagatttcaatgcctgcaaaatcagttagtgacaacttctttttgtcatatactaaaaacataaaatgtttcaaatacattcgattaagtctcacaaacgggaatgcatttttccctgtgcagctgaaagtaatcctaacttgacaacattcttgagggacttgctactgtggatgtccctcctccatccccaccccgcagaaccccacgaaatcccctcgagaattgcatgcaaatgcgcatgtggcacacaaatcccccaaacatgcacacacacacacacacataccggtgcaacaacgaggtggtgggggtgaagaggaagacgcagcagagagagctccaaacattcgcgtgctctctcgctctccccctgtctttgccccgcgattacgtttgtttgccatttttgcgctctctcgcaacgtttttcgcaacaccagcggcagcggcagcaacgtcgtgccgtcgattcagtcgttcagtcggcgtaagcgagtcgagcgagcgagccccattcagtccggcgatttggctcttttgcacctgtgcaagtgtgtgtttctcccgcggtgcgtgcgtccgtgtaagtgtgtgtgcgtgagcggtggaactggtgcactggtattggggcatcggtgagtggggcgcgcgcgcgcttttgcagccgcagcatcgcagtcggcgtctctgctggcgctgacgtcgaagccgacgtttgttgttcggtgtttgcgcgtaacaaacactcgcagcggtttttgtgctgactttagattttagttttgctgataccgtaagagataaatgacgtgccgcggcgagcgacgaattagcggcccaaaacagagaaaaactcaacagccaaaacacacacagaataccagagaaacagaagcaagcaacaagcaaatgtttgacccgcgggaaaacaaaatgtaatagctaatgtagcaaaatgtgtttaagtttaagccagaaagttagcatataaaacgtccacaattagtgcaaaaaagttcaaaacctgatcaattttcgaaatcaaacaaatacctcaagcgtaaagaagtaacaataaaccaacaagcaaacaaacaaacaagcaacgaaccgagtgcaaaaacttagtgcaatttctttaataagaaaatttgaagcccccaaaaaaacagacataataatcatgtctagtgtgtagaacgttgcgtatacgcaatattgccaaacccattaacgcagacatcacgcatacgccgcgtcgtgcaaaatgattatggtgcaacatttggtggccgcctcggcgcacaacttcgccagccaggcggcggcatcgcttgtcaatgtgtccagctccagctctagttccagttcgagttcctcgtcctcgctgtcgctgtcttcatcctcatccagctcctcgctgtcctcggccacgcccacgccggtggcctcgcccgtgacgcccacatctccaccgccggcagccgccgcacccgcagaagcctcgccgccagcaggagctgagttgcaggaggatgggcagcaggctaagactcaggaggatcctactatgaaggaccaagacatgctggaaaagacgaggcaagaggtgaaggatccagttaatgtggaggaaccaggtgccatagttgataccgagtcagtgatggcgcggcaaagtccaagtccagttgcgtccaccaaagtccccgagtcactagaagagatttccaacaaatcgccgcccgttcaagaggatgaagaggagtctgaatccgtagcctccgactgtcgcgagttcaaagtgctctataatcacctaaggcagcagcaacaccaccactctccctcctcgccagacaagacgcgcagcaccctggacgatgtgtccaagatcctctgggagcgaaagcagcagctgcagcgcagctcagtgattaccgcagcacccactctgcagccgcagcagcaccagcagcccatgagcgacatcgaggacgaggagacgctggaggatgtcgatgacgcggatgcggacgtggaggcagacgccgaggacgaggagctactggagcagtaccaaaacggctacgactcgccactggatctgtccctgggtggagccaccagtgcagccgcatcagctgccgctgccgcctcggcggtcagtcgccgacggggacgcacctactccggcacggaatccgacgactccgcgcagtgcgaacgggcgaggatgcgactcaagccggaacgcaaggcggagagatcggcggcctacaagaagagcttgatgaagcgatattgtaagtggcaagcatttaaactaaattgttttgatagaggaaatagatcatttatcaattgtgttacttttctaaagcctttcgttggaatttttgaaatactcacaaaaggataactttatgattgaaaaaataacaatcatctttgatatgctccttaggcatttcgatgttataaaatattggagatataagcatattattttagagtatgtgtaacatattcctcgtaaccgttctatttaaaaatttaattcatattaaattatttttgaacagctcctttgagtagaagaaatccctttagatggtttttcaatttaaattctgtatcgattgctggtgactattcattttgtttttatacaaacgggcctttgagtggcaatgaatcagcctcgactgaaactcccccatctttcactggccaaaattgtgaaatgtcaatttggcaagagccagaaatgtttataacgaacaacaatgcacggaaaaagagttgggcagccagaggcgaaataaacattatttaaaatagcgcaatttccgccgccggcgctgcgttcagaagcggtagaagcgacaaaggcagcggcggtagaagcagcgagtctacgtcaacggcttcgtaacagtttcctaacccacctcaacaattttattgattacttgaggcggcaaacgccacacggagagccgaaaagagagcggcccgtctataaactattgcgctcagctggctgggtttctgattcggcctgtgtgtgtgtgtatgggtatggcatgggtatccgtatctggctctccgctcgctgcattcgctgctttgtaacgcgtatctgtgtgtctgcttttgcttttcgacggcagtgtagtggtgtggaatagtttcccagtcacttgctctaaaactgccacagcaactcgccaactcgcgactggcaactgctaaatgagctggagtctccgacttggtcttctgtatctctatctctagcagtatctgtatccctgtgtttgtgtgtgtcttgcacttgttacatacccacctatatatgtgcgcatatatatacatatatctggtaaccctagccaacaacttgtttcctctatttgacttttacacggggcgtcgtcgtcagcaaaacgactcccgggctgctgctgctgttgctgccttcacttttgccaaagtttaccccactttagtttgggttttcgctttgattttggctctggctttggcttgactggagccctgggctttggatacacactaaaccgccacaaaacgctgcctgccaattgcagttcttggccaagtggctggcggaaatgcttctctctcgcatctcacatctggccaaagtggtcgtcgccaacagatttatgcagtgtgggaatggggattggggaaaaatgtgcaagtaaaactaatgttcttcttgcacatggcaaaaaacgaaagtagaattcccaatcctaatcaagtggagaatatgtaatatacacattaaatgtagtagtaaatgttcttagtatatgtataaaacaattcgagttctaatcaattaagatggttaagcaaatttacatgttattagcagtacatccaatgcaaatattatctaaaataatatttgattaaggtaaaattgaaaggggcaactacttttcccagccagatgggaagccataaaaaaaagatatattttttgtgagcaggtgtcgtttaataagtatctagttaaaactttcaacagcataaatttataaatatttataaagaaatgaaaagtattaataatggaatatacaaatttaggtaattacatgatgttataatggaaagttcagcttttcttagaacacattggaactaaccctttaatatggatacaaagatatttaactcgatttcccacgaattgctcggcttaaaatgattggtagtacgcaaaatcttcaactggaaccccacttgaccgcctcgctccaaaaacttgcaacttctgtcgaaacattcccgtcagtcagtaaatctctcggcttccttttccttcgtttcggagttttattatttatttttcgcacacaaattcctagatgatatatattttccgcttgcgacacgacgagcattttcatcttttatttatatgggttttaacctttttctgcttttttttttttctttttttgtggctgtttgtgtgctttcctcatgacttcattttgtggggctttgttttggtttctggtcttaccttcaacctttcgacggcagcaatattgaaccacccacacattgaggcagcggaggcaactttcaattgcgacatgcggcggagagcggtgtcctctctttaccgctgccactgccccttttccgcggcgtttctttacatgacaaaccagcttggagcgtctgtgtttgctcactcggcgtctctgtgtgtgtgtgtgtgtgttcgcgtgcttgtgtaagtgcgctgtgggaaatagtgaaaaagagcgccccctccgaatgccgcccaccgcccgccacccaactcagcgctctgttgcttttttttcaggcctaacgcaaaacattttgaggtaggttgggaatagattggcaacaactgcgcgcacgcacacacttacatgccatcgcacacacacacacacacacacacagagcgtgcgcggaaaaacttaaatttctcgtttcgtggcaagaaattagcaaatgattttccattttttctcttttttctgccttttaacccaaatacggcggtggcgattttttcgcattagaattatgtaagccaatgccccatatatgaagtaggcctatgcgatacttacacaagtatctttctccggtttagattttgtaatcgcttttgctctccgcataattggccaatggaggttctgctcactcgcaacttatctccttatcggtagccaaggagagacgccgagtccccgattcctagtcgcagggattatgtcactagtcgggcaacgtaactcaattacaaaatcggattagcaaatgcagaaaatccgaattcagcaaatatctcccgttcgcagtgcagctgatgtggtgtggccatatggtcacttgatagccacagccgagtccaataggtcgggtcaaggcccaagacttgttgctgggaaattcgcgacaacgagtcgtatacgtaatgcggctacctagaacttgctgcgctagccgaaatttccgtttttggggctgcggtctcggattcttggtaaaccagctgcaaaatgcaacgaaagcccacaccattccgcatttaaatatattttgcttttacaatgaggaaacttatacttaaatttaaaagtctattgatatacatgccactcttttcgaataaattacattttgaggtttaatcatgacagcgctttttcttttataaaattatagttgtaaacttcctgattagcaatttaaacacaaaacaattatcttgacaatatcggagcagaattatagtattcactaccaattagcacttgtaaccccccagaaaggttggcgcgtgaccaaaaatgtttattttttcacgcatagaaagtgttaatataaacagaagctacgagaatttagacaatattcgactggtaaacgagaaaaaaaaaacttgaagtcaaaaatataatatagccaagcaggagccatttttcataaattagatatactttataaaatacaaatattaaacgaaatcgttgatactaaattatgcaaattaaaaaatgtttcaaaccgacacatttgtttataaaattaaaagagtaattgcctgctcagaatgcgacatatcattaacgtatctcttaaaacataacccagtgcataaaataaaacgcattacaaaatctcatttaggcaatcgcaacaaattagaaaggcatataaaaccatcttgtcgaggggcaaatgcgtcaatctatatgcatattataccacaccataaaacaagtaaaagtacttaatgacaaattaaaacgaaagattcagccgaaataaaaacaaatcatcggaaagtatatatagaattacattatatttccttttgtgcgatacgagaaattttcgagtatagagaaatagcggtcataaaaaatgcaaaaaacaaacgagcgcagcaaaaacagaaaaacagaaaatcacacagatcgcaaccgagtcgcgtatcatttcttaatgcggaaatattgaagaagaatttctgttgtctatataaatacgaataatgtgcgtttgtgtgtggacttgtattaactgcatatgtagccctaataaacacacattttcgtacgacaatgagaaattgcctgatatgcatatgtctcgctgcctgcgcctgtgtgcgtaaacaatgagaatcccgtgtccgtgtgagcagtgtgtctttgctggtgtgcgttatccgcgagaccttgaacttgagactgaatttccaaaaagcgcacacacacacatacgcgcgcaccgaagaagcgagagaacaacaactggcttttattctggccaccaatacacaggcagtcgtgaaagcagcgaagttggcagcggcataaaagccaaaataaggcggcagaacaggaatttagagagcagcagagagccgccaagaaagagagagagaggaagagaaaaaaggggaatgggaatgggaatgggaacgggaacgggaatgggactgggaataatggggatcgtgcaaaagcgaggcagacggaacccaaaaaaaatatatttgtagtacgtacacataaaaaattggggaagagacattcacaccaacaacaaatactacaattgccaaacaaacacataaattataatatttaaatatagaacttttgcgttgttgtcgcccgttcctgttgattttgctttcgactctttgtgcattttactttcgtctgtcgctgctgcattcgaattaacttgaattttgctttcttccacacccataattctgtttgcttttttcgctttttgcactgccataaattgtattattattattattgaaaataaataaagaaataaatacatatatcccagttggggaacattttgattccggtttggcgcattattgcgccgcacaagtgaaattatcgatacaaagcaatttctagtggctgtcgtttttggcttcagctattcggggaattcgcctggcatccgtcactggtattttttaatggttttttgttttgctaaatagaatttgaatatgttttttgcgggctaacaattggggcaaggctagttttatgattgattattaaaggaagggcgcacatttaatgtaaacaacataaaaatgcatgattaaatgtactaggaagatttgcaaattgatttcggtatctagaaatctttaacgccttaactgaacacagaaagttaaagatagatatttatcgaaaatagttaaaaagtgaactttcatttggccataatatgccttcagctcgtttcccccgtaattcgatcggccaaaaccaaagcaataatttcagccaacaactcccaagtatacagtttcatttgcctactttccactgattaatgtcagatgaaaatactggataggtgataaaggctgagctcaataggtaaatcccccttcagctgggcccacacagaaatcactttccgtttcttacaaaaccgcccacaactcacaagctcacaaatgtcggttgttgggcacatcaaaaataggccaataaccaaaatgccataaacaattacaaattgttgttgctgctgctgctgctgctgatggtgctggtgtgcaattgttattgctgttgtgggtcggacagacaggcgggcagcttctacggctttcggaaatgctatgaaaaattgtaaacaaaactcaagcaccacggatgacgccttatccaccgcacagccgaaaacaaacccagccaaactgagtataaaaaacaaaaagcatatcggctctataaggcgaactaatcatttagaggtaacaagcaggcagcgatggctcgtacctacattgacctactattgcggcaaatgctgcgctatccgccggaattgtgatgtaactgtcccaaaatgccgcgcacatatcaacgagccagttcggttcaagtccaaattcgaattcaacaaagaaaaatagcaaaaacccaccagctcacatgcacatgactttaccgttaatttctttgacatgtctctctgtgtgtgtgttgttttttattattattatttttttatgttgtttgccaattttgctttgttttctcgtaatatatttaatttttttctcttgtatttctgtgtgttttgtcggttggttagtttctgctggttttattagaccgcatttttagaggtcagcgcacatttggcgcagcattgcaatgttttgtagactctattaccactggctatttgtctttctttctgccgtgtttgtgtttgtttatgcaccattaacgctgaacctctggcggtctgattgtcggcttctatagcgttgttttcttttccatggtggcgccacaaatgcggtacagtgaaagctcggcggaataaacgggggaagaccgatgaacttcttccaggaaatctaaattcttcgccttccttccgttgttcacctaggcgtatacttaatttgaacgctcgtatattacccatacgcctaatatgccgcacaggaagtaatcgcacacgtttcgtttgcgcaataaactatttcaacgggaataaatacaataatctacttttgaattctcaggaattttctagagtcaatacacatgttgcttacaagttgcagtttacgatcaaaatacaagctgttgacacgcggaatatgtgctaaaagcacggtttaaatacgacttccagctttgaagttgcccaacaactatttcatttaaccattatatattaaacttttaccttaatttgtaaaaaatcaaaagtaaactatatgcacatgaatgttttcattctgctgtaaattgatttagacatttccatgtcagtcgtttaccatttagaactttaacttgtcggcggccacctgcaacaaattacgcatacgccgcgttggccgcagtaaaaaacaacacgtgagcacttccccacggaaaaactaaaagaaaaacgtagacaagcgaaaaaaatcgaggcaagtgacgggcatttccgacattttcacttcgacaagcgattaaagcaccaagtaaatagagggaaattctcgcaacgaaaacttggcgaaaataatatttataatttccgttaaaaagctgctgctgttgcaccagcaggccaattgtcgatggccgaggggggcgaggcggtgggtggttaaccaatgcaaccgcacagctgttttgttgccgcgcgatttccgtcacgactttggttttttatttttgtgctgcggcttttgaatttcttacatatcaagaaaatatatgggtatatacatttatatatatgtatatttttacatgcttctcattcacccacgacgagtggagcggcaatcaaaacgagacaactgcgttgcacagtgggtcaaatggcctataggacagagtaaaataataaacgttttttacaagaaaaaggtcaaaatatatttatatatttttttagattgtattgcttttgaaaacaaagggtattcaagtacttgtacctgctactttctcctatacagtgattaccacttccacttttcttggtggaaatgatatatctgcaaatatatggaaaatggttagttttacaccgctttacgaggcattatcggccagtgtgcgaagtcggccgggctgccgtgtatttaaaaagctgtaaaaagcactcgcacacagcggcaacatgcaataatgcagccagcaaagcataaattgtaaactcgtcgccgttgccgacaagccttgacctgatttctcttcctctctgctgccactcgtctgggcttgtgtgtgtgagtgcttggcgtggctgtgtgtgtgcgcgtatctgtgagagtgagtgtgcttgcaagcttcattgctccgctggctttgacgttttcctgcacactgcagttgccgcggatttgattcgtgtgaatgtgtgtgtgtgtatgtgtgtgtgcgtaccgcttgacattcaatgcaattttttttgcctctgcttattttcatgccgctgctgccagtgctgccgctgcatgaaataagtgaaaatgcacttttacttttcagctgcaacaacaacggccaaaggaaagtgagaagctaatttttgttgcctttcctctggcgttgtttttaacggttgcgagttcatggctcaccaaattggggcatttcaattgtttcatttcatttcgtttcgttgtattcgttttcctttttgcatatctcgctcaacatgacatttctatgaaattatgatgcgaatttttgtattattagctcgttggataggcatttttgacagctgtgaagaggacaggggcgtagccaagtggttggtgggcggattaaaggggattgaggggactgagagccctgcaaagcattccgtgatgaggccaagtattcgtttaattggaacagcaacggcatctggggattcgaaagtatgcattattctggtgattgaagcaatcgcaaatttaaactgatgttgctgaaggatgcttaattattcagctaatacctttgtggattttttttatatacatacatatatgcataattaatttccaaagaaatgtataattaattaaattttgttaatgaattcataatctagtgaatttggatatgttttatattgatatttttacggtttttctgtaaaagctagctttatatatcaaatcacatcaaggataggataggaattccagtctaatgacattaacttggcaataaaaccttagatgcattttcaacatcttaacttagagatgtattttcaaccacctcctcctttgctccttcatttcagacaccgaaattcctattgtcaagcaatcgacaagtccggcaccgcagcagcaactgcagcagcagcaccacctgcaacagcagcaacagcagcagccgcacaacggctccaccttcgccggcgccaccgctctgctccacataaagacggagcaaaatacgctgctcactccgctccagctgcagcagcagcaacaacagcagcagggtctacacggtgcggcaggcaacggaggcagcagcaacggcaacaatgcccaccagcagcaacagccgctggccatcccacaacgcccgctgctccacaatctgcttagcggcggtgccatccacaatccgcaccacagaaactacacgacggccacaacaggtgattatacacaaggcaaattaatgtcacattctaaaagcaacttgatcttaaaggatatgtgcaacaatttgttaaaattgattcaaaaactttttgattttgatttgagaactttttaaaattttagaaactacaaatgtaatgtttacttacatatgtacaaagttgtaacccttaatatgcaccaatctttgaactaactttgctactttaaattaatctcgaaagtctttattaaagtaacgctgcatttaaaatgacatttaatagataacttaacgtccgtatagtttcgaatgcatttgttataacaatgccagtttcaagttgaaagagatcttgttttttcgagtgcattcagtagtgaggcgagcgtgtccagcagcaaggtgaaccactgcacacgccctcgactcgattcgagccatatcgattgctaattgccccttttcttggctcgtcctcgctccgcgcggctctatcccgttcgcaggttcatttccgcccagtcccgcggacagcggcgtctccgacgtggacagctccagttccggcggccagccctgcgccgacgagctgaaggcgcgtctcgggatgccaccagccacctcggcgtcggcagcggccgcggcagcagcggcggcggcggcagcggcacacctgcacacgggcacctttctgcatccgaatttataccagaacaatgcggcaaattcgctgcggaacatatggaatcgcagtgttgggggtgagtatcgagtatgcctgagaaaaacgcaaccaattccaactgtgtgcttaagtttagaactgagtttaagggctagacttataatacattttttatacacatcaaattgggagtgtgtgaaacaagacaagatggtaaagggacttaatgacgtcaacttatagtaagaatttgaattgcaattttatttaaatttgcctttttaagactgaagttttgcacactgctgcctacttaccttagtgcagtcaatgtttacgatttagacaggtactaaggattttacacataattggcaatgagctaagattaaagtaaatcgcacaattatttcggggattcgatctaagctgagaacggttttatctcaaccaattaatcatatgacctaatggggaactttgcatattgcaatcaatttgaagttggtataatctgttgcatacataatgcactcctaatccagcgtactctttcctacaaaatgtcaggcaagcaaggcgcacgcacacatacccatgtacgtacagcacaatcaattgcaatgcgaatgtgttgcactcgctgcttttatgctctctgccaactgagtgcgtgagtgtgtgtgtgtgtgagtccgtgttgctgtataaaatctgtggtcatcgacacattgcctttgcgcaaattgtgaaggtcacaacgacaacgacaacgacagcaacagcagcagcagcagcgccaatgtggcaataatgctgctcgcgagagtgctccactctcttttcctccttctcccggagaggcggaaaagagagagagagagagagagtgaaagagtgccaaacaccaacgcaaatgcaacagcaacacgaacgtgacacatgagcaacacacgaacaacacagcgtgcgttgctctctgtgcgatgtgtctgtgagagagttggtgagagagtggcgctgcttacttttgtttttattcagattcagcccagtctttccccactctcatcctgtcccatgcccctgtgccccccagccacaccccccgtctaaaatggtccaccgaatccaaagacgactgcgaatccaaatccactgactgccaactggctgagccgcgaaattgggcaacgccaacgccggatgtaaaaaaaagaaaaaaaaaaaacttactaaatagcatacaaaattatacctgtgccaccacacagaaacagaaacagtgtgaaatagtcgcaagcgatctgcgatctgggtacaatgggacagaacgggttgccaccaagcagattcatttgggtatattatttcaatttaagtttaagtttagtgcacgttcttggatgttgcatatttgggtacttaccttatgatattaagctgtaacctaaaaatttaaattttagctctgacccttttttatactaatgagtaaataacttttaacggagtctaaaagtatgctacaatatatgaacatatgtgcattgaaaatcacaaaagtagcatgtctgtaagcaacacgaatttaaaaaatttatttgcaatgcacacagctagaatgatggttacgaaaatagtttcaggaaaacttttaatttgatgcacggtgattagttgattttaactatgaactggtatggagagaaaggacagggcacgtggtgataacgtgggctatgatgacattataatgtgttattgcacgtaaaatttaatatataactaaagtggtcaacttcaaagtttttagcggaaattggtggtttaagttggggaagctcaccagtatattcgttggttcagcaagccgcttttgttctcaagtactcatttatatatttgactttgttcttgcagtgcccgacaactactacggaagcagtggcgccggcagtgggggcacccagccaggtggtccgggaaacccccaaacgcctggctacctgacaacgtcctacttcaacgcaccgacagcggcaacggcagcggcgtcccagcgaggaaccacaatcaatggctatcattccctgcaccagcagcagcagcagcaacagcagtcgcagcaatcgcagcagcaacagcaactggcccaccagcaactgtcgcaccagcagcagcaggcgttgcatcagcaactgtcgcaccaacagcagcagcagcaacagcaacagcagcaacacccgcactcccaactgaacggtccgcatccgcactcacatccgcactctcatccgcattcgcatccgcacgcgggccagcacacgcattccacaatcgctgcagcggcggcagcggcagcagcatctgtcgtcagcagcagcagcagcgccgttgcagcggcagccatgctgagcgccagtgcagcggcagcagcaacggcggcagctgcggcgggcggatcccagagtgttatccaaccggcgacgtccagcgtcagctacgatctctcctacatgctggagctgggcggattccagcagcggaaggcgaagaagccgcgcaaaccgaagctggagatgggcgtaaagcggcgcagccgggagggatccaccacctatctgtgggagttcctcctcaaactgctccaggatcgcgaatactgtccgcgtttcatcaagtggacgaaccgggagaagggcgtcttcaagctggtcgactcgaaggctgtgtcccgcctgtggggcatgcacaagaacaagccggacatgaactacgagacgatgggcagggcgctgaggtactactaccagcgcggcatactggccaaggtggatggccagcggctggtctaccagttcgtggatgtgcccaaggacatcatcgagattgactgcaacggtgtgtgaagtgatgaggacgaggaggacgacgaggcctgtaaatatagttcgatcccagatcgcagacggatcgagctggaatggcaataggttttgggtggggtataaatcaaccggctagcggcaatagtggctgaaggccacgcgagatagggatttctttgtacatgcgttgagtttcttggttagccagcgataagcgtaggttacacacatagctgatagtcccaatacgcgtacatatacttatatatatatatacatatatatataaatatatattcacaccctgtgtcctgtaccctatacatacacccagctaaatcgacggtaaataatgatctattcatgggcgttagtgttgtacttgtaactgtagatttaactgtaaactgtaactgtaatgaatattgttattattggttattattattattattattactattactattattaatattataattattattgctactgctatggcggaaggaagaggacgaaggacgaccgaattgattcatattgatattcgatagatgtgtgtaatatgtaaatgagtacgaacccctatagctgcaagaatttctctatctctattgatctaatgctaaatctaaatgtatatgagtatgtatatgcctagcctaatgacctttcaactgtcccctagcccaacccgctgcccgaggacaagctcagtgcagatgcagatatgggtctatgtatgaacatatgtatacggagatctgaacgatctgcacgggtgtctgtgcttgggctaattgtttttgttgcttattttataaacgaagagagatggaaatttattatttcatagttttagctatttgtacgactacgtttaggatatttatttaagtgtttctccagctaatcccccgaaactttccccaaaacaacaaaaacacacacatcctaactggagctaagaacccagcaaactggtggtctaaactttcttgtaattattatttgataagttttgtatatttacaacatcaacagcagaaaagctcacaggataaacccgaagaaggcacttcttgagccctcgtttaagcagtcttagaacaccaaaccaaactcaagtctctcgatctgaagtttatttataaagcataaagttaaactaccgtattcttgttaacgtcacactgccacaaatcgaaacaagccttacataatggaacagatctggacatttaatcgaaccaaaccgagatactgacccatagtttcaacaatactgcaaccgcaatcctcaatgcaatataccgacaacttctacaacaatttccaaacactgcccaaaacgtgcaatctcttgaaaggataccttgaataggaaagagaataaaaccaactcctagttctttaatctaattctttaatagttgcgttctctaagtacctttatctattattattattattatgtgtacgtgaagatgaaatctacaatatatcattttgtttatgatgattggtgattgatgatgcaaataaacaaagtgagtcttgagttcaactctgttcattgtaaacaattttttatgattattttttattttttaaataaaattattatttcaatttgtgcatgcgttttatttacacattcgcaaaccaaacacaccaaaaaaaaaacaaaccaatataaaaaccgaatgaaatatagaacgtaagcaaagatatgatacaaatatatggaacccgctacaaatttggaatctagatatacctcccatgaaaagtacataatgttgcataagttacaatatattcaaagtctatataggatagtcgagattcggattgacgatatttgaagtcgagatcacatattttagataaagtccagtcggtgtattttgtagttctaagacaccatttcacgaggtctcagtttatgaggtttcccccagatcatggatttatatgtatgtctatttattggcgtagatcaccgcatctaccattattacctagcgtaaatcagttattagttgttagggaatgaatatttaaatgttataagaccttagatataagcacacccacaacaagagcagcatcgaaccagatatgcaaaaatcacgagtcgagtacaacgaaatcggtaaacaagaatctgagccacaacccggataatgcagctttaaatcgagatagtacatttaaatttcaatctcctatttcccagagagctctcctttcacttcgatagcctaaatcagttggagactccaacccgaaagcatttatacatgctaagcacgataattgtacatatacaacttctggacctcatgactccactcgattataaacgtattttatatgtatacaccaattatttgttagattggataaccccgaatggctggataagaccaactaaattatatgcaatagaatatcgatgccgttgggcaagatttctatgctaggctaaggctaagacaagatatctttctattggtaactcaaaaacgaaacgaactatatagcttttaaatggaaacgtgcgattattcaaaggtattctatgccgcctgagaatagtagagatatggattggcctagattta

SEQ ID NO: 13481 - DNA, 5317 bp, DROSOPHILA
ctcgagaattgcatgcaaatgcgcatgtggcacacaaatcccccaaacatgcacacacacacacacacataccggtgcaacaacgaggtggtgggggtgaagaggaagacgcagcagagagagctccaaacattcgcgtgctctctcgctctccccctgtctttgccccgcgattacgtttgtttgccatttttgcgctctctcgcaacgtttttcgcaacaccagcggcagcggcagcaacgtcgtgccgtcgattcagtcgttcagtcggcgtaagcgagtcgagcgagcgagccccattcagtccggcgatttggctcttttgcacctgtgcaagtgtgtgtttctcccgcggtgcgtgcgtccgtgtaagtgtgtgtgcgtgagcggtggaactggtgcactggtattggggcatcggtgagtggggcgcgcgcgcgcttttgcagccgcagcatcgcagtcggcgtctctgctggcgctgacgtcgaagccgacgtttgttgttcggtgtttgcgcgtaacaaacactcgcagcggtttttgtgctgactttagattttagttttgctgataccgtaagagataaatgacgtgccgcggcgagcgacgaattagcggcccaaaacagagaaaaactcaacagccaaaacacacacagaataccagagaaacagaagcaagcaacaagcaaatgtttgacccgcgggaaaacaaaatgtaatagctaatgtagcaaaatgtgtttaagtttaagccagaaagttagcatataaaacgtccacaattagtgcaaaaaagttcaaaacctgatcaattttcgaaatcaaacaaatacctcaagcgtaaagaagtaacaataaaccaacaagcaaacaaacaaacaagcaacgaaccgagtgcaaaaacttagtgcaatttctttaataagaaaatttgaagcccccaaaaaaacagacataataatcatgtctagtgtgtagaacgttgcgtatacgcaatattgccaaacccattaacgcagacatcacgcatacgccgcgtcgtgcaaaatgattatggtgcaacatttggtggccgcctcggcgcacaacttcgccagccaggcggcggcatcgcttgtcaatgtgtccagctccagctctagttccagttcgagttcctcgtcctcgctgtcgctgtcttcatcctcatccagctcctcgctgtcctcggccacgcccacgccggtggcctcgcccgtgacgcccacatctccaccgccggcagccgccgcacccgcagaagcctcgccgccagcaggagctgagttgcaggaggatgggcagcaggctaagactcaggaggatcctactatgaaggaccaagacatgctggaaaagacgaggcaagaggtgaaggatccagttaatgtggaggaaccaggtgccatagttgataccgagtcagtgatggcgcggcaaagtccaagtccagttgcgtccaccaaagtccccgagtcactagaagagatttccaacaaatcgccgcccgttcaagaggatgaagaggagtctgaatccgtagcctccgactgtcgcgagttcaaagtgctctataatcacctaaggcagcagcaacaccaccactctccctcctcgccagacaagacgcgcagcaccctggacgatgtgtccaagatcctctgggagcgaaagcagcagctgcagcgcagctcagtgattaccgcagcacccactctgcagccgcagcagcaccagcagcccatgagcgacatcgaggacgaggagacgctggaggatgtcgatgacgcggatgcggacgtggaggcagacgccgaggacgaggagctactggagcagtaccaaaacggctacgactcgccactggatctgtccctgggtggagccaccagtgcagccgcatcagctgccgctgccgcctcggcggtcagtcgccgacggggacgcacctactccggcacggaatccgacgactccgcgcagtgcgaacgggcgaggatgcgactcaagccggaacgcaaggcggagagatcggcggcctacaagaagagcttgatgaagcgatattacaccgaaattcctattgtcaagcaatcgacaagtccggcaccgcagcagcaactgcagcagcagcaccacctgcaacagcagcaacagcagcagccgcacaacggctccaccttcgccggcgccaccgctctgctccacataaagacggagcaaaatacgctgctcactccgctccagctgcagcagcagcaacaacagcagcagggtctacacggtgcggcaggcaacggaggcagcagcaacggcaacaatgcccaccagcagcaacagccgctggccatcccacaacgcccgctgctccacaatctgcttagcggcggtgccatccacaatccgcaccacagaaactacacgacggccacaacaggttcatttccgcccagtcccgcggacagcggcgtctccgacgtggacagctccagttccggcggccagccctgcgccgacgagctgaaggcgcgtctcgggatgccaccagccacctcggcgtcggcagcggccgcggcagcagcggcggcggcggcagcggcacacctgcacacgggcacctttctgcatccgaatttataccagaacaatgcggcaaattcgctgcggaacatatggaatcgcagtgttggggtgcccgacaactactacggaagcagtggcgccggcagtgggggcacccagccaggtggtccgggaaacccccaaacgcctggctacctgacaacgtcctacttcaacgcaccgacagcggcaacggcagcggcgtcccagcgaggaaccacaatcaatggctatcattccctgcaccagcagcagcagcagcaacagcagtcgcagcaatcgcagcagcaacagcaactggcccaccagcaactgtcgcaccagcagcagcaggcgttgcatcagcaactgtcgcaccaacagcagcagcagcaacagcaacagcagcaacacccgcactcccaactgaacggtccgcatccgcactcacatccgcactctcatccgcattcgcatccgcacgcgggccagcacacgcattccacaatcgctgcagcggcggcagcggcagcagcatctgtcgtcagcagcagcagcagcgccgttgcagcggcagccatgctgagcgccagtgcagcggcagcagcaacggcggcagctgcggcgggcggatcccagagtgttatccaaccggcgacgtccagcgtcagctacgatctctcctacatgctggagctgggcggattccagcagcggaaggcgaagaagccgcgcaaaccgaagctggagatgggcgtaaagcggcgcagccgggagggatccaccacctatctgtgggagttcctcctcaaactgctccaggatcgcgaatactgtccgcgtttcatcaagtggacgaaccgggagaagggcgtcttcaagctggtcgactcgaaggctgtgtcccgcctgtggggcatgcacaagaacaagccggacatgaactacgagacgatgggcagggcgctgaggtactactaccagcgcggcatactggccaaggtggatggccagcggctggtctaccagttcgtggatgtgcccaaggacatcatcgagattgactgcaacggtgtgtgaagtgatgaggacgaggaggacgacgaggcctgtaaatatagttcgatcccagatcgcagacggatcgagctggaatggcaataggttttgggtggggtataaatcaaccggctagcggcaatagtggctgaaggccacgcgagatagggatttctttgtacatgcgttgagtttcttggttagccagcgataagcgtaggttacacacatagctgatagtcccaatacgcgtacatatacttatatatatatatacatatatatataaatatatattcacaccctgtgtcctgtaccctatacatacacccagctaaatcgacggtaaataatgatctattcatgggcgttagtgttgtacttgtaactgtagatttaactgtaaactgtaactgtaatgaatattgttattattggttattattattattattattactattactattattaatattataattattattgctactgctatggcggaaggaagaggacgaaggacgaccgaattgattcatattgatattcgatagatgtgtgtaatatgtaaatgagtacgaacccctatagctgcaagaatttctctatctctattgatctaatgctaaatctaaatgtatatgagtatgtatatgcctagcctaatgacctttcaactgtcccctagcccaacccgctgcccgaggacaagctcagtgcagatgcagatatgggtctatgtatgaacatatgtatacggagatctgaacgatctgcacgggtgtctgtgcttgggctaattgtttttgttgcttattttataaacgaagagagatggaaatttattatttcatagttttagctatttgtacgactacgtttaggatatttatttaagtgtttctccagctaatcccccgaaactttccccaaaacaacaaaaacacacacatcctaactggagctaagaacccagcaaactggtggtctaaactttcttgtaattattatttgataagttttgtatatttacaacatcaacagcagaaaagctcacaggataaacccgaagaaggcacttcttgagccctcgtttaagcagtcttagaacaccaaaccaaactcaagtctctcgatctgaagtttatttataaagcataaagttaaactaccgtattcttgttaacgtcacactgccacaaatcgaaacaagccttacataatggaacagatctggacatttaatcgaaccaaaccgagatactgacccatagtttcaacaatactgcaaccgcaatcctcaatgcaatataccgacaacttctacaacaatttccaaacactgcccaaaacgtgcaatctcttgaaaggataccttgaataggaaagagaataaaaccaactcctagttctttaatctaattctttaatagttgcgttctctaagtacctttatctattattattattattatgtgtacgtgaagatgaaatctacaatatatcattttgtttatgatgattggtgattgatgatgcaaataaacaaagtgagtcttgagttcaactctgttcattgtaaacaattttttatgattattttttattttttaaataaaattattatttc

SEQ ID NO: 13482 - protein, 883 aa, DROSOPHILA
MIMVQHLVAASAHNFASQAAASLVNVSSSSSSSSSSSSSSLSLSSSSSSSSLSSATPTPVASPVTPTSPPPAAAAPAEASPPAGAELQEDGQQAKTQEDPTMKDQDMLEKTRQEVKDPVNVEEPGAIVDTESVMARQSPSPVASTKVPESLEEISNKSPPVQEDEEESESVASDCREFKVLYNHLRQQQHHHSPSSPDKTRSTLDDVSKILWERKQQLQRSSVITAAPTLQPQQHQQPMSDIEDEETLEDVDDADADVEADAEDEELLEQYQNGYDSPLDLSLGGATSAAASAAAAASAVSRRRGRTYSGTESDDSAQCERARMRLKPERKAERSAAYKKSLMKRYYTEIPIVKQSTSPAPQQQLQQQHHLQQQQQQQPHNGSTFAGATALLHIKTEQNTLLTPLQLQQQQQQQQGLHGAAGNGGSSNGNNAHQQQQPLAIPQRPLLHNLLSGGAIHNPHHRNYTTATTGSFPPSPADSGVSDVDSSSSGGQPCADELKARLGMPPATSASAAAAAAAAAAAAAHLHTGTFLHPNLYQNNAANSLRNIWNRSVGVPDNYYGSSGAGSGGTQPGGPGNPQTPGYLTTSYFNAPTAATAAASQRGTTINGYHSLHQQQQQQQQSQQSQQQQQLAHQQLSHQQQQALHQQLSHQQQQQQQQQQQHPHSQLNGPHPHSHPHSHPHSHPHAGQHTHSTIAAAAAAAAASVVSSSSSAVAAAAMLSASAAAAATAAAAAGGSQSVIQPATSSVSYDLSYMLELGGFQQRKAKKPRKPKLEMGVKRRSREGSTTYLWEFLLKLLQDREYCPRFIKWTNREKGVFKLVDSKAVSRLWGMHKNKPDMNYETMGRALRYYYQRGILAKVDGQRLVYQFVDVPKDIIEIDCNGV

SEQ ID NO: 13483 - DNA, 10072 bp, DROSOPHILA
cacttcgacctggacatggagcacatcaattctctgcagccgccgcaaaaggcaccgcccgctccacctgtactcttccacaccgtttgccagcagcctgtaatgcaacagcagcagcagcagcttcagccaggtcagctcaagttgaaggccatgctacccaaccgcaatcgcgcgttgaaaaccgccgaggtagtggagtttattgactgcccggtggatcaacaacagcctggcgagcaggtgcgcacgcagcctttgggtgaggatggaaagactcctcagtttgcatgcgctggagaggatccacggttgcagcgccgtcgcggctttatgccggagctgaagaagggtgaactgccgccggagagcagcagcagtgacccaaacgagctagcccttaaaggtgagctaaaacagcctaatgtttccttttaaaggttcttattctttgtataattctttacaatcaggagccgacaacaatcagcccgtaccgacagcactggacaatagcgcatgcgcccagattccagcggtaagtcccacatgtcctacttacacaataatttctataacaactggattgtcaattacagcgaaactctggcggagcaataacccattcctccgaagttctgcagagcacagctatcagcgacaggccaaaggtaaaggcaaccaacaagaacaaccgaaagcaagcggccgcagcagcagcagctgcagcagcagcggcggcggcagcagcagcggccgcccaacacgcccagcaagtgttgccgaacccaatggtctccatctataataacctggtacgttttgctaacgcttaccttttttattcatacaaataaaacattgtatttatacgcagcatttgcagcacttgcagcatccgcatctccagtttcagcagcaacttcaactgcatcaccagcgagtagctggactggacaatgcagcggctgcagcagcagcagcggcttcatccgcgaacatggcctactctatttctccggcatctccacttccctcgcccactggcagcggcaactatgtcgatcagcagctgcaacagcagtccatggatgttgctctacagcgcaagacggccatggacgatttccgtggcatgttggagacggcggtaaatggtccaaggggcagaaaagacctggctcttaacacaccacagctgaacttcttcaaggacggctggcatatggtgggagtgcacaatttctttggtgatcagccaaagtcgcccactgaaacaccgcctgaaatggaggagactaccatgtcctcaccgaccgaagcagatcgtctcggatcggagcctcgggccgagatgaagaacttggccacgctctgctcggccgcagcagcagctgctgctgtggcagcggttaacaaggatcaggttgagattagttcggatcttgagagcgaatgcgaggatgatgcagaaggtggtgctggggcagattgcgaggaaaacacactgccgccggagccaattgaattggcggccgctctaagggaggatggcataattgtggaggaagaagaggatgacgaggaggaggatgatgatgatgaagagcaggataccaacagcggtgaggtcgacaagctaaactatgatgacgaagacgcggaggtggacaacgatggtgaagtagactacatcgacgaagacgaaggtggtggagaaggcgaagaagaagaagatgatgcagatgatgacgagttcttcttggacgagcctgatagcgaccaaggaactggcaacaataataacaattccaaaagcggcgccagttcgttgccattgaaacagcgcaaaatggccactcggttggaaaacctaatcctaaactcgcagacagtgtgcgacttcccgcctgaacttagcaactcggaactggttcatgtcctgccccaaataagcaatctcaaggcagcggccaacagcaacgcggctctgaacagcgtactccagcagcagttggcagcagcctccgcggcagcggcgcacgccaaagcgtctgtagtccaccagaagcagcagcatggagagggagatcagcaatgcggtaagatcagaaacggatatttatcatatctatattctaatttggttacgacgacgacctgtgtttgcagaagatgacggcagtgccagcgcaagtgagctatattcgggtttggagcactttgccaatgatggcgaaatggaggatatattccaggcaagttaatttaaactaaaaggaatatgaatgttaattgatttattgttctaagcattagttgcatataataaccatatatttgtactttttgttataggaattggcaagtagcctaaactatcccgagcttgccgagtttagcctcaatcagatgtgcaagggtcgatttgctggaaattgggcgcaatcttccggcaagtggactggtcaggagcagttggtgggtgtggtaaggtcgccgggtctcattaacccaggcgatgttccgcaggatgcccagcgacaggcgaatcttgtcctcctcgactatcccatgcagcaaaacatccaactagagcagcggctactcgatgctgaggaaatgcacctgcaggttagtttcattatccacagctaagggattcggattttaaaaaatacaatttacttttctttgtagcaacaccagcaaacaccgctctccttactgccctttacggatgagcagcagcagcagcttcatcaccaagctttgtccaatgcatccgattttcagcaacaccaacagcttgccctggaaaacgatccagaactaaagcagcagcttcagcagaactccaacgcgcgcataattaaagctgttgctgcccagcatcagcagcagcctccaaccaacttcgtttacaacgtggaaagcggcgacaagaatgctccgccagtgcaattgctcttccagttgccaccacacatggcgcaacatcaggcgcagcaacagcagggcgttggagagcctcttaccgaacagcaacagcagcagttacacgctgagcaggcgcatctctttcagcatcgaactggcggtcagcgtccgcccacccagagtgagttagagcaggtggctcaagagctattgcttcagcgaagcggccaggtgccggcaggagctcctgttgttggtgttcaggcaattccactcaagcaaaaacactttaacctgcatccgccgccgtgtccacccacctgtgtccagcatcaggtatgttcatacatctcaagagaatcaagtgaagtcttatgcgctatacactatattctaggtggccacgcagacgcatcctgcttctgttgtagtgccgcagcctgctgtaggatatacacaattcgctcttcaggcctctcagcaacagcaaatgcaacaaaacgagctctccatttggccgatggccacgcctactcccgcgcccagcagcggtgtaagctcgaccaagtcgatgcccggcggcattgccaaaaaggccattgacaagcagtcgcgcaaggaacgtcgttgcgtggtgcgccagacaccagcaggcattcaaggtgggtcatccctacataattagtatcttattcatttgtagtctttacatataaccagattacattttatttcatcaaatttaaataattaaatttaatttcccttgcagagaacaccaaactccatctacagcctcaggtcgcaacagcccagcaacaatttctagtgcagaaccagttagcagttgcgaccaccgtgagtttggacaagactatcgaaatagattcagagacggaatccaaccacgacacggcgctaaccttggcttgtgccggcggtcatgaagagctggtggaactgttgatcaataggggagcaaacatcgagcaccgtgataagaagggattcacaccgcttatactagccgctaccgctggccacgacaaagtcgtggacattctgctcaagcacagcgctgagttggaggctcaatcagagcgtacgaaggatacaccgttgtccctggcatgttctggcggccgatacgaggtggtggaacttctgcttagcgttggtgccaacaaggagcaccgcaatgtatctgattacactccactgagcttggcagccagtgggggctatgtgaacatcattaaactgttgcttagccatggagcagagatcaattcgcgaacgggcagcaaactgggcatttcaccgcttatgctagccgctatgaatggtcatacgccggcggttaagttgcttttagatcagggatcggacataaatgcccagatcgagacgaatcgcaatacggccttgactttggcttgcttccagggcagacacgaggtcgtaagtctgctgcttgaccgacgggccaatgtggagcatcgagctaagacgggcctgaccccactcatggaagccgcgtcaggcggttacatagaggttggtcgcgttctgctggacaagggtgcggatgtgaatgctgctccggtgccgacgtccagggatacggctctaacaattgccgccgacaagggccatcaaaagttcgtggagctcctgctatctcgtaatgccagcgtagaggtaaaaaataagaagggtaactccccactctggctggctgcccatggtggtcacctgagtgtggttgagcttttgtacgaccataatgctgacattgactcacaggataatcgacgtgtttcctgtctgatggctgccttccgcaaggggcacaccaagattgtgaagtggatggtgcagtatgtgtcccagtttccctctgaccaggagatgattcgcttcattggtaccataagtgacaaggagctgatagacaagtgttttgactgcatgaagatcctgcgtagcgccaaagaggcccaggccgtcaaggccaataagaatgcttcgatccttttggaggagctggatttggagcggactcgcgaagagagccgcaaagctgccgccgcccgtcgtcgtgagcgcaagaagaagaagaagatggagaagaaagaggagaagcgccgtcaacaacagggcaatgggcctggcggagacgatatgcaaggcgatgacgatgacgccagtgacaaggatgatgattccgacaaggacgatgaagacgaggaggcagcgccggccgccgcccgcgaggagggagactctggcatcgatcagggctcgtgctccagcggagacaccaaaggtgcgcgcttcggtggcagtcagtccgctcaggctgcggaagcggcagccaattccgtgtccaccaacagtcagggaaagaagaacaagaagcaggcgaaaaacaaggtgttgatatcggtggaaccaactcaaccagtaatcacatcgaactccgtcctcaagggcgtctgtgcgaagaagcatcccgcagtggaagttgtaaagcaacctcctgccacacaacaggctgctcctcttaagcggcaactcgatgtaaagaaggaggaacctgcgctcaaaaagaaggaagagaaaaacagctcgtccagcagcagcagcaagcgtgagaaagagaatcttgcgcccaaggaggttgcactgccagccaagcagcagcccagtagctccagcaaactgcagagcagcgagtctgcgagcaacataaacagcagcaccgctaccaacaccagtagcgccaatactactcggaaggaagttgcaaagccagcgtcacaaactgcgagtgccaccactttgaatcctgcaaagcgcaccgaagtcgatggctggaaggaagtagtccgcaaaagtagcgcccagcagaccacagcggtgggagcgagtggagccccactgcctgtcacagccaccagttcggccaccagtgtgcaacatcatccgcaccaccacctagccaacagctccagcaacagctcaagctccctgaccaccagcactactacagcagcgtcttcggttcccgagatgacgtgcaagaaggtgcaagtgcccgtaaatgccatctccagggttattggacgaggtggaagcaacattaacgccattcgggccaccactggtgctcacatcgaggtggagaagcagggcaagaaccaatcagagcgttgcatcacgatcaagggcttaaccgatgctacaaaacaggcacatatgctcattttggcactaatcaaggatcccgatgtggacatattgcaaatgctgcccaggattaacagcagtattaagcaggcgtctagtggcggagcaagcaccccgatgtccgtgggaacttgggacaatcgcaccgctgccggtgtgaatgcgtataccttttcttctgccgcgtccaccacctccacatcctccagctcgtcagctagctctactacaccagcgggagcttcgtacagcaatgcgcacaagcagcaccaacagcagccgcagtcagtgaagggcccaagtggacggtcatcaacgtcggtcaagtctaatggcagtagcaccaaggtatcggcttcgagtggatcgggttcccggagcggcagggctggcagtagctatcttgcccaacagcagcctggtcgcagctctggaggtggctcttcaaatggcgtgatcaagagcaagtcagaaagctcttccaaatccctgccagctgcacaaaagagcagtaccactttgggtaaatcatcgactgtgtcaccgggtgcacagaatttcgcaaaggcagcggctattggacagtcctcgcccaaaaaggctgagggtggtgctacatctgcggtggtcacctctgccggtggacgcagcagtggcgtggtggctccatttggacgtggcaagcctgtagctggccaaggaggacctgcagcaacggcggcttccaacgttgcccagctgggaagtgtgagtggcaacagcaacatattggctggaccaattggcacctttaatgtagcggatgtggctgctgtgaatgcagccgcggcagcaggagcagcagcagctaccaacagcaatgtgaaacccattgctcccattgcaccgcccagtaagcgagttggatctcccacccaagtccagcaacagcatcaaacacagcagcagcaacaacagcaactaccccagcccgcaccagttcctggcccacagccacaacaacagccgcttcagcagcagcaacaacaacaagctcctcagcagcagccacaacagccaaaccagcaacagcaaccacagacgtcccagcaaaatctcgtgatcaatacaaacctactgaacgatctgatggccgccagtgcagcaaacaccaccagcgatagcttcagtgcccagctagcagccaagttgtctagcgcatattccctgttcagtgactaccagcagtcgcagtggggcaagttgggtgatccaggcatcggcggtggagcaggagctgttggcgatggtctgccgcaagcggatgcttccaaggcaccaggatacaatcgcaacatccttagctcgcccgttggcagttccaaggcctcgtcgaatcactccacctcgcctcctgtgggtaatgtgatccaacagcagcagcagcagcaaccgcaatctagccaacaagctctcaacattatcaccagtggaccaggagggcctgctacagcaccagccagatcaccgatggtgtccgccaacgagggcaatcccgctgtgggtcaaccctccatgaatggaacccaaggattgggtgagacggctcctgctcattcaccaggcgttatcaaaccgcccacggccacagttcccatccagcgtcatgtgcccatgccgatctctgcgccggaggccggagcaccgcccacatttggagcgattggttccaacccagctagcggtaacaattctgcggctgcccaagccgcagctgccgccgccgcctcggcgatgatcgatcgtcagcagcagaatttgcagaatctgcagactttgcaaaatttgcaaaggatggtgggagcctcgcagcagcagcagccacaacagcagctgaactatccaatggaccccacatcgtcgttcatcgtggatgctaataacgtactgcgcctgaatccacgcgtcatctttccgcaaggcaacaccaagccaccgcagccaccgccgcagggtggaacgcagtcgaatgtgtttggaggaaatccaggcagacaaccacctggaacgggtgccagacagccaggaggagcagctgcacagcgttggtatggcggcactctggagtatccttcatacacgggccgtgatatgctgcacctggagaatggtgccggcggaatggcgggtatgggctcaccatctgccatgtcgcccaaccacgacgacattcgcaagatgccgcgccccataggcactgagcgagccgcatcatggaagtacaacaactttaacgttggaggcccgtcacttaacatggaagatgctctagccagtgtgttgcccccatgggcacatgagcttaaggctcagcctccaggtttgcagcagccgcctcctccgccgcagtcgcagcagcaacagcaacaaccgctcaactggctaaagcagcagccgcagcagcagcagtacagggcctacaacaacggaccctatccgcagcagcagcagcagcatgagccaatgaatgtaagcaaagattgatgaaatgttttatttaagattggcgttatttaatttgatattccaatatattcagatgcccatggactaccacaacatgcaggcacctccaaatatgagccagcagcagcagcagcacgtcaacttgatgccctcctacggctaccagcattttgtgggcgctcctggagccgttgacatctccgcacatatgccggacaagatggaggtgtgggatcaccacgataaacacgtaagttagcacttgcaatcagaacgactatatgaaattggttgaaaattcatatcactaaacgcaatgttttcctttttatatagatgccctggaccaactataccaccaactggtccaactgatgtgccagcgaaactcagatggaggatctcttcgatgcctgaattgagcagctcgtactgagagaacttctgcaaacaaattaccaggacctagcagaaacgtcaacatcaatagcatctcactgatttgaacatgcaaagcgaaataatattttttgaatttgtacaattactattcggattctcggcttcttctccgcaatcctaaatcttctaactgcctgtcaactttcgtggaaaccaactaacagcaacagctagatggaaaattgctacatggctttgttctttagtttaacaatataaaaacgtttgaattcgggtaattatttaacttcgcaggcaatacgtgaattttaaccgcaaacatataaacataataacgctaaagaaatgcaaaatgataaaaaaaagcaaaatgctagaagaaaacatgtttgaaactggtgcccaggcaactgggtccaatatatattatttatttttaaatgtattgatattttttgaagaagcatgaagttagtggtagctttttgtgtgttgagctatagggaaaacgaaacgaaaagtaaatcttctacacacacacacacacatatatacaagcactaacccctctcccgcacacaacacacacacaaacccacacacccgcatatacacaaatacatttacgttaggataaaagtcagtcttatgaatgaaacattaaattgaaatgtttagcgccagctaaagttaaaatacacacaaacttttattacaacacttatacataaatacatctatatatatatttaataacattaataaaggcaacaaatgaatgtcgaaactgtaaattcaaggcgcgcactattctctatatccccagtttttccccgataaaatccaaaccccaaactaaactaaactaaacaacaagaagctaacaaactggaaactagaacaaagctatgaaaacgcatatgcatacgctatgaatcgcaaaaaaaagtac

SEQ ID NO: 13484 - DNA, 7326 bp, DROSOPHILA
atggcctactctatttctccggcatctccacttccctcgcccactggcagcggcaactatgtcgatcagcagctgcaacagcagtccatggatgttgctctacagcgcaagacggccatggacgatttccgtggcatgttggagacggcggtaaatggtccaaggggcagaaaagacctggctcttaacacaccacagctgaacttcttcaaggacggctggcatatggtgggagtgcacaatttctttggtgatcagccaaagtcgcccactgaaacaccgcctgaaatggaggagactaccatgtcctcaccgaccgaagcagatcgtctcggatcggagcctcgggccgagatgaagaacttggccacgctctgctcggccgcagcagcagctgctgctgtggcagcggttaacaaggatcaggttgagattagttcggatcttgagagcgaatgcgaggatgatgcagaagacgcggaggtggacaacgatggtgaagtagactacatcgacgaagacgaaggtggtggagaaggcgaagaagaagaagatgatgcagatgatgacgagttcttcttggacgagcctgatagcgaccaaggaactggcaacaataataacaattccaaaagcggcgccagttcgttgccattgaaacagcgcaaaatggccactcggttggaaaacctaatcctaaactcgcagacagtgtgcgacttcccgcctgaacttagcaactcggaactggttcatgtcctgccccaaataagcaatctcaaggcagcggccaacagcaacgcggctctgaacagcgtactccagcagcagttggcagcagcctccgcggcagcggcgcacgccaaagcgtctgtagtccaccagaagcagcagcatggagagggagatcagcaatgcgaagatgacggcagtgccagcgcaagtgagctatattcgggtttggagcactttgccaatgatggcgaaatggaggatatattccaggaattggcaagtagcctaaactatcccgagcttgccgagtttagcctcaatcagatgtgcaagggtcgatttgctggaaattgggcgcaatcttccggcaagtggactggtcaggagcagttggtgggtgtggtaaggtcgccgggtctcattaacccaggcgatgttccgcaggatgcccagcgacaggcgaatcttgtcctcctcgactatcccatgcagcaaaacatccaactagagcagcggctactcgatgctgaggaaatgcacctgcagcaacaccagcaaacaccgctctccttactgccctttacggatgagcagcagcagcagcttcatcaccaagctttgtccaatgcatccgattttcagcaacaccaacagcttgccctggaaaacgatccagaactaaagcagcagcttcagcagaactccaacgcgcgcataattaaagctgttgctgcccagcatcagcagcagcctccaaccaacttcgtttacaacgtggaaagcggcgacaagaatgctccgccagtgcaattgctcttccagttgccaccacacatggcgcaacatcaggcgcagcaacagcagggcgttggagagcctcttaccgaacagcaacagcagcagttacacgctgagcaggcgcatctctttcagcatcgaactggcggtcagcgtccgcccacccagagtgagttagagcaggtggctcaagagctattgcttcagcgaagcggccaggtgccggcaggagctcctgttgttggtgttcaggcaattccactcaagcaaaaacactttaacctgcatccgccgccgtgtccacccacctgtgtccagcatcaggtggccacgcagacgcatcctgcttctgttgtagtgccgcagcctgctgtaggatatacacaattcgctcttcaggcctctcagcaacagcaaatgcaacaaaacgagctctccatttggccgatggccacgcctactcccgcgcccagcagcggtgtaagctcgaccaagtcgatgcccggcggcattgccaaaaaggccattgacaagcagtcgcgcaaggaacgtcgttgcgtggtgcgccagacaccagcaggcattcaagagaacaccaaactccatctacagcctcaggtcgcaacagcccagcaacaatttctagtgcagaaccagttagcagttgcgaccaccgtgagtttggacaagactatcgaaatagattcagagacggaatccaaccacgacacggcgctaaccttggcttgtgccggcggtcatgaagagctggtggaactgttgatcaataggggagcaaacatcgagcaccgtgataagaagggattcacaccgcttatactagccgctaccgctggccacgacaaagtcgtggacattctgctcaagcacagcgctgagttggaggctcaatcagagcgtacgaaggatacaccgttgtccctggcatgttctggcggccgatacgaggtggtggaacttctgcttagcgttggtgccaacaaggagcaccgcaatgtatctgattacactccactgagcttggcagccagtgggggctatgtgaacatcattaaactgttgcttagccatggagcagagatcaattcgcgaacgggcagcaaactgggcatttcaccgcttatgctagccgctatgaatggtcatacgccggcggttaagttgcttttagatcagggatcggacataaatgcccagatcgagacgaatcgcaatacggccttgactttggcttgcttccagggcagacacgaggtcgtaagtctgctgcttgaccgacgggccaatgtggagcatcgagctaagacgggcctgaccccactcatggaagccgcgtcaggcggttacatagaggttggtcgcgttctgctggacaagggtgcggatgtgaatgctgctccggtgccgacgtccagggatacggctctaacaattgccgccgacaagggccatcaaaagttcgtggagctcctgctatctcgtaatgccagcgtagaggtaaaaaataagaagggtaactccccactctggctggctgcccatggtggtcacctgagtgtggttgagcttttgtacgaccataatgctgacattgactcacaggataatcgacgtgtttcctgtctgatggctgccttccgcaaggggcacaccaagattgtgaagtggatggtgcagtatgtgtcccagtttccctctgaccaggagatgattcgcttcattggtaccataagtgacaaggagctgatagacaagtgttttgactgcatgaagatcctgcgtagcgccaaagaggcccaggccgtcaaggccaataagaatgcttcgatccttttggaggagctggatttggagcggactcgcgaagagagccgcaaagctgccgccgcccgtcgtcgtgagcgcaagaagaagaagaagatggagaagaaagaggagaagcgccgtcaacaacagggcaatgggcctggcggagacgatatgcaaggcgatgacgatgacgccagtgacaaggatgatgattccgacaaggacgatgaagacgaggaggcagcgccggccgccgcccgcgaggagggagactctggcatcgatcagggctcgtgctccagcggagacaccaaaggtgcgcgcttcggtggcagtcagtccgctcaggctgcggaagcggcagccaattccgtgtccaccaacagtcagggaaagaagaacaagaagcaggcgaaaaacaaggtgttgatatcggtggaaccaactcaaccagtaatcacatcgaactccgtcctcaagggcgtctgtgcgaagaagcatcccgcagtggaagttgtaaagcaacctcctgccacacaacaggctgctcctcttaagcggcaactcgatgtaaagaaggaggaacctgcgctcaaaaagaaggaagagaaaaacagctcgtccagcagcagcagcaagcgtgagaaagagaatcttgcgcccaaggaggttgcactgccagccaagcagcagcccagtagctccagcaaactgcagagcagcgagtctgcgagcaacataaacagcagcaccgctaccaacaccagtagcgccaatactactcggaaggaagttgcaaagccagcgtcacaaactgcgagtgccaccactttgaatcctgcaaagcgcaccgaagtcgatggctggaaggaagtagtccgcaaaagtagcgcccagcagaccacagcggtgggagcgagtggagccccactgcctgtcacagccaccagttcggccaccagtgtgcaacatcatccgcaccaccacctagccaacagctccagcaacagctcaagctccctgaccaccagcactactacagcagcgtcttcggttcccgagatgacgtgcaagaaggtgcaagtgcccgtaaatgccatctccagggttattggacgaggtggaagcaacattaacgccattcgggccaccactggtgctcacatcgaggtggagaagcagggcaagaaccaatcagagcgttgcatcacgatcaagggcttaaccgatgctacaaaacaggcacatatgctcattttggcactaatcaaggatcccgatgtggacatattgcaaatgctgcccaggattaacagcagtattaagcaggcgtctagtggcggagcaagcaccccgatgtccgtgggaacttgggacaatcgcaccgctgccggtgtgaatgcgtataccttttcttctgccgcgtccaccacctccacatcctccagctcgtcagctagctctactacaccagcgggagcttcgtacagcaatgcgcacaagcagcaccaacagcagccgcagtcagtgaagggcccaagtggacggtcatcaacgtcggtcaagtctaatggcagtagcaccaaggtatcggcttcgagtggatcgggttcccggagcggcagggctggcagtagctatcttgcccaacagcagcctggtcgcagctctggaggtggctcttcaaatggcgtgatcaagagcaagtcagaaagctcttccaaatccctgccagctgcacaaaagagcagtaccactttgggtaaatcatcgactgtgtcaccgggtgcacagaatttcgcaaaggcagcggctattggacagtcctcgcccaaaaaggctgagggtggtgctacatctgcggtggtcacctctgccggtggacgcagcagtggcgtggtggctccatttggacgtggcaagcctgtagctggccaaggaggacctgcagcaacggcggcttccaacgttgcccagctgggaagtgtgagtggcaacagcaacatattggctggaccaattggcacctttaatgtagcggatgtggctgctgtgaatgcagccgcggcagcaggagcagcagcagctaccaacagcaatgtgaaacccattgctcccattgcaccgcccagtaagcgagttggatctcccacccaagtccagcaacagcatcaaacacagcagcagcaacaacagcaactaccccagcccgcaccagttcctggcccacagccacaacaacagccgcttcagcagcagcaacaacaacaagctcctcagcagcagccacaacagccaaaccagcaacagcaaccacagacgtcccagcaaaatctcgtgatcaatacaaacctactgaacgatctgatggccgccagtgcagcaaacaccaccagcgatagcttcagtgcccagctagcagccaagttgtctagcgcatattccctgttcagtgactaccagcagtcgcagtggggcaagttgggtgatccaggcatcggcggtggagcaggagctgttggcgatggtctgccgcaagcggatgcttccaaggcaccaggatacaatcgcaacatccttagctcgcccgttggcagttccaaggcctcgtcgaatcactccacctcgcctcctgtgggtaatgtgatccaacagcagcagcagcagcaaccgcaatctagccaacaagctctcaacattatcaccagtggaccaggagggcctgctacagcaccagccagatcaccgatggtgtccgccaacgagggcaatcccgctgtgggtcaaccctccatgaatggaacccaaggattgggtgagacggctcctgctcattcaccaggcgttatcaaaccgcccacggccacagttcccatccagcgtcatgtgcccatgccgatctctgcgccggaggccggagcaccgcccacatttggagcgattggttccaacccagctagcggtaacaattctgcggctgcccaagccgcagctgccgccgccgcctcggcgatgatcgatcgtcagcagcagaatttgcagaatctgcagactttgcaaaatttgcaaaggatggtgggagcctcgcagcagcagcagccacaacagcagctgaactatccaatggaccccacatcgtcgttcatcgtggatgctaataacgtactgcgcctgaatccacgcgtcatctttccgcaaggcaacaccaagccaccgcagccaccgccgcagggtggaacgcagtcgaatgtgtttggaggaaatccaggcagacaaccacctggaacgggtgccagacagccaggaggagcagctgcacagcgttggtatggcggcactctggagtatccttcatacacgggccgtgatatgctgcacctggagaatggtgccggcggaatggcgggtatgggctcaccatctgccatgtcgcccaaccacgacgacattcgcaagatgccgcgccccataggcactgagcgagccgcatcatggaagtacaacaactttaacgttggaggcccgtcacttaacatggaagatgctctagccagtgtgttgcccccatgggcacatgagcttaaggctcagcctccaggtttgcagcagccgcctcctccgccgcagtcgcagcagcaacagcaacaaccgctcaactggctaaagcagcagccgcagcagcagcagtacagggcctacaacaacggaccctatccgcagcagcagcagcagcatgagccaatgaatatgcccatggactaccacaacatgcaggcacctccaaatatgagccagcagcagcagcagcacgtcaacttgatgccctcctacggctaccagcattttgtgggcgctcctggagccgttgacatctccgcacatatgccggacaagatggaggtgtgggatcaccacgataaacacatgccctggaccaactataccaccaactggtccaactga

SEQ ID NO: 13485 - protein, 2441 aa, DROSOPHILA
MAYSISPASPLPSPTGSGNYVDQQLQQQSMDVALQRKTAMDDFRGMLETAVNGPRGRKDLALNTPQLNFFKDGWHMVGVHNFFGDQPKSPTETPPEMEETTMSSPTEADRLGSEPRAEMKNLATLCSAAAAAAAVAAVNKDQVEISSDLESECEDDAEDAEVDNDGEVDYIDEDEGGGEGEEEEDDADDDEFFLDEPDSDQGTGNNNNNSKSGASSLPLKQRKMATRLENLILNSQTVCDFPPELSNSELVHVLPQISNLKAAANSNAALNSVLQQQLAAASAAAAHAKASVVHQKQQHGEGDQQCEDDGSASASELYSGLEHFANDGEMEDIFQELASSLNYPELAEFSLNQMCKGRFAGNWAQSSGKWTGQEQLVGVVRSPGLINPGDVPQDAQRQANLVLLDYPMQQNIQLEQRLLDAEEMHLQQHQQTPLSLLPFTDEQQQQLHHQALSNASDFQQHQQLALENDPELKQQLQQNSNARIIKAVAAQHQQQPPTNFVYNVESGDKNAPPVQLLFQLPPHMAQHQAQQQQGVGEPLTEQQQQQLHAEQAHLFQHRTGGQRPPTQSELEQVAQELLLQRSGQVPAGAPVVGVQAIPLKQKHFNLHPPPCPPTCVQHQVATQTHPASVVVPQPAVGYTQFALQASQQQQMQQNELSIWPMATPTPAPSSGVSSTKSMPGGIAKKAIDKQSRKERRCVVRQTPAGIQENTKLHLQPQVATAQQQFLVQNQLAVATTVSLDKTIEIDSETESNHDTALTLACAGGHEELVELLINRGANIEHRDKKGFTPLILAATAGHDKVVDILLKHSAELEAQSERTKDTPLSLACSGGRYEVVELLLSVGANKEHRNVSDYTPLSLAASGGYVNIIKLLLSHGAEINSRTGSKLGISPLMLAAMNGHTPAVKLLLDQGSDINAQIETNRNTALTLACFQGRHEVVSLLLDRRANVEHRAKTGLTPLMEAASGGYIEVGRVLLDKGADVNAAPVPTSRDTALTIAADKGHQKFVELLLSRNASVEVKNKKGNSPLWLAAHGGHLSVVELLYDHNADIDSQDNRRVSCLMAAFRKGHTKIVKWMVQYVSQFPSDQEMIRFIGTISDKELIDKCFDCMKILRSAKEAQAVKANKNASILLEELDLERTREESRKAAAARRRERKKKKKMEKKEEKRRQQQGNGPGGDDMQGDDDDASDKDDDSDKDDEDEEAAPAAAREEGDSGIDQGSCSSGDTKGARFGGSQSAQAAEAAANSVSTNSQGKKNKKQAKNKVLISVEPTQPVITSNSVLKGVCAKKHPAVEVVKQPPATQQAAPLKRQLDVKKEEPALKKKEEKNSSSSSSSKREKENLAPKEVALPAKQQPSSSSKLQSSESASNINSSTATNTSSANTTRKEVAKPASQTASATTLNPAKRTEVDGWKEVVRKSSAQQTTAVGASGAPLPVTATSSATSVQHHPHHHLANSSSNSSSSLTTSTTTAASSVPEMTCKKVQVPVNAISRVIGRGGSNINAIRATTGAHIEVEKQGKNQSERCITIKGLTDATKQAHMLILALIKDPDVDILQMLPRINSSIKQASSGGASTPMSVGTWDNRTAAGVNAYTFSSAASTTSTSSSSSASSTTPAGASYSNAHKQHQQQPQSVKGPSGRSSTSVKSNGSSTKVSASSGSGSRSGRAGSSYLAQQQPGRSSGGGSSNGVIKSKSESSSKSLPAAQKSSTTLGKSSTVSPGAQNFAKAAAIGQSSPKKAEGGATSAVVTSAGGRSSGVVAPFGRGKPVAGQGGPAATAASNVAQLGSVSGNSNILAGPIGTFNVADVAAVNAAAAAGAAAATNSNVKPIAPIAPPSKRVGSPTQVQQQHQTQQQQQQQLPQPAPVPGPQPQQQPLQQQQQQQAPQQQPQQPNQQQQPQTSQQNLVINTNLLNDLMAASAANTTSDSFSAQLAAKLSSAYSLFSDYQQSQWGKLGDPGIGGGAGAVGDGLPQADASKAPGYNRNILSSPVGSSKASSNHSTSPPVGNVIQQQQQQQPQSSQQALNIITSGPGGPATAPARSPMVSANEGNPAVGQPSMNGTQGLGETAPAHSPGVIKPPTATVPIQRHVPMPISAPEAGAPPTFGAIGSNPASGNNSAAAQAAAAAAASAMIDRQQQNLQNLQTLQNLQRMVGASQQQQPQQQLNYPMDPTSSFIVDANNVLRLNPRVIFPQGNTKPPQPPPQGGTQSNVFGGNPGRQPPGTGARQPGGAAAQRWYGGTLEYPSYTGRDMLHLENGAGGMAGMGSPSAMSPNHDDIRKMPRPIGTERAASWKYNNFNVGGPSLNMEDALASVLPPWAHELKAQPPGLQQPPPPPQSQQQQQQPLNWLKQQPQQQQYRAYNNGPYPQQQQQHEPMNMPMDYHNMQAPPNMSQQQQQHVNLMPSYGYQHFVGAPGAVDISAHMPDKMEVWDHHDKHMPWTNYTTNWSN

SEQ ID NO: 13486 - DNA, 4116 bp, DROSOPHILA
cactcttaatagcacagccacttggaggaaaaaggctcgtcctgtctccttggaatgctcccttactggtcaagtgggacgagccatgattgtgctgctcgaaggagtggctcccagtcaacagtaagcactactttgcctgattttctgattgtgtgattggtattcaaactcgtttgtatttcatttcagaaccgtagtaaaggtaaccgtgggtaagagccagactctctattcaagcctttccaagcgtggaaaggataagaacagtggcctgctgtcgattggtgctgttaacatagacattccgcaacatccggtggccctacatggaatgatgactcgaagctctaagcagttgtcgtccactctacaggagctgcgtgtaaagcgtaactctggtcggtccacgatgcgttcgcataccgccgaggagcctgagtctccgttccatgcccgcaactcagttggagccagcagtggaactggagtggccagcgaaatgcgggagcgcactgtttccggcggagctggtgcccagcagcagccgcaacaggcggctcgccgggcagcacacatggcgcaatccaagacaggcacagcacagcaccagaatggattgcttcagcccctggtcatgcagttcaatgtgctcttgcagagtctgtccatcaatgctgcgctacttccttcgctgcaggcccagtatcgcatgaatcatgttagttccatgggagtaactgggcagagggcaaagtttgttatcgacctacccacgcacacgctcagctttaataccaaaattcaggtgagctttacacatttataaactttttttttttacataatatttgttcagcgtacaaatttaagataagcccttttaaaaggtatataaaagcattttttttttaatattttagtcttgagaaaagagtaagtgtatgcatgggaaagaatattagttaaagatgaccgaaataacgggttaaaaatgcaattaaatgggctgaacttcctttttgagccaggacagagtaaattcgtctccttcgcgagataggattggggaaagagtgtcccagacttgttgatgatagctgttgagcagctttacttccgcatccgatagaagttcctttttaatcattttcgtttgcttcgggcacatggtgatggttttgaatgtgagggcgcctcggttggagaaattgtgtgccacctggcctggcacaatttgaacaatatcctcgacacggatgccaaactctccgtcctggtagaaaccaggctcattggaaataaacatgttcgcctggagaccaggatcgtcgggcatcagtcgaattcctacgcccatgggaccttcgtggacatttaggaagtgacctactccatggccggttccgtgtccgtagtccaaaccgacgtcccacagggccttcctcgctagagtgtcaagaacctgtcccttaaccttagctgggaatacggtggagccgaagctcagttggccctttaaaacgcgagtgtaggcttccttctgaaactcagtgggttcaccgaagtgaagggtcctcgtcacatccgtagtaccatccaagtattgagctccggaatcacacagataaatctctttgtcatttatcttcctgttggtttccttctttgggtgatagtgaataacagagccgttgggtcccgaagcactaattgtggtgaagctaaggcccatgtacttatcctttgtcgaccggaaggactcgagtttatcggcaccagacatttcatcgacttccgcacccttattcacttgatcctcaagccaggcgaaatactgacacaaagcgactccatcgcgaatgtggctgttgatgaagcctgcgatctcgacatcgttcttaatggccttcagcacacaaatcggcgttacctcctgaattctacgtgacttgggtatcaaagcagttagatagtagctgctggtgggtgctatccagatctttgactccctggtcgacacaatcttactgatttcaatgccaattgaggcgtaaggcaaaacgcttatctgcacattgttctccttttgatgctgcacaaaatcagtgggcaatttgccagagtccacaaagagcagtagttcatcgttggtcacaatcaagtaggagaagaagacggggttgaagtcaatgtccgagccgcgtaggttcaagaaccaagcgatttcatcgagagcactgaccaccagggcatcagcattcttctccttcaactgctggcgcaccacgtcccattttttggcgatagttacgccagaatgttctagtttcagggttataatcttgtttgaggtttgcggtggctgatcctcaccccagacctcgtcgatgaggttgccttcgatgggcaccagctggcattccgcggagcttagttccgtttcgatgggtttccatacgcggaacgacaacaggcgaggatccacgcccacaaagctgcccttgggcagattcttcgccagccaggcgccaatcgacggggtggcgctcagaccatcccgcattagaacccaattggagtccagctgcttctccgcctgctgatagtaacgaccgtcggtccacagcagtgcggtctccgtcgttatcaccgccgtgccagcggatccatcgaaaccactcacaaaggagcgtcgctcgtcatgctggcactggtactccgactgatgggcgtcgtccgagggcacaatgtatgccgatatgccgcaggagtcgcccacctgggcgcggagcattagctccctcaacctggtcagaatttgggtggtgctcctcttcattgtggttcctcaatggcagcaaaataactgagcgaaaaaaaaaacacagaatttgtagtccagttggggcgataagataatcaaccgtaatcgagtttcttgtatcccataaatacataaataatcgggcgaatataagtgtcacacttacaaaggctgtcaaactattgtttaaactacagggtgcaaatattttataatctttttgcactgacacattcaattttgcaattaatagcacgtcaaaaatgctgaactatattatttcatatcgcctccaagctttcagtattttttagcttttgcctaaaagggtaacactaaaagtgtagcgggaacaatttaaatatttcattaagaaacttatcccatattaatgtttttaatgtataattaaaaggagtataactcttataaagaagctcagcaacagtatttgaaaagaattcaactaagatcttaaaaaatgttgtagatgtaattaaatgtgttttttctttgtaattccttttagaatgagatgaaccttccatcggaagcttgtattggcctgccacctgttcacgttctggcggaatacattccagaccaccgccaggatcacacggaaaatgtcgagggcattgtcctgcgccaaggtggctacgtgaacgccagcgccgagatcggcgagttcgagcgctgcctgaccacagatctcctaaaccatctggtctttgtgcagaaggtgtttatgcgcgaaatcaacgaggttctgcagaaagtttacggaggagagaaacctgtgcccctgtggacggaagagagtggcgatagttccggagcagtacaggagtcctcgcttaagcgcatcctcttctcaatcaacatttccatgaaacgcatccaattgacggctactacaccctgctcctcggctgttcgattcgagaccggaatcctggagctgcagctgtctaaccgtgtgaagaacctaggcgatatgagcaatcgtaagctcttctttaaggctcacatagatttcaacttgtccctgggtcagattatacgcaatgtgattttcgacgaggccgagccggagttccagcagtacgcctttttccacactaccattaacctgaggaatgctttccaagacgaactgctcaacgaagacaaggagttgattctgctgaccctgaagagaccactggtctacgttcagccaattgccgtggacaaggcgatcctcgtgtggcttaactataagaatgcttacgagtactgggcggaga

SEQ ID NO: 13487 - DNA, 1992 bp, DROSOPHILA
cgatatgaaataatatagttcagcatttttgacgtgctattaattgcaaaattgaatgtgtcagtgcaaaaagattataaaatatttgcaccctgtagtttaaacaatagtttgacagcctttttattttgctgccattgaggaaccacaatgaagaggagcaccacccaaattctgaccaggttgagggagctaatgctccgcgcccaggtgggcgactcctgcggcatatcggcatacattgtgccctcggacgacgcccatcagtcggagtaccagtgccagcatgacgagcgacgctcctttgtgagtggtttcgatggatccgctggcacggcggtgataacgacggagaccgcactgctgtggaccgacggtcgttactatcagcaggcggagaagcagctggactccaattgggttctaatgcgggatggtctgagcgccaccccgtcgattggcgcctggctggcgaagaatctgcccaagggcagctttgtgggcgtggatcctcgcctgttgtcgttccgcgtatggaaacccatcgaaacggaactaagctccgcggaatgccagctggtgcccatcgaaggcaacctcatcgacgaggtctggggtgaggatcagccaccgcaaacctcaaacaagattataaccctgaaactagaacattctggcgtaactatcgccaaaaaatgggacgtggtgcgccagcagttgaaggagaagaatgctgatgccctggtggtcagtgctctcgatgaaatcgcttggttcttgaacctacgcggctcggacattgacttcaaccccgtcttcttctcctacttgattgtgaccaacgatgaactactgctctttgtggactctggcaaattgcccactgattttgtgcagcatcaaaaggagaacaatgtgcagataagcgttttgccttacgcctcaattggcattgaaatcagtaagattgtgtcgaccagggagtcaaagatctggatagcacccaccagcagctactatctaactgctttgatacccaagtcacgtagaattcaggaggtaacgccgatttgtgtgctgaaggccattaagaacgatgtcgagatcgcaggcttcatcaacagccacattcgcgatggagtcgctttgtgtcagtatttcgcctggcttgaggatcaagtgaataagggtgcggaagtcgatgaaatgtctggtgccgataaactcgagtccttccggtcgacaaaggataagtacatgggccttagcttcaccacaattagtgcttcgggacccaacggctctgttattcactatcacccaaagaaggaaaccaacaggaagataaatgacaaagagatttatctgtgtgattccggagctcaatacttggatggtactacggatgtgacgaggacccttcacttcggtgaacccactgagtttcagaaggaagcctacactcgcgttttaaagggccaactgagcttcggctccaccgtattcccagctaaggttaagggacaggttcttgacactctagcgaggaaggccctgtgggacgtcggtttggactacggacacggaaccggccatggagtaggtcacttcctaaatgtccacgaaggtcccatgggcgtaggaattcgactgatgcccgacgatcctggtctccaggcgaacatgtttatttccaatgagcctggtttctaccaggacggagagtttggcatccgtgtcgaggatattgttcaaattgtgccaggccaggtggcacacaatttctccaaccgaggcgccctcacattcaaaaccatcaccatgtgcccgaagcaaacgaaaatgattaaaaaggaacttctatcggatgcggaagtaaagctgctcaacagctatcatcaacaagtctgggacactctttccccaatcctatctcgcgaaggagacgaatttactctgtcctggctcaaaaaggaagttcagcccatttaa

SEQ ID NO: 13488 - protein, 613 aa, DROSOPHILA
MKRSTTQILTRLRELMLRAQVGDSCGISAYIVPSDDAHQSEYQCQHDERRSFVSGFDGSAGTAVITTETALLWTDGRYYQQAEKQLDSNWVLMRDGLSATPSIGAWLAKNLPKGSFVGVDPRLLSFRVWKPIETELSSAECQLVPIEGNLIDEVWGEDQPPQTSNKIITLKLEHSGVTIAKKWDVVRQQLKEKNADALVVSALDEIAWFLNLRGSDIDFNPVFFSYLIVTNDELLLFVDSGKLPTDFVQHQKENNVQISVLPYASIGIEISKIVSTRESKIWIAPTSSYYLTALIPKSRRIQEVTPICVLKAIKNDVEIAGFINSHIRDGVALCQYFAWLEDQVNKGAEVDEMSGADKLESFRSTKDKYMGLSFTTISASGPNGSVIHYHPKKETNRKINDKEIYLCDSGAQYLDGTTDVTRTLHFGEPTEFQKEAYTRVLKGQLSFGSTVFPAKVKGQVLDTLARKALWDVGLDYGHGTGHGVGHFLNVHEGPMGVGIRLMPDDPGLQANMFISNEPGFYQDGEFGIRVEDIVQIVPGQVAHNFSNRGALTFKTITMCPKQTKMIKKELLSDAEVKLLNSYHQQVWDTLSPILSREGDEFTLSWLKKEVQPI

SEQ ID NO: 13489 - DNA, 2215 bp, DROSOPHILA
caacaccaaccctctagaccttcttagcaaacccaatccagataacatacaaaaactcatacttttcctcaaaaaaactaaattataccacaaaatctaaaaacaaaacaggcatttgtacataacaagccagcaattagttaccaaattagatattaactaaattaagatataataacattgtaaataaatatagctgtaagccccgtagctaatgctatactatctaagttagtctagttttgtaaactattctatctatcataataaataataaataaaataaacatactttttatattgtctgtgaaaggtatttacattgcttgtgggtattgtccactccattggcttggactgctttgtaggatcggaagcctccgaatattcgggtatctcaacacccaatagtttacaaactttggacaaaaccacatccacataactggatatgattaagttagcctttttgtcatgttttgtgggctgcagattacaaatgacaaattttccaccgcattttagattctttaaaggaaggtctccgctgggaacgatctgcaaagtggttccaagcgcaatatttaggtcagcgacggtggagtgcatcacacccatttcgaggtcgttttcgggaagatcgtgctcccagtccagaacgttatcgtataggattcccgatctacagctacgacctttgctatccattgaagacttgcaggcacgttgcagggatttttgacccactgtttccacggcagatgggctcacaaattgccgtctgcatttcttacactgttcgatgtaaatgttgccgtgcaattcggaaagatacttccgatccagtccggatttcaagtggagaccatcaatattctgtgagattacgtactgcacatagccactttcaatcagggctatgatagccatgtgggttttagttggtctggcttcatcgaaggaaacattgaagtccggcttctcgcccttctcctccagggtccaaacgcccttgggtccgcggaaatccggaattcctgcagacgtactgatcccagctcccgtgtggaggacaacgtgtcccgatttcttgatcaattcagccaattcctggcacttttcggccacaacctcatcgctgtcgaaactctctggtgctcccaaaattcccttgttgtcgtaggctgacaatccatccgcgtagttgcagctcatggtttgataaaagtttgatctacttcaaaagcgactattatgtctttttggtattaatttgtttatattttgtacggctaaatgagtccatcgagattttattgtttataatatgaccgtatccgtaacgctacaaaatactttaaaacgtgccaagtgaaattacactggtcattaaaaaaaagtataaggtgtaatataatttgcagcttggtaaaaactaaataaatctcaaatatcttagcttaccttgattaaatataaatgtaaagtattaactcaaaatatttgttattatatttaaaacatttattataaattattttattttctaccatgtggttcagtgtaccaagcaacatgcttggatttccaactcgcacggtcacactgtaaacaacggctgcggaaacaaagtgtgcttctaatttccaatcaaaacgccggcagaaaaacaaattttatccacggcaacgaaacaatagtttgtttgatcgttgcaacgcttgacttcacatttcctctccctcgggcgaaaaacagctgaaaccggaaacggatcagagtattagcatcaggcaggacacggatttagaggcgccatgaagatcgaggaagtcaagagcaccgtgcgcacccaacgcatcgcagcccacagccatgtgaagggattgggcctggacgaggttggagctgccgtgcacagtgcagccggactggtgggtcagaaggcggcacgcgaggcagccggcattgtggtggacctcatcaaatcgaaaaagatggccggacgagcgcttctgctggctgggccaccaggcacgggcaaaaccgccattgctctggccattgcccaggagctgggtaacaaagtgcccttctgtcccatggtcggatcggaggtattcagcaatgagatcaagaagaccgaggtgctaatggagaatttccggcgctccattggtctgcgcattcgtgagaccaaagaggtgtacgaggg

SEQ ID NO: 13490 - DNA, 954 bp, DROSOPHILA
atgagctgcaactacgcggatggattgtcagcctacgacaacaagggaattttgggagcaccagagagtttcgacagcgatgaggttgtggccgaaaagtgccaggaattggctgaattgatcaagaaatcgggacacgttgtcctccacacgggagctgggatcagtacgtctgcaggaattccggatttccgcggacccaagggcgtttggaccctggaggagaagggcgagaagccggacttcaatgtttccttcgatgaagccagaccaactaaaacccacatggctatcatagccctgattgaaagtggctatgtgcagtacgtaatctcacagaatattgatggtctccacttgaaatccggactggatcggaagtatctttccgaattgcacggcaacatttacatcgaacagtgtaagaaatgcagacggcaatttgtgagcccatctgccgtggaaacagtgggtcaaaaatccctgcaacgtgcctgcaagtcttcaatggatagcaaaggtcgtagctgtagatcgggaatcctatacgataacgttctggactgggagcacgatcttcccgaaaacgacctcgaaatgggtgtgatgcactccaccgtcgctgacctaaatattgcgcttggaaccactttgcagatcgttcccagcggagaccttcctttaaagaatctaaaatgcggtggaaaatttgtcatttgtaatctgcagcccacaaaacatgacaaaaaggctaacttaatcatatccagttatgtggatgtggttttgtccaaagtttgtaaactattgggtgttgagatacccgaatattcggaggcttccgatcctacaaagcagtccaagccaatggagtggacaatacccacaagcaatgtaaatacctttcacagacaatataaaaagtatgtttattttatttattatttattatga

SEQ ID NO: 13491 - protein, 317 aa, DROSOPHILA
MSCNYADGLSAYDNKGILGAPESFDSDEVVAEKCQELAELIKKSGHVVLHTGAGISTSAGIPDFRGPKGVWTLEEKGEKPDFNVSFDEARPTKTHMAIIALIESGYVQYVISQNIDGLHLKSGLDRKYLSELHGNIYIEQCKKCRRQFVSPSAVETVGQKSLQRACKSSMDSKGRSCRSGILYDNVLDWEHDLPENDLEMGVMHSTVADLNIALGTTLQIVPSGDLPLKNLKCGGKFVICNLQPTKHDKKANLIISSYVDVVLSKVCKLLGVEIPEYSEASDPTKQSKPMEWTIPTSNVNTFHRQYKKYVYFIYYLL

SEQ ID NO: 13492 - DNA, 12289 bp, DROSOPHILA
ccatggggaaatgtggggtgtctaaagcttagcgagttctgttccgatcggaggagatatcctttcggctgagagtttgtttgtctagatgtacgatagtttgttatggtaaatttcaactagtcaatggtttaagtgtagtattattaataatttagtcgctagatgctgctgcgtttactcaatcgtctcagttctgtggctcgtatcaagtagttagtaataaaaagtatttctcatatatgtatgtaggtacttgtgggtaatgctaggtatcgtcatcatcagtgtatataaaaacaatgcctttaaatcggatctctttttggttttgcttgttcttgagtggcctacaatgtcctttttaacgaatgtctataaaagtatgtagttttccaaggctccgaggctgaactttcggttagtttttctctgggctaggctaagcaaatatacaaaagctacttaaattagttagcatgtacagtaccgggcgtactcgtaggtatatatcgtattatcgtatgagtgtgtgtatatataattaaatggttccattattcgcctttaccgataggtttcttgatccgttctttaaacataaactcgtagctaggtgttacttacaaatgtggccttcttagattaggactaactctcacacatgcacacacacaccacgcacacactcactcactcacacacacacacacacacacacacacacaaacacacacgcataaccatgggcagtagtcggcattgggtacagtgtgtgccatgagttttgtcgcctggatgacagcgctttgcattcagcttacttgaaggttgcaagtcgtttaaggccgttgttggaattttcagttatacaatatataatatttatattcatatgttaatgcagtaaatatatgtttttgtcctgtctattggaaggtctacaataagccctgcgcccagtccgtcataggcggcacacactgtccgcgttctctgatgcggatccgcttccggattcggtcgcggatacggatactcgtatttagctacttaagaactaatttggaaaagtttctctaggtgaccaaaaatattgaactgcgctcaagcgttagagtaaaaaattttcccacctcctcgattgcccttcgtatataatacaaaaacatattgcctagatctaagctaaatccatcttccgccgttacagccaacgactcagtatgtgacagaggagcagcagccccaggttggcgtacacggagcaggcctttccgcacagcttaatgccgctctcctggaatggaaaaccaaaagtgaattaagtcaggcggttagagggatgggttcccaaacaagtcggtgggcaaaggggaaggtactttacagttgctttcagaggttttttttttttaatttatatgaacatagttaatgagctaacatagttggttgtccgggttaaaggttacagctaattatatagtaccttctcctgccacaaactttgattgcccaagtcctaccaaggactaccctgaacaccaagagccccaaggaccccgaaggacttacgttcgcgtgccgactgatgcagctgtgtggtcgcatgcggttgaactcgcgagcctgcttgtagcatgccaacgaatcgttgaccgacagatgatagtcgatcggctgcggattcaccgtgaggacgactgagccgtccctgggacacagctggtcgatgaccagcaggatgaggttgctgaacgggatgggcaggacgacaaatggccgctcacatgcatgggctgtcatattgtagacaacgttgtccttttcattgaacagcgtgtacagatcgcgcttcatgtcgcacggcttgagccgggtgcgatggagtgtcaagtagcgcagccagtggtcatcgtccttcttcccatgcccattgccgttgcgagcatggtgatccggatgcggctccggcggcggtggctccgtgtcgttggagtcaccatacatatccgcatagtggctggacacaccgggcgcccactgcaacagttgtacaatataccacagcgccgtatgcagcagccatttgcccacgcgcagcagatggaacaggggctacaaaaagtggtttattagattgagatattcattttgcatataaactagagagatgatctatgtaaaccgccaaaccattcctaccgaaagcagcatgctggaggcgttgttatcgttcttggactcgaagcacaccgcctggtaatcgtagacagtgacctgcctgtagacattctcctccagtagtcgcttcatgatcgctccgttcacctcgccaaagaatcgacccgtctcgtggaccctcgtcgaaatgatcacatagccattgttgtccagtatatagcagtctttgtcatccacggcacaggcctattatataccaattataagtaagttccttcaaataggatagtctaacccacattgccggtgatgttgtggaagagcttgtagagcgccgaatgctgaaactggaagcccacaacagccgccggtgcagtcttgccgccctcattgtggaaaacggcatgactggcggtcaccaggatctctgagttgctttctgcagttgggaattccattaagattatgatgtacgatgaggtacctcccaacttaccacccgcatcgaagggcacggagtaaacgaagctctcctcccgcacaaaatgttggtccacggcgcgtttgtaccaaatctcatcgatggcccgcgtgttattttggctaaaagtctcgctgcatgtggaactcccattatagcttgaattcccgtcataagtgcaggggatatccccccttctgacttacccgactccggattcctcggcagcattcgagtggaactcatgccagcgggtgagaccactgtgggtggccaaaaaggcgacggtgacgccaaaacgctgcttgaattcgtttctgtgcaaatagatgcattgagttagaaaagccagacaacttaatatggcaaataacaatgatttagacttaaactagttaacaggagtgagtatcgtagtaaattgattgtggtttaccttggcagcaaacccattagaacagctattgggcttgatgcgcttgtgctagatttgtttgaatggttttggtatttcataatggagaggcattatgttttgtggtatcgttgaggacgttgaggagatattcaagagttcatagacatatttaatatatagtagaattgtattaaagtggtgggtgcaaaaattcaatatgagaaagacattcaacgacagcgacaaggacgacacaaagaatcggtataaaatgcaaataaaagtgagaaaagaaggacgtacatagaaatgaaaaacggttaatatgtgctgcatttccggtgcgttaacgagcgagtgcatggcgttgactgtactgaaggtgtctgacgagtcaagcctagcattgctttaaaatcaatacccaagccattctcgatcctcgccacttaccctttgtcgtccttggagttaaagctggtattgttggagaaccacccggtgactcgggcatcgaagaccagagcctgcattagctgccgatcgcctgaaaatcaaatttccagcgtcaaaagaatccaaaatgagtggtcagcatggttataataatggttgcagtggcattactggctccattactccaaaatgtttggcttaatgtgagcatacttttcagatgatacataaacaatgagtaagtcctcggtgacatgcaacgatttgagtgcaaattccgcagctaactacagaaactacttgctaattgaaatgatagcttatagaagtaaaggaggttttcagtggtccaatcaatttggtgtttgcaagcctccattttgatccataacttcgatcgatttttaattttaaaagaaattctaaagaattcactgggtctttcatttttggtctaaagttttgaagatgagctgggatcagaattcaacgggcatttccgccggatgtgcaggtgcgtaggtcggaaatgagaacggtgctactgagtgcgattgattgtgattaatttttgtgggtgcacaactgtgactaagatgacttttgatattcgttactcacaatagtagctttctttttcattgattgatggataacggccggttgatgagttgttagctgtgaatttgcatgaacattgaaatcgcaatcgtaattttcgcacatcaacgaaacacaaaaacgcataacagagtctgggaaagcggcggcttatcgaagcgatcgattcgagtatcggaaatggatgtaaccggaagtgggtgtgtggggggggggggaggttctatactatacttacaaaacatggcggccgcgtgctccgggggcatagcactccgactacccggccatcgccagccaggctcagacatacgctcgagaaagtacagcagttcgatctctggcgttttgaatgtcctgttgctgtgcttacaaaatagcctgaaaatatcgtataacccaattagtttgaacgcatctttattgtttagctatcagctcaccagtcgggatgaattttccaccgcttgccgctgaaaacgctgcgcaagtttgtgccctttatgcttatgcgatggatctcctggtcagctcggatgtccatgtgactcacgccgtattgctccggataggaaatgaccagagtaaagggcgtcttcttgatggccgtccagtagtattgtcgctttacgcgtgccacccgtttctgtaggttaattaagaacgaatttaggaatataactatgaactaatatgcacttagaacttaccatttcatcgaaatgatttttgactaacatccatttgctgcctgtcgattgattgattatagaatctcttatctgttgaacggagaatttgttattgaaatcatcgaggacgactttaagaaaggtttaccgtcatcagcactggattaaagtctctggcgggtcgatcgtcatccaatagctcgacttcaatcatgtcaacgctattgtatgctggctttaatatgtagccttggaactggaatttaaagccatgtatgacacaaaagatccacagattttgaaggcatttaacttacaattggacgaaagtctggatggaatagtacataaccattgttggttactataaacgcatagccattcacgccgagctaaggatagatatggattctttagggtttataaccaggattctagtgattccaacttaccgtgaacggcgacagcagctttttgatttcattgatgggcacatccgtgccggccacgcccaatatattcgcaatcctagtctgtgcgtgagaagttttgagatatatatttagagaagtgttgggtcaagtgagtgaaaacgaaacatatacacaagttggactttaaattttacaagtacagagaatggtagttaatttttggtattgcatgttaatcaaatactggaaaatgaatttgaaatttgaattcgataaatggcattgctagtacaaaacgccttagggcatctcaaagtaaaatacaaagatgtaaaacaaaaacggaaacaatgtcgaatgcaaatatgagaagcatcgttactacgcaagaacttacgagtacagtcaagaaagtcgatttcaaagatttgtatattattaattttttcttttttgctttttgttttcttgtattgatgtttacaaagaatttagttaagcgtttttctgttttttagcggctaattacatggctagcagagtagtactaagagcgtatgagagcgttgagtattggtaggcagtgtaaaacaaaatgtcgaactaaaaaacttggttaagatcaaaagaaggtttgcagaaccataaaacaatatagacagagagtgtaatttacaatattcttgttaaaaaatttgggtttttggcagtttgtgaactgaaaatgtgtgaaagaagctgtttacacgtgtggaggggccttctttgcaaagaagtacagttgtgcttgtttgtttgtttgcgttgttggtgtttcggtgttcggcagtgtgtacattttcacagtttttatacccttcacaatatcattttgggtggtggtgggtggcaggaaatctacaagataccaaatgccgaagagttaaagagctacagaggtaaggacatacaaggagctcgatcattgatcgttcagttttgaagtgtccgttcagcgaagctttacacacacagttacagagagagagagagagagaaagtgccggagagttcttagtctaggattgcagaaataaatcattcgggttagtatcaagcacttgatcggactggctaattaaatcataacttattgcatcgtggctgagggcggagttttggtggcatggatagtaggcaatacataaaacgtagagaaattaagaaatacataaattttctcagtgctcaatgaaatcaggtggaaatcaaaaggcaacaaacaatttcgatcaagtcacgcatgcggcttagacaaacgaaagtggaaaatttaggatgagcttttttgcattttattaaattttgctgttggtttttttttttggttttggttttgatttttgatttagaatacaatttactcacaacttgaaggtttattttcgcagccggatttatatcggtcgttagattaatgagctgtgaattcgtatttgtagtatttaataaatcaatttctagtaacgaaagcaacttaagtagggttattctaggggcgggtggacttggaggcgtggcggtgtcggtgggcgggaagcgcggcggggtgctcttaaggatcctgccatcctatctgatctgggccctaccatctacatacgtattcatatcctgtccagcagaagggtataaaaactccagcggaatggggtcctctcgcttgggaggctctgaagatgtgtctatatttatgtgtttatatttatatttataaattgatctgttgtggttgttcttgtgtgctctataggtcctcagcaatagcctaggatttctccgattttggttgctttttgctttatcaatgattgtacttactaaacatcaatggattctaacatttatttgttatttgggagcgggtggggtttcttttttttattattatttttggagggggcgggactaccaattagcactatatatgtattaatacagagtctagacaatcgcggctcaacccaatctttcttggttaaaacaacaaatggaaaattctactactcaaaatgctagataaaatattctatttatacgttaggtaatcaactaggcatagctataattcgataattgtttataataagtatcataatattacgagtacggttatataaagaaaatcaatatctatatatcgataattactggtccaattcgaattgatttcgttattacatgagaatacttttggatttggtttcgattttagcggggttgaacccagtacgtggtcaactataatgtcaaaaggttgctaaagaatgccatggtcctagaccatattagctagatttatatacgagttatacatagtatagttagttatagtatatatcggttaaatatggattaggtatgcatgtatgtagcgcaaagtataacaaatcgtttactttatttgatatatatatatatagatatatatacggataatgtatatacgagtatataggtagagctcaatacgaaatgcaattaattggcgtatataaaacttttatcaagagcagtaaatacgttatacgcaaaaatttcgttcgaaatttattaagtttggttttgattgttatttgttagaatttggcattatagtttgtacctcacgtgtttgcaattcccagagtgcttcatttattaaaacttcttcggtgatattctgtggtatagttgtgtatagtttggtagtagtagtaggtagtagtgttttatatatataacgcataaattattaatacagtagtagtagtagtagtagtagtagtataaagtgagttgttacatagatgggttcagattggatttgctgtatttcgatttcttgcttcgatcgtaatgagttttgggggcaaaatgaattcgtcgctgcttcggcggctgctgattctgatttcgatttcagtgttatttcttttatttccgctaagaatttggcagtgctaactcgcttgattgagttcgattcgataggcctcccccgcgccaggggattcgatcgatttgtggtcagtttcacttaccgcgttctcgcgacgatcgtagatgggcatcgatacggtggtcataaattggtacacattcgagtccaccggctggttccaggtctattaatgaaaaaaacaatatctattagttaaatatatatgtacttgaatggatatacattgtttcaaacagttgaaggacttcttaatgttcttaaatgcctttgaactcataatgaagatcggagcttacctccttcatccttctgtacttccggcggtgcatttcgctgggctccagcatccgatcgtgcacctgccaatactcgaggacatcggccttctggtactcgcactgattaatgtcccacagatagtcggatagcttcgtgtcctacgcacataagattgatagttttggggaaaaaaacattgctaaccgaatatgagggaagaggggggatggcagtaaagattggcatccctttgtttttgggagcactacccacctcgatgtccgcatagacctgcgaccaaatcaccggatgatcgtgcctgcccaggacgagcggcctggccataaccggtatgtaattcaagaccatctcgcgcacctcggcggtgtcgctgaggtggacgtagtagccctgattctcgcacgccatccaccgtatatcatcccaattggccacctccttgccaatcaggtaggtgaacacacggaccggcttgtacggcgggtcccgccaattgtgcaactcgaagacctcgcgattgttctccggcgccccgtcgccaatgatcatgatcgcctgattgcactgcgccccgcgcgaactcaacttggtctcttccaatagctcgaatgcctttgtcaatgcagcggtataattggcgatcgatttgggtctaaacagttcaatcccttctttcagttcgcgtatgttgcccagattggcctggatatggtgagtatcgggtgtgttgtttttttgtttttttttttttgggatttcgattgattggttgattggtgttttgtattcgtattcggtggcatcaattgagtgtgttgttgttgttttgagatttcggatttggtggtgatgttcgttattaatttttgttttttggggatagaagaaatcaaatatgcgttaaatgaagagaaatttgataaacataaacagaatcgatatatacttgaatcagtgtgtcttcgaaacatgggacgactgggctcacttccttatcaaaggtgaagatgttcacaaagtcatttgtacctaatgtatcgagtatcgtattgacaacatgctttgcgatatctagcctctgtcccaacattgaaccggatccatccatcaggataacaatatccttcggactcgtcgccgcctccatgtaccaggagcgtagtcggcaatcgtatagatcgaccggtacgtcctttcgccacttcgatgcagggaattgacgcataaagccagtcgaactgccaaagaattgccacgacaatgtcggatcgtttttgtaattgtcacggaatatctgatccaaattctccgaccactgaattgcttttatcacatccggtgctgtgtcaatgtaatcgagtgttagttgtgttatggattttgtgtttttggttgtgtcgaaagaaacggaaagaattttgcaagaaacacgattagttcttctcgtctgctgacgagcacttaatcctagctttagttttacgggctctattttttttcttttgtatttaggtttgtgttctggtggcacaagttgggtgttatacggtctttggcaagcattccgcgtgtgtcggagcattcgctttaaaatatttttgtatagcatattttgagcattccctggcgtaaaacgcgagcgcgtcgtcaacgttcgcattgcaccgccatcggccggggaggatcgccaaggtcaagttcggcggaccattaggtacggtgggtgggccgggcggcgcaatgcgctgcttgacgcgtgcacgcgttcctcgcacgcattgacgcaagcagtttggaaatcggaaaaaaatgattagggaggcgcagcttacggcttcatatcataattttcacattacaatataaggcttatatggcatacacaaaaaaaatacaaattttagggtcaagcgatctagcagaaagctaaggagcgagatagatagagagcgagctagctagctagaggcggtttcaaggctctacttttttggcagctagacagagacaaagagtgtttcgtttttaagcttgtgtttgatttgaaagcattgaatgcaaccctgatgatcgagtctggagctttcgtataatccaaggatcttttatcgtaaggatacaaaataataaaaataataataatacaataagtttttatgatctggtgatgatcaacacaatagttttcaagattatttcagaaaaatctcaaatttttatcttattcgcgatttcaaatatgaacgcaattcaatatccccaaactcgatcgcatagcatttaaaaacagggtcgttgaataggaacaacacagacaggcggcaatttcagttacaattacacagagcaaaagagagatagaaatacagagagagagagagataggtgtagagcggagaaaagagatatacggattacaacgatgataatcattccaaacctcgatcgaacacattgactggcacgtggaccgaactgacgctaaagttgaccggagtattgtggaattccggacgcggttccaacaccaccaccttcggctggacgtagatcagcggctcgcctatatccttgtccatgtcgggagccggtgtgggaatgggcgggactggatcgccgggctccagcatctccttggcactataataggagaacatcttgtccgccatgtcgttctgatgcgacaacgccgtgttctcagccgtgtccatgattcgctagggatgatatcggttttttaagaggatttccttgtctattagtgcgtggatttacttaccctcactgcactgacttttaggtccatcatcatttcgatttccttggccatcgaatcgacaatagaagcgccgttgcgcgaaacgacctttgcatccttgaaactctgttggaaaaccaagtacatatatgaattaaccgaatgttaaatgaaaaatggttctatttcaccaacccattgccatgtcataagtacgtggccagaaattataggcggaaccaccccgctaagcaagcttagaggcccccgagggcctatagacaaacccattcacatgcatatggaatactataggcagttggcacaagtgcggctacaaatcgtggggcagaaacatttaatttgtaaatccaattgcgatgcctaaaaataaataaccagctgtgccggacagcaaactgacctcatatggggtgaaggggatttgcagatggctaagcatagtcgtttggataccctacctcagaaacatctattaaatatcaaaaaatctatataataactaaactattgcaattggtttatttatgaaggcatagctagttaataaaaaacaaaactaaataataaatacttgactgacctactaaccccattaaaacttccctgctttaatgaacaccattgtttatatttagaaatcaagtggataattaatagctaactaaatagatttttcgagagcattggctcttcgacccactgccgcacagtttcccatctggctggtgctttacaatttttataattgccgctcgggcggcctttaacccaaattcggagccgaagtctcagcctcagagagacgtcaacaaggagcgcacaaaaacagaaccgaaaacaaacacacacacgcgcacataaatagcggggggcgcatggaaaatttcgggggagtggggaaaacggaggaaaacggagcggcggaaaaatcaata

SEQ ID NO: 13493 - DNA, 3414 bp, DROSOPHILA
cgaatcatggacacggctgagaacacggcgttgtcgcatcagaacgacatggcggacaagatgttctcctattatagtgccaaggagatgctggagcccggcgatccagtcccgcccattcccacaccggctcccgacatggacaaggatataggcgagccgctgatctacgtccagccgaaggtggtggtgttggaaccgcgtccggaattccacaatactccggtcaactttagcgtcagttcggtccacgtgccagtcaatgtgttcgatcgagcaccggatgtgataaaagcaattcagtggtcggagaatttggatcagatattccgtgacaattacaaaaacgatccgacattgtcgtggcaattctttggcagttcgactggctttatgcgtcaattccctgcatcgaagtggcgaaaggacgtaccggtcgatctatacgattgccgactacgctcctggtacatggaggcggcgacgagtccgaaggatattgttatcctgatggatggatccggttcaatgttgggacagaggctagatatcgcaaagcatgttgtcaatacgatactcgatacattaggtacaaatgactttgtgaacatcttcacctttgataaggaagtgagcccagtcgtcccatgtttcgaagacacactgattcaagccaatctgggcaacatacgcgaactgaaagaagggattgaactgtttagacccaaatcgatcgccaattataccgctgcattgacaaaggcattcgagctattggaagagaccaagttgagttcgcgcggggcgcagtgcaatcaggcgatcatgatcattggcgacggggcgccggagaacaatcgcgaggtcttcgagttgcacaattggcgggacccgccgtacaagccggtccgtgtgttcacctacctgattggcaaggaggtggccaattgggatgatatacggtggatggcgtgcgagaatcagggctactacgtccacctcagcgacaccgccgaggtgcgcgagatggtcttgaattacataccggttatggccaggccgctcgtcctgggcaggcacgatcatccggtgatttggtcgcaggtctatgcggacatcgaggacacgaagctatccgactatctgtgggacattaatcagtgcgagtaccagaaggccgatgtcctcgagtattggcaggtgcacgatcggatgctggagcccagcgaaatgcaccgccggaagtacagaaggatgaaggagacctggaaccagccggtggactcgaatgtgtaccaatttatgaccaccgtatcgatgcccatctacgatcgtcgcgagaacgcgactaggattgcgaatatattgggcgtggccggcacggatgtgcccatcaatgaaatcaaaaagctgctgtcgccgttcacgttccaaggctacatattaaagccagcatacaatagcgttgacatgattgaagtcgagctattggatgacgatcgacccgccagagactttaatccagtgctgatgacgaaacgggtggcacgcgtaaagcgacaatactactggacggccatcaagaagacgccctttactctggtcatttcctatccggagcaatacggcgtgagtcacatggacatccgagctgaccaggagatccatcgcataagcataaagggcacaaacttgcgcagcgttttcagcggcaagcggtggaaaattcatcccgactggctattttgtaagcacagcaacaggacattcaaaacgccagagatcgaactgctgtactttctcgagcgtatgtctgagcctggctggcgatggccgggtagtcggagtgctatgcccccggagcacgcggccgccatgttttgcgatcggcagctaatgcaggctctggtcttcgatgcccgagtcaccgggtggttctccaacaataccagctttaactccaaggacgacaaaggaaacgaattcaagcagcgttttggcgtcaccgtcgcctttttggccacccacagtggtctcacccgctggcatgagttccactcgaatgctgccgaggaatccggagtcggcgagacttttagccaaaataacacgcgggccatcgatgagatttggtacaaacgcgccgtggaccaacattttgtgcgggaggagagcttcgtttactccgtgcccttcgatgcgggtgaaagcaactcagagatcctggtgaccgccagtcatgccgttttccacaatgagggcggcaagactgcaccggcggctgttgtgggcttccagtttcagcattcggcgctctacaagctcttccacaacatcaccggcaatgcctgtgccgtggatgacaaagactgctatatactggacaacaatggctatgtgatcatttcgacgagggtccacgagacgggtcgattctttggcgaggtgaacggagcgatcatgaagcgactactggaggagaatgtctacaggcaggtcactgtctacgattaccaggcggtgtgcttcgagtccaagaacgataacaacgcctccagcatgctgctttcgcccctgttccatctgctgcgcgtgggcaaatggctgctgcatacggcgctgtggtatattgtacaactgttgcagtgggcgcccggtgtgtccagccactatgcggatatgtatggtgactccaacgacacggagccaccgccgccggagccgcatccggatcaccatgctcgcaacggcaatgggcatgggaagaaggacgatgaccactggctgcgctacttgacactccatcgcacccggctcaagccgtgcgacatgaagcgcgatctgtacacgctgttcaatgaaaaggacaacgttgtctacaatatgacagcccatgcatgtgagcggccatttgtcgtcctgcccatcccgttcagcaacctcatcctgctggtcatcgaccagctgtgtcccagggacggctcagtcgtcctcacggtgaatccgcagccgatcgactatcatctgtcggtcaacgattcgttggcatgctacaagcaggctcgcgagttcaaccgcatgcgaccacacagctgcatcagtcggcacgcgaacgagagcggcattaagctgtgcggaaaggcctgctccgtgtacgccaacctggggctgctgctcctctgtcacatactgagtcgttggctgtaacggcggaagatggatttagcttagatctaggcaatatgtttttgtattatatacgaagggcaatcgaggaggtgggaaaattttttactctaacgcttgagcgcagttcaatatttttggtcacctagagaaacttttccaaattagttcttaagtagctaaatacgagtatccgtatccgcgaccgaatccggaagcggatccgca

SEQ ID NO: 13494 - protein, 1022 aa, DROSOPHILA
MDKDIGEPLIYVQPKVVVLEPRPEFHNTPVNFSVSSVHVPVNVFDRAPDVIKAIQWSENLDQIFRDNYKNDPTLSWQFFGSSTGFMRQFPASKWRKDVPVDLYDCRLRSWYMEAATSPKDIVILMDGSGSMLGQRLDIAKHVVNTILDTLGTNDFVNIFTFDKEVSPVVPCFEDTLIQANLGNIRELKEGIELFRPKSIANYTAALTKAFELLEETKLSSRGAQCNQAIMIIGDGAPENNREVFELHNWRDPPYKPVRVFTYLIGKEVANWDDIRWMACENQGYYVHLSDTAEVREMVLNYIPVMARPLVLGRHDHPVIWSQVYADIEDTKLSDYLWDINQCEYQKADVLEYWQVHDRMLEPSEMHRRKYRRMKETWNQPVDSNVYQFMTTVSMPIYDRRENATRIANILGVAGTDVPINEIKKLLSPFTFQGYILKPAYNSVDMIEVELLDDDRPARDFNPVLMTKRVARVKRQYYWTAIKKTPFTLVISYPEQYGVSHMDIRADQEIHRISIKGTNLRSVFSGKRWKIHPDWLFCKHSNRTFKTPEIELLYFLERMSEPGWRWPGSRSAMPPEHAAAMFCDRQLMQALVFDARVTGWFSNNTSFNSKDDKGNEFKQRFGVTVAFLATHSGLTRWHEFHSNAAEESGVGETFSQNNTRAIDEIWYKRAVDQHFVREESFVYSVPFDAGESNSEILVTASHAVFHNEGGKTAPAAVVGFQFQHSALYKLFHNITGNACAVDDKDCYILDNNGYVIISTRVHETGRFFGEVNGAIMKRLLEENVYRQVTVYDYQAVCFESKNDNNASSMLLSPLFHLLRVGKWLLHTALWYIVQLLQWAPGVSSHYADMYGDSNDTEPPPPEPHPDHHARNGNGHGKKDDDHWLRYLTLHRTRLKPCDMKRDLYTLFNEKDNVVYNMTAHACERPFVVLPIPFSNLILLVIDQLCPRDGSVVLTVNPQPIDYHLSVNDSLACYKQAREFNRMRPHSCISRHANESGIKLCGKACSVYANLGLLLLCHILSRWL

SEQ ID NO: 13495 - DNA, 2679 bp, DROSOPHILA
agctgggcatgttgaccacgccaccgctaacgcccactcctggtccggatgcagctgctacctgcggcgatgtggcggccaggagttgctgctgctgctgcgccaggagctgctgttgctgctgttgctgctgttgctgctgttgctgctgttgctgctgttgctgctgttgctgctgctggagcagcgagttgggcgtgaccttcagcttaccatcggcccggaatcctggctgcgagtacacggcaggatactgctgtcccgacggcgagaatccaccaaattgcgtgggagtttgctgcataggttagaggaataaacggatgagaatggaagctaaaccaggacaattttatccttattctgaactggcttaaatgatatttagatgagtgtctaatgtgcgcaagtagtaggccgttttcgatgtgtaacttttgatttcgttttgtaaaatattcatacaattgagcttataacacgctttcctttactcacggatgaaaggccacgcccgtgattcttgataattgagtgctgggaacccaggcatccctttccccactgtccctccgcgtcagccaatcgactggcgttgcccccacgaactttgctggatctcatgattccctgttgttccgtttgtcgcgatgtaaacttaaaagttttgacgagaggttgtgtagctcgagtgtggatagccaaaaattgattttcaaattcagattttgatacaatttgtttacgaagtctgtagcgggaaaaattgtaaaacgaaccgatctgaaccgactgagcgagcaagtgatactgactggatagctcaaccagtccggtgacacctgacagctgtcgtcgggccaatccgaaagcctactgtgatctctactagccatcggtgccatggtgtggattcaaatcgatatgtatcgaagggaatcacgcgattcgatggcttaaaaagcgcggatgcaatgccgcaaccttacagttagaaacgatgaatcgccatcagctggcacttctcctggttgtcgcgggtctggccatgattgcggccaggccaggtccacagaatccgctagagtcgctgggcatgggcgccatgtctctggccggaaatatagcggaggcagttcagagtggcgccgccatctcccgcgacgtcgacattgacaatcccctgatgtccgtgcactcgaaaacggccgttggctatggagatgccatacgtcccattgccaccgattcatccgaggaggatcgtcgtcggaagcgaaggcggcggagcctgcatcgcctcaaacgcgctccttgcttctggaaaatgagcgctgccgccaccacagcggcgtccgccgacgatgacgtggaggccagacggagacgagctcaaaagcgggccgccaacaatgcctcccgatcccgagtgagtcccaagaccactggcaaaaagaacaagaagttggtgcgacgacgacggcaggaggagaagggcatggaagtgacacagaatatggacggagcggatcccttgggcctgggcaccagaatcaaggccatgtggctttcgtttgtgaacaacgtagcggatgtggtgcagcaggtgcgccagaagatcaccgaaacggccaactccacggcgtagaatcaccgagctccctgacgaccaccatcgagtgtattttttttgtttgtttataagtgcaataaaatcaactgaaaaccggaaactgtgttgagcggcatgttttctgggttggccaaaaacattacgattacgtcttcattcaaatatgtactatagattacatccattttaagaccccatcatattatcaatgtagtagccaattaaggccaatcacctttggtaaaaggtgaccccaaacggcattagagtcaaaaaaaacgtgtactccgtctttaaactacaaatgcttgtgagctcaactaaacatatcaccaaggtgacccaaaacttggaatccggttaccattttaaagtggcatacctttaagaactcaaccttatttgttgctctttaaaaaggtcaccgccgaagagtcacccccaatcgataaagattcctcaggcagaggcaataaagcaaaaagcgaactgtcatttctgagcaatccgatcgaaagtggtccgaggagaaggccattggggtcaccacagcaactcgactactgaaggctgtccagatgggagatacggaaacgagccgagtcacgatgagccaacggtcagtgggcacttccgggccagatgagatgcatctcgacatgcatttcgaacatttccgtgtctggtcgaaatctgattgaattaaaaaggctgggtacaaaaggcgcattcaggtggctgggcacaacagttggccaaatgatttccggacccagattctctgccctactaatcgtggccctgaccctcgctctggtggcccaaacttgggccgacgagttcgatctggactactccaacgagtacgacgatgtgcgaccgcatttggtctatcccgacgatccaaggctggacaagcggatcggcgatgcggcgcgggagtttggacaaaatataacccaagcctggaacgcgatggtggactcgtttaagaactactttgaggaactcaagaaccttttctccgacaccacggatctcgattc

SEQ ID NO: 13496 - DNA, 679 bp, DROSOPHILA
atgaatcgccatcagctggcacttctcctggttgtcgcgggtctggccatgattgcggccaggccaggtccacagaatccgctagagtcgctgggcatgggcgccatgtctctggccggaaatatagcggaggcagttcagagtggcgccgccatctcccgcgacgtcgacattgacaatcccctgatgtccgtgcactcgaaaacggccgttggctatggagatgccatacgtcccattgccaccgattcatccgaggaggatcgtcgtcggaagcgaaggcggcggagcctgcatcgcctcaaacgcgctccttgcttctggaaaatgagcgctgccgccaccacagcggcgtccgccgacgatgacgtggaggccagacggagacgagctcaaaagcgggccgccaacaatgcctcccgatcccgagtgagtcccaagaccactggcaaaaagaacaagaagttggtgcgacgacgacggcaggaggagaagggcatggaagtgacacagaatatggacggagcggatcccttgggcctgggcaccagaatcaaggccatgtggctttcgtttgtgaacaacgtagcggatgtggtgcagcaggtgcgccagaagatcaccgaaacggccaactccacggcgtagaatcaccgagctccctgacgaccaccatcga

SEQ ID NO: 13497 - protein, 215 aa, DROSOPHILA
MNRHQLALLLVVAGLAMIAARPGPQNPLESLGMGAMSLAGNIAEAVQSGAAISRDVDIDNPLMSVHSKTAVGYGDAIRPIATDSSEEDRRRKRRRRSLHRLKRAPCFWKMSAAATTAASADDDVEARRRRAQKRAANNASRSRVSPKTTGKKNKKLVRRRRQEEKGMEVTQNMDGADPLGLGTRIKAMWLSFVNNVADVVQQVRQKITETANSTA

SEQ ID NO: 13498 - DNA, 3583 bp, DROSOPHILA
gacaacgaagtcgtttctggaggcaacgatcttttggacacaacggtctctgctcggaaggccctatcaaccttccacataactatatatgtatgaaatctttgaaacttggacttaaaataactaacaggtctaaccttcagtttgccaattaaatttggttatttttagttactcatatatagtagatgtattcaattaagttaatccacggcttctcgcagtgcagatatggatattgaaatggatgcacacgtggccactcaaaggattcggggctcatcatgtatgtttggactgcgcttcgctgtggccagttgagtccaacccccaccacccatccagtgacctcgttcccatcagcatcatcctcgtcccaattagccgccggccaaccagggcaattgtctccgttcattgatgcaccactcggcggtgcaagtggtggtggactcgagcagaggatgtccattcccatggatgtctaataataccccaacaatcgaagtccgtcgccgttgcgactgcgactggctgctcggataaatggatccgccagtgggatgtacgatggcatgggacggattatattaactctataaacagattcaatggcagcaattgtgtgccaatgcgaaggcggtccgttcaaagcaatattaatgcatttattgcacgtgagctcggcggcgtgttaaagatgagcgttgccgattaggaatgacccatcattagccatgatgaatctggtaagtggggccagttaactgaccagctagattccacggagcacgtgccgatggtttattagtaatgaaatgctgttgggtcatataggatggatttgggctaattaagcaactaactagagtacataactcgaggccagaagtgcacattcaaactcttcttcaggcaaatctaaccctcgtaacttcgtaagccataatcaccatttgataagcctgaaatgcatccacccctctaaaaaccaacaattatcatcacttacaaaatttattcttgcttgccctaaacaattcctcttatcaaataccacgaaaatttacgcaaaaaaaaaggtgtgtgaaaaaaaaatgaaaatactagttttggaagtccttggaataacagctcatcatcattagaagctgtagttgagattgccgcttgagaagctcacatgagagacgtccggcgattgctggtaggtgggggatcccagcacggaggacatgggaacggccatcccatagctctggcgggtggtgggcgccaactggctggtggcgaactgatgggccaccgactgctgctggtcacggagcacgtcctgctgctgctgctgcatgaagcccatgtgctgttgcgtggagtagaagtctccacttgctccccctcccagactgttggagcgcaaaggcgctgatccgatcactcctcccgggatgactccaactggacctcctcttactggacctccgggcacaatggatccggatgcaaggcgctcgggctgcaggccattgttgctgaactgcggccgacggtaggcgaagcggccagctgcgttctgtgctgccacgcccgccggagcgcctcccacatcggcgggagcagctatctggggggtttggggttgaatctgatgagccggtgatgttaggccgccggatacatcgggatagtagtggtagagcttctgcagcaggtgctgctgctgctgctcgaactcggctcgttggcgctgataatcgaggaaggcggcgtgcatctggtccgcatagctgggcatgttgaccacgccaccgctaacgcccactcctggtccggatgcagctgctacctgcggcgatgtggcggccaggagttgctgctgctgctgcgccaggagctgctgttgctgctgttgctgctgttgctgctgttgctgctgttgctgctgttgctgctgttgctgctgctggagcagcgagttgggcgtgaccttcagcttaccatcggcccggaatcctggctgcgagtacacggcaggatactgctgtcccgacggcgagaatccaccaaattgcgtgggagtttgctgcataggttagaggaataaacggatgagaatggaagctaaaccaggacaattttatccttattctgaactggcttaaatgatatttagatgagtgtctaatgtgcgcaagtagtaggccgttttcgatgtgtaacttttgatttcgttttgtaaaatattcatacaattgagcttataacacgctttcctttactcacggatgaaaggccacgcccgtgattcttgataattgagtgctgggaacccaggcatccctttccccactgtccctccgcgtcagccaatcgactggcgttgcccccacgaactttgctggatctcatgattccctgttgttccgtttgtcgcgatgtaaacttaaaagttttgacgagaggttgtgtagctcgagtgtggatagccaaaaattgattttcaaattcagattttgatacaatttgtttacgaagtctgtagcgggaaaaattgtaaaacgaaccgatctgaaccgactgagcgagcaagtgatactgactggatagctcaaccagtccggtgacacctgacagctgtcgtcgggccaatccgaaagcctactgtgatctctactagccatcggtgccatggtgtggattcaaatcgatatgtatcgaagggaatcacgcgattcgatggcttaaaaagcgcggatgcaatgccgcaaccttacagttagaaacgatgaatcgccatcagctggcacttctcctggttgtcgcgggtctggccatgattgcggccaggccaggtccacagaatccgctagagtcgctgggcatgggcgccatgtctctggccggaaatatagcggaggcagttcagagtggcgccgccatctcccgcgacgtcgacattgacaatcccctgatgtccgtgcactcgaaaacggccgttggctatggagatgccatacgtcccattgccaccgattcatccgaggaggatcgtcgtcggaagcgaaggcggcggagcctgcatcgcctcaaacgcgctccttgcttctggaaaatgagcgctgccgccaccacagcggcgtccgccgacgatgacgtggaggccagacggagacgagctcaaaagcgggccgccaacaatgcctcccgatcccgagtgagtcccaagaccactggcaaaaagaacaagaagttggtgcgacgacgacggcaggaggagaagggcatggaagtgacacagaatatggacggagcggatcccttgggcctgggcaccagaatcaaggccatgtggctttcgtttgtgaacaacgtagcggatgtggtgcagcaggtgcgccagaagatcaccgaaacggccaactccacggcgtagaatcaccgagctccctgacgaccaccatcgagtgtattttttttgtttgtttataagtgcaataaaatcaactgaaaaccggaaactgtgttgagcggcatgttttctgggttggccaaaaacattacgattacgtcttcattcaaatat

SEQ ID NO: 13499 - DNA, 1383 bp, DROSOPHILA
gctcagtcggttcagatcggttcgttttacaatttttcccgctacagacttcgtaaacaaattgtatcaaaatctgaatttgaaaatcaatttttggctatccacactcgagctacacaacctctcgtcaaaacttttaagtttacatcgcgacaaacggaacaacagggaatcatgagatccagcaaagttcgtgggggcaacgccagtcgattggctgacgcggagggacagtggggaaagggatgcctgggttcccagcactcaattatcaagaatcacgggcgtggcctttcatcccaaactcccacgcaatttggtggattctcgccgtcgggacagcagtatcctgccgtgtactcgcagccaggattccgggccgatggtaagctgaaggtcacgcccaactcgctgctccagcagcagcaacagcagcaacagcagcaacagcagcaacagcagcaacagcagcaacagcagcaacagcagctcctggcgcagcagcagcagcaactcctggccgccacatcgccgcaggtagcagctgcatccggaccaggagtgggcgttagcggtggcgtggtcaacatgcccagctatgcggaccagatgcacgccgccttcctcgattatcagcgccaacgagccgagttcgagcagcagcagcagcacctgctgcagaagctctaccactactatcccgatgtatccggcggcctaacatcaccggctcatcagattcaaccccaaaccccccagatagctgctcccgccgatgtgggaggcgctccggcgggcgtggcagcacagaacgcagctggccgcttcgcctaccgtcggccgcagttcagcaacaatggcctgcagcccgagcgccttgcatccggatccattgtgcccggaggtccagtaagaggaggtccagttggagtcatcccgggaggagtgatcggatcagcgcctttgcgctccaacagtctgggagggggagcaagtggagacttctactccacgcaacagcacatgggcttcatgcagcagcagcagcaggacgtgctccgtgaccagcagcagtcggtggcccatcagttcgccaccagccagttggcgcccaccacccgccagagctatgggatggccgttcccatgtcctccgtgctgggatcccccacctaccagcaatcgccggacgtctctcatgtgagcttctcaagcggcaatctcaactacagcttctaatgatgatgagctgttattccaaggacttccaaaactagtattttcatttttttttcacacacctttttttttgcgtaaattttcgtggtatttgataagaggaattgtttagggcaagcaagaataaattttgtaagtgatgat

SEQ ID NO: 13500 - protein, 354 aa, DROSOPHILA
MRSSKVRGGNASRLADAEGQWGKGCLGSQHSIIKNHGRGLSSQTPTQFGGFSPSGQQYPAVYSQPGFRADGKLKVTPNSLLQQQQQQQQQQQQQQQQQQQQQQQQLLAQQQQQLLAATSPQVAAASGPGVGVSGGVVNMPSYADQMHAAFLDYQRQRAEFEQQQQHLLQKLYHYYPDVSGGLTSPAHQIQPQTPQIAAPADVGGAPAGVAAQNAAGRFAYRRPQFSNNGLQPERLASGSIVPGGPVRGGPVGVIPGGVIGSAPLRSNSLGGGASGDFYSTQQHMGFMQQQQQDVLRDQQQSVAHQFATSQLAPTTRQSYGMAVPMSSVLGSPTYQQSPDVSHVSFSSGNLNYSF

SEQ ID NO: 13501 - DNA, 7886 bp, DROSOPHILA
aagagttttaaggtttttagctaaattttgtatattttaatctacaaactataaatatatattatctgttttataaataacaataaaaaattcatatgtgtttttatgacagatttcaaatgggtagagcatcgctctcaaaatgtatagccattttgagctgtacaggaattcggaatgtcttttttactactagtattatttcttatgattcggtcggttatggcttatacgcatagaccaataactctacatatccccacccacagaaagaagtcacaaaatctgggaggccaattacaggtccaaaacgttagattagtcggtcaccattaaatcgattgtggcacgagctgtgtgacatattgcgtcctctttttggaaccacaggtcctggacatcatggttgttcgattcaggaatgaaaatgttggtaacaatagccctataccgatcgtcatttactgtaacgtactggccatcgtcggctttgaagaagtacggaccaatgattccaccagcccataaagtttttctggatgtaacggtgtttgaggattggcttcaaccgaagtgctggttgtccgactaggtatataaacatatacataacaacatttggatattttgataaaaaaaagtcatgcgattaaatgaaggtgctcaaagtacatatataatatgtccatatacatataataagatatatttaagatgggactgttcaaacatattaagtacaaattcgattcccccggaatatacgttattttttaattgaataagaagggaaaaaatgttgacattgtgatatttctacatgtgttagcgaaatgtaaagtttaaggtaagttacttaaaaatgtatttacatttatttgaatatctaccttacgattattaatcgataacataaacagtagaatcaatgttgccatattttaaaaataatatcgataatgcgaaataaacatcggtttggaaagccttatcgatctggcagccctgccgacggccatacttgaaaatacatttttttctgcaaagtttgtcattgtcactgtgtgaatggaatctgtgatgtgttgtggaattaaaaacgtcgagtaaacgacccgtaatggttaaagtgcccggcgaaagcagtgcgaataactatgaattgatacgaaagttgcataacacgtcgcctggtgtcgcggttagtgtgtttttcgtctcgtttcgtttccgccgcagtcgcagtttccagaaaacctcaccacaccataccatctccaccacgcacacacacacacaaacaaacacgcagagacgcggcggcggaaaaagtgtgcggaccgcggatttaacccctcgttccaaacccaaattggagtctcccaaaaacagcgaaatatcgagtgtggcttagccgatgtgccgtgcgatccccactgccccttccgtaccgctgccacccccgccacagcagcaacgcacacggatacggacacagacaccaataccagcgcactcaagcacggccgacaaagaaagagcgctctcccttcctcttcgtacagttagttcctacagctgaatcagccaaaagggaattactaggtccattccgaggcgcagtttgcatgtgaaacggaggtccccgcataaccacgcggaacccgaaatcccagatccccatctccgctgcacggataaaggaaacatacaaccatgagtctcctagccacgccaatgccccaggcggccaccgcctcatcttcttcatccgcctccgcggccgcctcggccagcgggattccaatcaccgccaacaacaacctgcctttcgagaaggacaagatctggtacttcagcaacgatcagctggccaattcgccaagcagaagatgcggcatcaagggcgacgatgagctgcagtaccgccagatgaccgcctatctgatacaggaaatgggtcagcgtctgcaggtgtcccaactgtgcatcaacacggccattgtgtacatgcatcggttctacgcctttcactccttcacccactttcatcgcaactccatggcgtcggcgagcctcttcttggccgccaaggtagaagagcaaccgcggaagctggagcatgttattcgggccgccaacaagtgcctgccgccgaccaccgagcagaattacgccgaactcgcccaggagcttgtgttcaacgagaacgtgctcctgcagacgctgggcttcgatgtggccatcgatcatccgcacacgcatgtggtgcgcacctgccagctggtcaaaggtatgcacccaccatccgacccaagccatgtccccttcacatgtcagatggtactgattactgtggtatattttagcatgcaaggatctggcgcagacatcgtacttcttggcctcgaacaggtatggctagcaatgcgctactctatggtgtaatccctcctagagatcgcccccaacgcaaatacggctgtggtataagcaatgtgtgtgtgtgtgcgggtgtggtgttggcccaatcctccccagaaagtggtcaggctgtagagagttcgatccctgactttttgtggctaaaatctttgggcagttcttttacctgcttaattcctcgcttatagctaacaaacccaggtatgtgagtcgaaacaaaaaaaaaaagtgacgaccccaagtcacaaatcgaacaagaacacgcggtccctaatcgcagcaggacgtctgtacaaatatcgcatcttagcaaaaaggcagtattttccgtgtccctcgcggtaattatcctcagttgcctgcaataacattgtaatttgtgtcggaaaatccgccaaatgtcaagaataagactaattcctagaaagagtcgttaattcctagaaaaagatatttgaagaattgtaatgataaccattgtaatcctttggcatactaaaacatctggaaaaaagataaattcagtttggcatacctgcctacctaaaacatagtcaaaattctgattacatgaggagagctcattgggaaaatttgcgcatttcgaaatatcggcaaacgttttagaataattcttttaagtttaagatccccaagaaataaaagagactcgctaagaacatgctaagaactaaagacgtaatctgtattataagtgatgaaatccccctgcacacactcaccgaactacatttatatgtgatattcttgcaaaagatttcccactaaattgacttaaccatcctggcacagcctgcatctgacctcgatgtgcctccaatatcgccccacggtcgtagcctgtttctgcatttacctagcctgcaagtggtcccgatgggagatcccccagtcgaccgagggcaaacactggttctactatgtggacaagacggtctcgctggatttgctaaagcagctgacagatgagttcatcgctatctatgagaagagcccggcccgtctgaagtctaagcttaactcgatcaaggcgatcgcccagggagccagcaatcggacagctaacagcaaggacaaaccaaaggaggactggaagatcaccgagatgatgaagggctaccactcaaacatcacgacaccaccagagctgttaaacggcaacgacagccgggatcgggaccgagatcgtgaacgggagagagagcgggaacgggatccgtcgtcactactgccgccaccggctatggtgccgcagcaaagacgacaggatggtggccatcagcgctcgtcctcagtgagcggagtgccaggcagcagctcttcgtcgtcttcctccagtcacaagatgccaaattaccctggtggcatgccgcccgacgctcatacgggtaagtatttcaacaactgcaaaaagaatcacatttttaacatcttcgtattgaagatcacaagtcaaagcagccgggctataacaatcgaatgccctcaagtcaccagcgtagtagtagcagtggactcggttcctcgggaagtggcagccagcgcagcagctcatcctcgtcgtcttcaagccagcagcctggccgaccgtctatgcccgtggactatcacaaatcctctcgcggcatgccgccggtaggcgtgggcatgccacctcacggcagccacaagatgacttcgggctccaagccccagcagccgcagcagcagccggtcccacatccatccgcctctaattcctctgcatcgggcatgtcctccaaggataaatcccagagcaacaaaatgtatccgaacgcaccgccgccatacagtaatagtgcccctcaaaacccgctgatgtcgcgtggtggatatccaggcgctagcaatggatcccagcccccgcctcccgccggatacggcggccatcgcagcaaatccggctccaccgtccatggcatgccgcctttcgagcagcaattgccctattcccagagccagagctacggccacatgcagcagcagccagtgcctcagtctcagcagcaacagatgcctccggaggcatcccagcactcgttgcagtccaagaactcgctcttcagtccagagtggccagacattaaaaaggagcccatgtcgcagtcgcaaccacagccttttaacggtttgctaccccctcctgcgcctcccggccacgattacaagctaaatagccatccgcgcgacaaagaaagtcccaagaaagagcgactaacgccaaccaaaaaggataagcaccgtcctgtcatgcccccagtgggcagtgggaacagttcctccggctcgggatcatcaaagccgatgctaccgcctcacaagaagcagataccccatggcggggacctgttgaccaatcctggagagagtggaagcctaaaacggcccaacgagatctcgggaagtcagtatggactaaataagctggatgaaatagataacagtaatatgcctcgagaaaagcttcgcaagctggacactacaactggactaccaacttatccgaattatgaggagaaacacacgcctctgaatatgtccaacggaatcgagacaacgccggatctggtgcgcagtttgctaaaggagagtctgtgtccatcgaacgcttcgctcctgaaaccggatgccttgactatgcctggcctgaaaccaccggccgaactgcttgagcccatgcccgcaccagcgacaatcaagaaagaacagggaataactccgatgaccagtttggctagtgggcccgcacccatggatttggaagtacccactaaacaggccggagagattaaggaggaaagcagcagcaagtccgaaaagaaaaagaagaaggataaacacaaacacaaggagaaggacaagtccaaggacaagacggaaaaggaggagcgtaagaagcacaagaaggacaagcagaaggatcgtagcggcagcggtggcagcaaggacagttctcttcccaatgagcctctgaagatggttatcaagaatcccaacggcagcctgcaggccggtgcgtcagctcccattaaacttaagatcagcaaaaataaggttgaacccaataactactctgcagcggcgggtctgcctggcgcaatcggatatggcttgcctccaactacggctaccaccacatccgcttcgatcggagcagctgctcctgttctgcctccttatggtgccggcggtggtggctacagctcatcgggcggcagcagttccggtggcagcagcaagaaaaagcacagcgatcgtgaccgcgacaaggagagcaaaaagaataagagccaagactacgcgaagtacaatggcgctggtggcggcatctttaatccccttggcggtgctggcgccgcacccaatatgtctggaggaatgggcgcccccatgtctactgctgtaccaccatccatgctgttggcgcccaccggtgcagtaccaccctctgccgctgggctggcaccgcctcccatgcccgtctacaacaagaagtagtggtagcggtcagagggttattcttaagtcgtacgttttgatatatgtatagaacctcagtaagtccgattgtagtatagttgttaggattgttagtgagatgcattattgattttagttaagcacatagataaaactccaaattggaagtgaaaccggatgcgcagatcgaagaagagtggaagtagatgtcgcgatggggctggacgtaaaagcagtactcaaatcgcgaaaacttttgtacagcattaattaatttataactataataaatagcatacatataagcccacatacataaaaatacggaatagttttaagcgaattgttggcaaacggaatcagagacccaagcagaaaattcacagagagcagcaatggccgtctagcgtttaagttagcaaatcaaatacccgtttcacacactctaacctgtatatagccactctcacaaacacacaatcaagagatatatagtacagacttccgcttagcaaatatactaaatacggccccaactaaatgcaagccagagagatagaaagagtaagaacttcaaaataatccccacagaggagcatatagttgtggcagaggataggagagtaaatggaaagccagcgctttgattcaaaattgaagacgccaaaccacataatgaattatttaattaatacatagttgctaatccgaaaatgaatgaagatgtttatttttagttagcaaagttttcccttcctttctgaacgattgcccgattactaaccgtgtttcaatatagttttcgacacctagcaatatatacagtagtgtatttacacttttcaatgaagataagtaaaaagatcggattgtttcagcggatgatattatgtttcaagatcgcctggaacgttgacgtagctttcatttgttttaatttattttttaaatagcattacaaaacaaattaccacaacaaaaaaaaaaccaaaacaaaaacaaataataaagtcccaaaacaaaaacggaatatgcaaacaaaaaagaaacccaaaactaaattttggataaaacaaaagttgttgtgcaagaaaacaaaaagttttaaaattatgtaaatgcaagcgaaaacgttgcaagcaaactaagctaaacgaacgaaaaactaacagaaggctaaacgaggagaaacaaaagttaggcatatagaaatctaggcatgatctatatattcgaggcgaaaatgagaatgaaatgaaattttatgtaattttcgactaaggcaaaggttaagcgaacgttgcgcgtttttcaaaactattcgtactcgtatattcgtattcgatttctctactactgcattaagctgcaagcatatatagctctaaacacaccacacatccattcacacaccatccatcccatgcagtcgagaaacgtattctttaagttgggaacccgagaaacccgtttttataatcgatcgaaagaatgcgcaatttgcgtctaagatttggatttccctttatatacttattcttggccccttttaccacactccccgcccacgcccatccccacccctcgcccctcctaacttaagtttttgtacatacttggaaagcaaatggaaaacccgccgctcgggtggcgggcaagtgtcgggtttcattgggattgtttggttgtgcgttcgaatatgaattcactcgtcacttgcacgcccccacgagggcacaaataaaaatcttcaaaaccccgcaaaattctaaacaaaaaactataaaaatgcaaaaaataaacaacaaaaaaatcaggaaaattaaatgatatgtgtttttcttgcggtgcttgggggaacttcttgttcaactttctgagcgaaacttcagattcttgaaaacggtccaaatattaat

SEQ ID NO: 13502 - DNA, 4911 bp, DROSOPHILA
cagccctgccgacggccatacttgaaaatacatttttttctgcaaagtttgtcattgtcactgtgtgaatggaatctgtgatgtgttgtggaattaaaaacgtcgagtaaacgacccgtaatggttaaagtgcccggcgaaagcagtgcgaataactatgaattgatacgaaagttgcataacacgtcgcctggtgtcgcggttagtgtgtttttcgtctcgtttcgtttccgccgcagtcgcagtttccagaaaacctcaccacaccataccatctccaccacgcacacacacacacaaacaaacacgcagagacgcggcggcggaaaaagtgtgcggaccgcggatttaacccctcgttccaaacccaaattggagtctcccaaaaacagcgaaatatcgagtgtggcttagccgatgtgccgtgcgatccccactgccccttccgtaccgctgccacccccgccacagcagcaacgcacacggatacggacacagacaccaataccagcgcactcaagcacggccgacaaagaaagagcgctctcccttcctcttcgtacagttagttcctacagctgaatcagccaaaagggaattactaggtccattccgaggcgcagtttgcatgtgaaacggaggtccccgcataaccacgcggaacccgaaatcccagatccccatctccgctgcacggataaaggaaacatacaaccatgagtctcctagccacgccaatgccccaggcggccaccgcctcatcttcttcatccgcctccgcggccgcctcggccagcgggattccaatcaccgccaacaacaacctgcctttcgagaaggacaagatctggtacttcagcaacgatcagctggccaattcgccaagcagaagatgcggcatcaagggcgacgatgagctgcagtaccgccagatgaccgcctatctgatacaggaaatgggtcagcgtctgcaggtgtcccaactgtgcatcaacacggccattgtgtacatgcatcggttctacgcctttcactccttcacccactttcatcgcaactccatggcgtcggcgagcctcttcttggccgccaaggtagaagagcaaccgcggaagctggagcatgttattcgggccgccaacaagtgcctgccgccgaccaccgagcagaattacgccgaactcgcccaggagcttgtgttcaacgagaacgtgctcctgcagacgctgggcttcgatgtggccatcgatcatccgcacacgcatgtggtgcgcacctgccagctggtcaaagcatgcaaggatctggcgcagacatcgtacttcttggcctcgaacagcctgcatctgacctcgatgtgcctccaatatcgccccacggtcgtagcctgtttctgcatttacctagcctgcaagtggtcccgatgggagatcccccagtcgaccgagggcaaacactggttctactatgtggacaagacggtctcgctggatttgctaaagcagctgacagatgagttcatcgctatctatgagaagagcccggcccgtctgaagtctaagcttaactcgatcaaggcgatcgcccagggagccagcaatcggacagctaacagcaaggacaaaccaaaggaggactggaagatcaccgagatgatgaagggctaccactcaaacatcacgacaccaccagagctgttaaacggcaacgacagccgggatcgggaccgagatcgtgaacgggagagagagcgggaacgggatccgtcgtcactactgccgccaccggctatggtgccgcagcaaagacgacaggatggtggccatcagcgctcgtcctcagtgagcggagtgccaggcagcagctcttcgtcgtcttcctccagtcacaagatgccaaattaccctggtggcatgccgcccgacgctcatacggatcacaagtcaaagcagccgggctataacaatcgaatgccctcaagtcaccagcgtagtagtagcagtggactcggttcctcgggaagtggcagccagcgcagcagctcatcctcgtcgtcttcaagccagcagcctggccgaccgtctatgcccgtggactatcacaaatcctctcgcggcatgccgccggtaggcgtgggcatgccacctcacggcagccacaagatgacttcgggctccaagccccagcagccgcagcagcagccggtcccacatccatccgcctctaattcctctgcatcgggcatgtcctccaaggataaatcccagagcaacaaaatgtatccgaacgcaccgccgccatacagtaatagtgcccctcaaaacccgctgatgtcgcgtggtggatatccaggcgctagcaatggatcccagcccccgcctcccgccggatacggcggccatcgcagcaaatccggctccaccgtccatggcatgccgcctttcgagcagcaattgccctattcccagagccagagctacggccacatgcagcagcagccagtgcctcagtctcagcagcaacagatgcctccggaggcatcccagcactcgttgcagtccaagaactcgctcttcagtccagagtggccagacattaaaaaggagcccatgtcgcagtcgcaaccacagccttttaacggtttgctaccccctcctgcgcctcccggccacgattacaagctaaatagccatccgcgcgacaaagaaagtcccaagaaagagcgactaacgccaaccaaaaaggataagcaccgtcctgtcatgcccccagtgggcagtgggaacagttcctccggctcgggatcatcaaagccgatgctaccgcctcacaagaagcagataccccatggcggggacctgttgaccaatcctggagagagtggaagcctaaaacggcccaacgagatctcgggaagtcagtatggactaaataagctggatgaaatagataacagtaatatgcctcgagaaaagcttcgcaagctggacactacaactggactaccaacttatccgaattatgaggagaaacacacgcctctgaatatgtccaacggaatcgagacaacgccggatctggtgcgcagtttgctaaaggagagtctgtgtccatcgaacgcttcgctcctgaaaccggatgccttgactatgcctggcctgaaaccaccggccgaactgcttgagcccatgcccgcaccagcgacaatcaagaaagaacagggaataactccgatgaccagtttggctagtgggcccgcacccatggatttggaagtacccactaaacaggccggagagattaaggaggaaagcagcagcaagtccgaaaagaaaaagaagaaggataaacacaaacacaaggagaaggacaagtccaaggacaagacggaaaaggaggagcgtaagaagcacaagaaggacaagcagaaggatcgtagcggcagcggtggcagcaaggacagttctcttcccaatgagcctctgaagatggttatcaagaatcccaacggcagcctgcaggccggtgcgtcagctcccattaaacttaagatcagcaaaaataaggttgaacccaataactactctgcagcggcgggtctgcctggcgcaatcggatatggcttgcctccaactacggctaccaccacatccgcttcgatcggagcagctgctcctgttctgcctccttatggtgccggcggtggtggctacagctcatcgggcggcagcagttccggtggcagcagcaagaaaaagcacagcgatcgtgaccgcgacaaggagagcaaaaagaataagagccaagactacgcgaagtacaatggcgctggtggcggcatctttaatccccttggcggtgctggcgccgcacccaatatgtctggaggaatgggcgcccccatgtctactgctgtaccaccatccatgctgttggcgcccaccggtgcagtaccaccctctgccgctgggctggcaccgcctcccatgcccgtctacaacaagaagtagtggtagcggtcagagggttattcttaagtcgtacgttttgatatatgtatagaacctcagtaagtccgattgtagtatagttgttaggattgttagtgagatgcattattgattttagttaagcacatagataaaactccaaattggaagtgaaaccggatgcgcagatcgaagaagagtggaagtagatgtcgcgatggggctggacgtaaaagcagtactcaaatcgcgaaaacttttgtacagcattaattaatttataactataataaatagcatacatataagcccacatacataaaaatacggaatagttttaagcgaattgttggcaaacggaatcagagacccaagcagaaaattcacagagagcagcaatggccgtctagcgtttaagttagcaaatcaaatacccgtttcacacactctaacctgtatatagccactctcacaaacacacaatcaagagatatatagtacagacttccgcttagcaaatatactaaatacggccccaactaaatgcaagccagagagatagaaagagtaagaacttcaaaataatccccacagaggagcatatagttgtggcagaggataggagagtaaatggaaagccagcgctttgattcaaaattgaagacgccaaaccacataatgaattatttaattaatacatagttgctaatccgaaaatgaatgaagatgtttatttttagttagcaaagttttcccttcctttctgaacgattgcccgattactaaccgtgtttcaatatagttttcgacacctagcaatatatacagtagtgtatttacacttttcaatgaagataagtaaaaagatcggattgtttcagcggatgatattatgtttcaagatcgcctggaacgttgacgt

SEQ ID NO: 13503 - protein, 1097 aa, DROSOPHILA
MSLLATPMPQAATASSSSSASAAASASGIPITANNNLPFEKDKIWYFSNDQLANSPSRRCGIKGDDELQYRQMTAYLIQEMGQRLQVSQLCINTAIVYMHRFYAFHSFTHFHRNSMASASLFLAAKVEEQPRKLEHVIRAANKCLPPTTEQNYAELAQELVFNENVLLQTLGFDVAIDHPHTHVVRTCQLVKACKDLAQTSYFLASNSLHLTSMCLQYRPTVVACFCIYLACKWSRWEIPQSTEGKHWFYYVDKTVSLDLLKQLTDEFIAIYEKSPARLKSKLNSIKAIAQGASNRTANSKDKPKEDWKITEMMKGYHSNITTPPELLNGNDSRDRDRDRERERERERDPSSLLPPPAMVPQQRRQDGGHQRSSSVSGVPGSSSSSSSSSHKMPNYPGGMPPDAHTDHKSKQPGYNNRMPSSHQRSSSSGLGSSGSGSQRSSSSSSSSSQQPGRPSMPVDYHKSSRGMPPVGVGMPPHGSHKMTSGSKPQQPQQQPVPHPSASNSSASGMSSKDKSQSNKMYPNAPPPYSNSAPQNPLMSRGGYPGASNGSQPPPPAGYGGHRSKSGSTVHGMPPFEQQLPYSQSQSYGHMQQQPVPQSQQQQMPPEASQHSLQSKNSLFSPEWPDIKKEPMSQSQPQPFNGLLPPPAPPGHDYKLNSHPRDKESPKKERLTPTKKDKHRPVMPPVGSGNSSSGSGSSKPMLPPHKKQIPHGGDLLTNPGESGSLKRPNEISGSQYGLNKLDEIDNSNMPREKLRKLDTTTGLPTYPNYEEKHTPLNMSNGIETTPDLVRSLLKESLCPSNASLLKPDALTMPGLKPPAELLEPMPAPATIKKEQGITPMTSLASGPAPMDLEVPTKQAGEIKEESSSKSEKKKKKDKHKHKEKDKSKDKTEKEERKKHKKDKQKDRSGSGGSKDSSLPNEPLKMVIKNPNGSLQAGASAPIKLKISKNKVEPNNYSAAAGLPGAIGYGLPPTTATTTSASIGAAAPVLPPYGAGGGGYSSSGGSSSGGSSKKKHSDRDRDKESKKNKSQDYAKYNGAGGGIFNPLGGAGAAPNMSGGMGAPMSTAVPPSMLLAPTGAVPPSAAGLAPPPMPVYNKK

SEQ ID NO: 13504 - DNA, 5030 bp, DROSOPHILA
acggacatggccaggccatgagcacgccgcccaataccacagcctcatcgtcatcctcgcgtgccagcagcggcggcaccaagaagcaacagcttcatcccgcccccatccaaaaccatcattaccaccacccaaatgaacagcacaagttctagactggagccccgaggttccctgcgatccgatcccagatcccctataccataatacccaataccaaacttaggcataaagatttttgataattttttaatggaacttagccaaagttatactctagtgcagacttttgagcgctgcccctagtcgtaggtttgttgtagtttggatatagcggagtttcagccatagatcgtgactcaataatgcacatttgcatacatatatatacgattttcaaatgattgtgccttggttccttcggtggttttagatttaaccaatagccataaaacgttgattttaatctataagtgtgtaagcggaacggaagcggaaacagaaagggaaaaagggagacagggagaccggaagtaaacaagagacgtgtttcacaatatatgtatatgtattttctatgctatttttgtgaggataccttgcgccgaaaatgcgttaaaatttctattatataaattttaacaacaatttttttttgcattatacagaactgatggattgttttcaagatttgaatagagtttaataacgacaactttcgtttgctaggtctattgatgttattgcaaaataatagaaaatatgcgagttggtagcgaaacggaagagtgttaggtaatcgtagcaacaaacaataagcgaatttaaaaagcaaattaacagaaacacggaacaaaaaataatagatctagagttttgggtagcattcgaattcgaagttcaaattgtaattagagcgtgagcacgaaaagtgttttctaaaaataaataaaaaccaagtcaccaattgaatggctcttatttgcattttttcccacgatcagctttgcttctggagcttgtaagtcggcatgaacggaatatagtaggtccacttccaacgacgaatggcatccatgccaagtggaaaatcgtagtcggtggctgtgccatcattaacattatcatcgcccaggggcatctcgtttgcccagtcgattaggcccctctcctccggcgtccctgggattatattgtccagcaagcatcccaaaactccacccacgagaattgtagtgcccagtagcaccgataacgttgagtccacggtcttgtttccggtgtcaatagctccagggttcttctgcatccagcggcacaataccatcgggaaaaatattgagagccccaatatgtaaagattccttgcggatcgcagatccacatactgcaaggtggatagcccaaaagctataatcatgccaaacatcacacaaaagattccgcccaccaccgagtcgggaatgagaatgaaaatggctccaaactttccaattaccccctggaggaccattatcaaggcagcccactgtattacacgtcgggatccaatctaaaatgcagatatttatatttccatcaacttcaattttagtgttctcttttatataaattaccttggtgaccccgatggcgccaacattctctccaaaggtattggttccatttccagctccccacagaccggcgaggacagtgccaaagccctcggtaccgatcccgcgattgatcgcatggagcggaggcgagtgggcgccggacatctgtgacaccgttggatagtaactaagtgactccaccgtacaggcaagtactccggccaacatgccaagcacgccggacagcgtcaccgatggccagccaaactgtcccggatacgggacatagaaccactttgcactggtcagcacattcaggcgaacatcggtgcgagaaggatgtgacggaggaaagacatccgtagcagtcagaattccgcacagaccccacattatcatgatggtcagcaggacgggaaagaggcggaacaactggaactggcgaatttccaagccgtgacccttgcggtaggccaagataggcacgggaacattcgacattatttgcgaaaagagtgtcagcattccagtggttctataaaaaagattaaaacccaaaaaacaaattaccaggctataaaatttctaagaactttaaaacatttatcataggtatagttttactaagcttttttaatttgaaacgatatacattgccaatccagtatttcgaacgtaataaaactaattaataactattataactatctgggtatttctatcagtaatacttaccccacagcaatgccccaatgcttggatgcggtttcagctgcgtgctcgaatagggtaagacccaccagggacacagtgggtacaatggtcaatggagttacgtacttaaggatttttcccaccagaccagtgtagcccaggataacttgcaccatggcggacacggcaatagcgccggatagctcccgcatacgcacttgccatagttcctcccgctcagcctcgtccatggcatccattacggcttgctccgggcacttccactgcggcagggccaagatggcaagggtgggcaccaagaacgatatagttccgccctgaacaatgggcaaacggacgccccacgtggcctggaagtaggtaacgatgcccgtgacgaagatcatcgtagagatgatgatgccccggttggcgtcctcatcggacatgcacaacgccggcgtcaggatgaaaggtatggaaacaatggctccaatcatggtcaggtagtgctggaatgcgaggaagatgctcaagtaccatgggggattatcgttgatggcgtagagcagttgcggcttgggtttctcattacttggaggcgtgttagctgcttgagagtaggacttggaagcatctgtctggaaattaatcaatatgcaacatcaaattattttcaactaaacactgctcaaaagactacagtttttattttatataaatagtttctttttaattaaacgccttttccatataagcatttacctatttgtaaaaggatgatcaatgggcatcgtacaatttcaatttgttaccatcaattaattaataattgaaagtaaaatcttcatcaatattattgatcagtgtaattatattttcttaatgcaaatatctatttgtttatgcaaatgagtggtttttagtatcgggcatagagatattctctcattttattgtataattgcagagtactgaaaattcattgttttatttatgagatttgctattaatgttttgaatttattaacataacaatatggcttaaaacgccccatggggggcggaatttaatcttggcccgagtttgactgacggctctggtctccaatcgtgattaattgagcgttagtatcagtgcttcgatcgctggcgacggttttttctcagcttgttgagatcagtgattttaattagaccataaattaatagctgattggctgtggtggtacttaataaatcagcttgttgtcagctcatgcattgcggaccgaaaggtatgcgccgcataaatataacaaatcgttttgatcggcagttacttactggcgcagatcgttgaaaaaataatttgtgaatgaactgttaattactgggtgttatcttagcgtcttaccccttaaaaacgcatatgtataacacatcggcaacaattaagtgggaaatgcaactgagtgaagaagtgcctcgcaaaacaaaatccgataaaaatcaaaataggaacagatcaattgggggaattcctcttacataaaatcacgcgttcagttattatttggttatgcaaagaaacattggacttacggcgtcctcgatggtaacattgttcagctccatgatcaggcgagctcacactttatatccgccataaactaattgggctaacgcacgggaaaagactcccgaagaattccgctgtacgtccgagcgcgacaaagccccgatactcaatggcgtgatctttctatcgaaaatgttttatcgcagagagctggaagccttcagttcaagagcatctgagcgcactggtgctctctagaatggttctctacacagaacagggcatagtgaaagtaaaataaattaacttgccaattcacaactcattacaactcgagtgccaagaaaaataagctacatattttaaaaaaatcagtttttaccaaagtaccttaaaacattaccatctcagttgagcaaccgaaaaaacaccgcaaagggattataatatttaatgattcccaattaaagtgacaaagttggcatcataaagataaacatgccgaatgtgataaagtagtatatattatctttctctttcgttagacgacgaaaatatttatgatcagcatttagtccaaatatttgaaagcatacttttgggggaaacaaaatatatctcggattttatttcaattgaaaaattaactgttcatattcttgtgtcaatatttaactaaatcactacgttcatacatagtttaatacacattaatttagttttggtggtttttgttgttgtaactgttttataatggtgatattttcattctattctatacacacacggattattcttgtagaaattgatagatcctttcatataagcatttataaaaagttcgatacaataatctcatacatacttgtatgaagtgggatattcagtttgtttaatggaaagattctgacaatgcttttttaatgggagtgtatgcattttgtatgtgtgcacgccctcttctgcgcaaagttccttagcgtagtttgtataacattaatcattacggttccattaagtaaagcacaccaagttctgttgcagtctctcttacaaaaattaaatcaagtaaagccataaaacaaaactcatgcatataaataaaaatgtctagggcagcgcagtgcggtaggcgagcagcatcattttatatccat

SEQ ID NO: 13505 - DNA, 1823 bp, DROSOPHILA
ctttgtcgcgctcggacgtacagcggaattcttcgggagtcttttcccgtgcgttagcccaattagtttatggcggatataaagtgtgagctcgcctgatcatggagctgaacaatgttaccatcgaggacgccacagatgcttccaagtcctactctcaagcagctaacacgcctccaagtaatgagaaacccaagccgcaactgctctacgccatcaacgataatcccccatggtacttgagcatcttcctcgcattccagcactacctgaccatgattggagccattgtttccatacctttcatcctgacgccggcgttgtgcatgtccgatgaggacgccaaccggggcatcatcatctctacgatgatcttcgtcacgggcatcgttacctacttccaggccacgtggggcgtccgtttgcccattgttcagggcggaactatatcgttcttggtgcccacccttgccatcttggccctgccgcagtggaagtgcccggagcaagccgtaatggatgccatggacgaggctgagcgggaggaactatggcaagtgcgtatgcgggagctatccggcgctattgccgtgtccgccatggtgcaagttatcctgggctacactggtctggtgggaaaaatccttaagtacgtaactccattgaccattgtacccactgtgtccctggtgggtcttaccctattcgagcacgcagctgaaaccgcatccaagcattggggcattgctgtgggaaccactggaatgctgacactcttttcgcaaataatgtcgaatgttcccgtgcctatcttggcctaccgcaagggtcacggcttggaaattcgccagttccagttgttccgcctctttcccgtcctgctgaccatcatgataatgtggggtctgtgcggaattctgactgctacggatgtctttcctccgtcacatccttctcgcaccgatgttcgcctgaatgtgctgaccagtgcaaagtggttctatgtcccgtatccgggacagtttggctggccatcggtgacgctgtccggcgtgcttggcatgttggccggagtacttgcctgtacggtggagtcacttagttactatccaacggtgtcacagatgtccggcgcccactcgcctccgctccatgcgatcaatcgcgggatcggtaccgagggctttggcactgtcctcgccggtctgtggggagctggaaatggaaccaatacctttggagagaatgttggcgccatcggggtcaccaagattggatcccgacgtgtaatacagtgggctgccttgataatggtcctccagggggtaattggaaagtttggagccattttcattctcattcccgactcggtggtgggcggaatcttttgtgtgatgtttggcatgattatagcttttgggctatccaccttgcagtatgtggatctgcgatccgcaaggaatctttacatattggggctctcaatatttttcccgatggtattgtgccgctggatgcagaagaaccctggagctattgacaccggaaacaagaccgtggactcaacgttatcggtgctactgggcactacaattctcgtgggtggagttttgggatgcttgctggacaatataatcccagggacgccggaggagaggggcctaatcgactgggcaaacgagatgcccctgggcgatgataatgttaatgatggcacagccaccgactacgattttccacttggcatggatgccattcgtcgttggaagtggacctactatattccgttcatgccgacttacaagctccagaagcaaagctga

SEQ ID NO: 13506 - protein, 573 aa, DROSOPHILA
MELNNVTIEDATDASKSYSQAANTPPSNEKPKPQLLYAINDNPPWYLSIFLAFQHYLTMIGAIVSIPFILTPALCMSDEDANRGIIISTMIFVTGIVTYFQATWGVRLPIVQGGTISFLVPTLAILALPQWKCPEQAVMDAMDEAEREELWQVRMRELSGAIAVSAMVQVILGYTGLVGKILKYVTPLTIVPTVSLVGLTLFEHAAETASKHWGIAVGTTGMLTLFSQIMSNVPVPILAYRKGHGLEIRQFQLFRLFPVLLTIMIMWGLCGILTATDVFPPSHPSRTDVRLNVLTSAKWFYVPYPGQFGWPSVTLSGVLGMLAGVLACTVESLSYYPTVSQMSGAHSPPLHAINRGIGTEGFGTVLAGLWGAGNGTNTFGENVGAIGVTKIGSRRVIQWAALIMVLQGVIGKFGAIFILIPDSVVGGIFCVMFGMIIAFGLSTLQYVDLRSARNLYILGLSIFFPMVLCRWMQKNPGAIDTGNKTVDSTLSVLLGTTILVGGVLGCLLDNIIPGTPEERGLIDWANEMPLGDDNVNDGTATDYDFPLGMDAIRRWKWTYYIPFMPTYKLQKQS

SEQ ID NO: 13507 - DNA, 4730 bp, DROSOPHILA
ctgcccgagcacctgtcccaggagcagctcacccagctgtcggccggcggcgagtttaagctcctattcgacttggaacaagcgaatcgcgaggaggaggaggaggagagcgcctgcctcctggagttgcgatcctgcacggccacccgaacgattagcttcagttaccggccccgccgcagctcctaccgggtgcagccgctctacctgctctgtcaggacgaggagaagacgctggcgcagcagcacgaggtgcactccctcatcgatcttaatttgcggctggtgcagtccatctacgcgcacaaactgcacgcggcgggctttcccaaccgcaccttcacgctcaacggcaagtgctgcgccttccgcagccagttgacccggaaacaggcgctggcgaagagcgaggacgagctgtggcagcatttcgccggcgagattatcgcctgtccgcagtggggccaccagttgctcctcaagttcgtcgcctttgtgggctgcacgcgctacgacggcgacgcagtggtggccagcggtgactcctcgtacgccaacatccggcggcatctcaagggacacgcagcactcggtggcggcggcttggcgctctttggtagtgcccacttctacgcgtggcccacgagcttcgcggagatcggcgactgtgtgcgcagcgcccagcgggtggacatcgcccgcctgccggacgagagcaactatcggcggacgtacggcggcgtctatgccagcaccttgggcgccgtgtgccacgaactgggccactgcttcgatctgggccacaccagcgagggtgtgatgggccagggcttcgactacttgaatcgcgtgttgaccgtggaccagcccacggagcatttgccgcagcgaattgtggacgcccgcaggggctcacttgccaatactaattcatccgagggcggatcatcctcatccagctccacctcctcctcctcctcgtccgccggcagtggcgccgcaacgggcaaccgcgcccgcctcaccaaactgaaattgcagccaagcagccaactgctggacaactaccacaaccagcgacgccacgatagcttctattttgcacgcaactgtgccgtaatcctggcccatcatcgctggctgaatttggagctggagcagacggctgccgtcgactttgaggcggccagcatacaattgaaccgcgacacgcgtgagattcgctccagcaggcccatccgactgatcgagctgcgctgcaaccagaacagcctggtggcccactacgaggagttcgaggagccgtatgtgcaccgcttccagctgcccgcttcgctgtggcatctcctcgcggagcagtgcacccactacgttttcgtgctgaccaccagtggcgacaccaagcggctatcctgcgattcctcctaggattgccgcagcgcgaggtgagtggcccacgtccttggcatagttaactggatgaaaggggcaactttttgcaatgcttgccatatatgaaaatattatcccgaatgcgatttcaatgtatatataatataatcgctttgtaattagtgaatgtacttaaaaatactcgacaagagtagtagaaataatttaagaaagatatcattctgtttgaatgcaactcaattagccagcaatcaattaagctgataaagattccgtcgaaagattcccccgccacgcaatcaaattgcttgataaaaccgaaacccagagcccagccatcatcggtgagtcattgctgttccattgccagattccatacgcggtgacgtgcaccctggttggttggttccacaaaatcaaactgtctgactttcgcagcgctggcgaaaacaaaatagggaaaacaattcagattaacatgggaatgccataattttatttattgataagccttatcgctgttactatgattcgaaaatgcgtgatagttaaaagtttgtctaaaagtttttatttgctaacttgcaaattggcatttgaaaacggttgccatttgaaatacatatatctttttaaaacgcttttttttttagctagaaaaacggtttttaactatttttagtttttagtatttagtttactaaatacttttggtatttacacgcattgcggttagaaaaacgttagcgtattgagtaaattattgtttgattcgagtttttgaatctaaaacactttcaaatactttaatttagcaattgaaagtgttgaaattgttaaagtaacttagaattgtaagtaactttgtctatttcaatctcagttcaaaacttctcaatctaaagctgtaatttttgtaagttcctgctgtccgataatttgagacataaaatcgcgttttatcccatggtgcaaacctgaaatcaggttttcgtactaagccaactcggattggatcgaagtgtgcggaactcgagctctctggcggctctccaagatccaagacgccagctgtgaggtgggttaaagctctgaccccttgcaccaccccccccgtaacccgttccccccggcgagtggggaaacgtagtcgcgcacggcactttgctcagcccagtttccattatcgccgcgtcggaggagaaggccgtccgatggcgagctcaagtgtcgcacgagtgtagagtagtattagaattccgagcgcagctcgttcgataagataaacagccgatattggtgcccgaaactaagcaggtggccaacttcgcttgcagatttaccaatcagtcggcgttcgaagcgcattggatacggaaccaatcggagagctaaggagagcagaaacgcagcagagcagagcaggaaattagaggacggaacaggacagaacaggagcacacgatggcagccagcgagggatcggcggcgcgcattcagttcaaggcgctgcgcggatttccggccatcggcgataccgctgataagctggagacacaggcctttctcgacgcctccaaggagatagtaaccgtcataggtgataacagcgcacccaaaccgaagccaatcaattcaactcactgctatctatttaccatttttcatttttcagagagcttcggcaaactattcacacccgtgatcagcgacatgaacggaaacataaacgtaagctttccaagatctttaagatctaacacgaaatacatacatatatatacatgtgtacattcgttttcattgccgtttattgccgtttcagaaactgacgaaagcctacggagcggatgtggtcaagtaccagtatctggaggatctgatcgtgctgaacgtgaacgtggacgactttgcggccaacgcgctgctctggctgaagcgcggcctgcagctcatatgcaccttcttcgagaacatctacaacgatgcccaggccaaggaggcacttaagcagcatctgcaggacgcgtacgaacgcacattgaagccctaccacggcttcatcgtccagagcacaatcaaggtgggtgcatcgggcgggtatctctcacttccttcgctaattgggcgctcattccctcgcttgcagatcatctacagttgggtgcccacgcgcagccaactgctgggccagggtgtcgcccaggcggagaacatcgaggtgctgaccagcttcctgccgcgtatgcgcgcccatctggactcgatcgacgccctgctgaaggcgcacaacttggacgatgcacgaaaggtgtgatcgttccttagcctagcctagcctagcttagcttaaatagcttatcctactttattatttatgcccatgtccaagtaaaacgcagagccttacttataaaccacctgctgcacagctcatcactacgattccgggtagcgtcgcacgcgtcgcttttgctcattggtcgtgggtgtgcccacactggcggattgctgctgctcctcctcatcctcctccggcagctgctcgttcccttctagcggcagcggcagcttacagcctggcttgcagataacaaagtgcaccagagacacgatcacctcgagaactattagcgcgaacacggcgttcgtgatgatgcgtagccacaaactgcgtccggcagctgagaggcgaagaaagaccatggcgggcagcaggatgcatggtgtcacggtgagcagcatccacatggcggtggcgccagagcacaggttcaccgagtagccggcgtataggcgtacggattcagcggacaccgccaaaacgtaggccaccagcatggacaggccctccaggttccacaaatgatgcagctgccggggacagacggaagctgattatgaccgcacatgccgcagggggggggggggaagggggtaatctcaaatgaaaacttacgcgtatgagcatgtggatcatgtagctcatggcccacaccatggacacatacgtgttggcctgcagcagcatttgcagcaccaggttggcccgatgcggcgtcaccgagtacgccatttcgattggattttcaccaagcactctctaggcactgcacttcagttcagtggcaagtggctgcaacgtttgttgtacttcctgctggttgccagggcaacgtaatcagctggaaaggacgcttcagctctgagtgctgcgactgctgccgtttgcaggacctaagctgcctgctcccgcactcgaaaaggtcctgccgcaagctccttcgatttaaatattcagctacagcctgtctcca

SEQ ID NO: 13508 - DNA, 1190 bp, DROSOPHILA
caacgggcaaccgcgcccgcctcaccaaactgaaattgcagccaagcagccaactgctggacaactaccacaaccagcgacgccacgatagcttctattttgcacgcaactgtgccgtaatcctggcccatcatcgctggctgaatttggagctggagcagacggctgccgtcgactttgaggcggccagcatacaattgaaccgcgacacgcgtgagattcgctccagcaggcccatccgactgatcgagctgcgctgcaaccagaacagcctggtggcccactacgaggagttcgaggagccgtatgtgcaccgcttccagctgcccgcttcgctgtggcatctcctcgcggagcagtgcacccactacgttttcgtgctgaccaccagtggcgacaccaagcggctatcctgcgattcctcctaggattgccgcagcgcgagatttaccaatcagtcggcgttcgaagcgcattggatacggaaccaatcggagagctaaggagagcagaaacgcagcagagcagagcaggaaattagaggacggaacaggacagaacaggagcacacgatggcagccagcgagggatcggcggcgcgcattcagttcaaggcgctgcgcggatttccggccatcggcgataccgctgataagctggagacacaggcctttctcgacgcctccaaggagatagtaaccgtcatagagagcttcggcaaactattcacacccgtgatcagcgacatgaacggaaacataaacaaactgacgaaagcctacggagcggatgtggtcaagtaccagtatctggaggatctgatcgtgctgaacgtgaacgtggacgactttgcggccaacgcgctgctctggctgaagcgcggcctgcagctcatatgcaccttcttcgagaacatctacaacgatgcccaggccaaggaggcacttaagcagcatctgcaggacgcgtacgaacgcacattgaagccctaccacggcttcatcgtccagagcacaatcaagatcatctacagttgggtgcccacgcgcagccaactgctgggccagggtgtcgcccaggcggagaacatcgaggtgctgaccagcttcctgccgcgtatgcgcgcccatctggactcgatcgacgccctgctgaaggcgcacaacttggacgatgcacgaaaggtgtga

SEQ ID NO: 13509 - protein, 205 aa, DROSOPHILA
MAASEGSAARIQFKALRGFPAIGDTADKLETQAFLDASKEIVTVIESFGKLFTPVISDMNGNINKLTKAYGADVVKYQYLEDLIVLNVNVDDFAANALLWLKRGLQLICTFFENIYNDAQAKEALKQHLQDAYERTLKPYHGFIVQSTIKIIYSWVPTRSQLLGQGVAQAENIEVLTSFLPRMRAHLDSIDALLKAHNLDDARKV

SEQ ID NO: 13510 - DNA, 3322 bp, DROSOPHILA
ttttgttgtaagctgccatttgattgaagatatagcaggtgttgagcagagtggataaggattctcagactataggatcagttggggcttaagagtttgtttttagcacaagtgtggtcaaatatggcaatatattcttaatggaattccttacacttctctggtgacagcatattttgactatcttgattagtttctagcctctagaaagtgttgtatctagtcgatgaaacactattctttaacactttcattagatattatattaaaacagatacgcattttccttgtcaacttttaaagtactattaaaataaaatgataaatgaatattcattttgtagccggagcatgtgtgaaacgaattccaacgaatttcagtctgctaaaaaggtataactttggcattcctcttgattttcctcatttgaatgtgtcccccaattattttgaccacagaagccagaagagcgacttttgcccctcgagatgtttgtgtttgtgggggtggccatgtggaaagtgggcggggtgcaatgatgcccgaggggcaatgggcgacgtgctggacaaacagtgcacacaatgtgagtggtatccacactctccagcacacagtgcatcctcttatccctgaaaccccttttctgcctttcaagctggctggctggctggctggctggctggccctcttttctagttcaagtgtttgcattttacgacacagactgacagcacacacacacacacacacactaaccgggtgctcgtgtgggtgactaagtgtgtgcgagtgtgtgtgaaatggttctttattttcgagtttgtgagcttaagtgaaatgtagctgacctaagctgtaaaataaacagggaatatatgtacatatattgcatgtctgaatgtctcaaggtcgcatccgctcatatatctaccttaactaataaatattcatttaaatttactaatccattgcaatttgcctctcaacttctccttcaggcaaattataggcaataatttacaatttaaaaaaaaaaagcttaaataccaaagtaaggagaccacaacaagaagctctagtggcgaagcgaagggtttgaggtcgaggactcaacagcagaatctgcatgtcagcgaataacccaccgcaaggcgaaagatttcaaatcgattatagccacaacttctgatcaatcagcggatccattaagatgctcagttcgctggacgcgctggccggcaaaatagccactgccacgcccggaacgggggcggtaacggcggacagcaagaacacacagtcgctgcaccatcaccatcgcctggactatgattactcggcggttgagattgaaccaccggcggaacaactggccaattcaccgcgcagcgaacgggagcgactgcagcaggcccaacaggcctacgagcagcaggcccaggcggaactggagttcggtctcgcggaggtggatgccaagctgacgcagctaaagagcagccacagtctgcagcatcaccacagtcatcaccaccagctgcagcgccatacggcgctcaatcagcaacagcagcagctgcaccaccatcagccccaccacaatcatcaccaccatcatccgtaccagcgacccagacccacatcgccaccgcaacaacagacgtcctcataccagcagcaactttcccagctggccgctctgcaggatcaccatgatctcctccagacgcagcaggagctcttccacaagcagctggccaccatgcaggagtaccagcgggaaagggaacgggaacgtgagcgggaaagggagcgggaacgtgagcgggaacgggagcgggatcgcagcagcttcattgataacagcgattacgattcccagacggagttcaaaatttgcctgagggatagtccaagtagatatcgttgttcttctcggagaaatcgaaaatcatgcggcgattggccaaaaacgaagcgcggctggtgaacatatttgcgttatcaaactgaattttttacacggtcgacgcgaataatgaataatgaacgggaaaacttgaaactttcaatttagcggcagccaattaccaataccaatacgcttcacgtttactgttaacgcacacggacactcgaggtcggattgattaaattaagggcctaaataaatacttccacttaacacggcactcggaactcaacgtgactaattaaaaaaagctatatatttaatatataaacgcagcggcttcgcttctcctccctcttcctcttcttctttctcgcacttccttttcggtcaatcgtcgatggacaaatgaacgagaaatcgttgcggcgattggaatggagtcaggtggaagttgtgaccttccagtgcattccaaagagagcgtaggaaaaagaacagacttcaaggtcaaaagctcgatggagaaggagagaggatcaaaagtggagactgtctagagcgagatagctacaaactattgcattggtattaaaattaacgggtgatcaagttttaaaaatcgctcaactccaaggccgacatacgtatttaatctgaaaaataaattcgaggaatttatcctatgaatatttgaaaaacaggaaaggttctctttataagggtatttcatgcatgtgaaaataccacaaacgacaggacatcatcattagggtgtgtttgctactgcttaattatgtgaaatgtgatacgttgcgatttgtcttcgtgctcaaacggactttaaagctaattcgaatgcctaaaacaacttggactttggcttgagtgcgcgccccacttgttggccctgtcgattttctggccgaatagacctcaaatagcattaacctaatggccatttgcttgtgtaaataaacgatttgagctttttcgaatggaattgggtcggctgaagcgcgatgagcaaacacttgggcaaaggacctccacaccacacctgctgatttaaggcttactgtctactaacgtttacggtggtgagccaaaaactagagtttactttaaattagaataaattaagtatatacatagatagtaggtttaaatatacatttgaccacttcgagtatatagaaagtaaccagtagagggtagattttaatcggttagcagggcgtattaacaaattattatacattttttggtttagaattgagaatttctttttatctgtttttgtttatatctacacaaatttggtgcccagtagaagttagattttaatcggttagcaggaagtgcaattaacaaattattataacttgatatgtcaggagaaaaat

SEQ ID NO: 13511 - DNA, 4532 bp, DROSOPHILA
aggcaaattataggcaataatttacaatttaaaaaaaaaaagcttaaataccaaagtaaggagaccacaacaagaagctctagtggcgaagcgaagggtttgaggtcgaggactcaacagcagaatctgcatgtcagcgaataacccaccgcaaggcgaaagatttcaaatcgattatagccacaacttctgatcaatcagcggatccattaagatgctcagttcgctggacgcgctggccggcaaaatagccactgccacgcccggaacgggggcggtaacggcggacagcaagaacacacagtcgctgcaccatcaccatcgcctggactatgattactcggcggttgagattgaaccaccggcggaacaactggccaattcaccgcgcagcgaacgggagcgactgcagcaggcccaacaggcctacgagcagcaggcccaggcggaactggagttcggtctcgcggaggtggatgccaagctgacgcagctaaagagcagccacagtctgcagcatcaccacagtcatcaccaccagctgcagcgccatacggcgctcaatcagcaacagcagcagctgcaccaccatcagccccaccacaatcatcaccaccatcatccgtaccagcgacccagacccacatcgccaccgcaacaacagacgtcctcataccagcagcaactttcccagctggccgctctgcaggatcaccatgatctcctccagacgcagcaggagctcttccacaagcagctggccaccatgcaggagtaccagcgggaaagggaacgggaacgtgagcgggaaagggagcgggaacgtgagcgggaacgggagcgggatcgcagcagcttcattgataacagcgattacgattcccagacggagttcaaaatttgcctgagggataggtccatcgacgattgaccgaaaaggaagtgcgagaaagaagaagaggaagagggaggagaagcgaagccgctgcgtttatatattaaatatatagctttttttaattagtcacgttgagttccgagtgccgtgttaagtggaagtatttatttaggcccttaatttaatcaatccgacctcgagtgtccgtgtgcgttaacagtaaacgtgaagcgtattggtattggtaattggctgccgctaaattgaaagtttcaagttttcccgttcattattcattattcgcgtcgaccgtgtaaaaaattcagtttgataacgcaaatatgttcaccagccgcgcttcgtttttggccaatcgccgcatgattttcgatttctccgagaagaacaacgatatctacttggatgcttttggtatgagtgataagagcagcagtgcaacgaacagcctgccgaatagtcccatacacagcaacaacaataatccatcgctgctgaacaacaacaacaataacagcaacggcaccagcagcaacaacagcttaaacgttggcaacaacaacagcaatccgagcttgggcggcagcaacagcaacgcactggtttccgtaggcagcaacggtataatgtccgccgccggtttggtcaacaacaataacaatccgtgcagcgccaaccgcaatgtggtcgccatggtcgacgatgacgcctgcttccgtctggatacggacgccacggtgacgtacggcgagaaggaaccggatccggacaacatcaagatgttcgtcggccaggtgcccaagtcgatggacgagtcgcagctgcgcgagatgttcgaggagtacggcgccgtgcactcgatcaacgttctgcgggacaaggctaccggaattagcaagggttgctgctttgtgacattttatacgagacacgccgccctgaaagcccaggatgctttgcataatgttaagacgctaaatggggtaatgtaccatcccattcaaatgaagcccgccgatagcgagaatcgcaatgaacgcaaactctttgtgggtatgctaaacaagaagctgaacgagaacgacgttcgcaagctatttgaagtccacggagccatcgaggagtgcaccgtccttcgggaccaaaacggacagagcaagggttgtgccttcgtcacattcgccaccaagcacgctgccatttcggccattaaagtgaccctgagccagaacaagatcatggagggctgcacatcgccgctggtcgtcaagttcgccgatacgcaaaaagagaaggagcagaagaagattcagcaaattcaggccaatctctggaacctggccagcaacatcaacatacctctgggccaaacggccaccagcgtgaccacgcccatcctgcccaatccgccgcagcagccttcgccggttctcggcgcagatgccattaccccggcctccattcaactgctgcagcagctgcaggcggtgggactgcagcaccagttgttgcaagccctcacaggactgggagcccagcagagcagctcggcgacggacaccagcgctgtggcggccgcaggacttttgaccccgatgaccgtccagaatctagcggccattgcggccatgacgcagccgagtctctcgaatgccgccgcggcagccgccgctgccacatcgcctggaagcgcccaactgaccaacacggctgcgctgctctgccttttgggtaaaaaggctgcagctaaaaaatcagctaaaaagacagggtccgatccgaatccaatggcatcggcatatatgtcaacagccgccggtctgccgcaattcgggagcgccagtgcattgtccacttcgccgctggccagcgttgccctcagcgccgcagccgccgccgcagcgggaaagcagattgaaggacccgagggctgcaaccttttcatctaccatctgccgcaggagttcaccgatacggatctggcctccacgttcctgcccttcggcaatgtgatctcggccaaggtgttcatcgacaaacagacgagcctgtcgaagtgcttcgggtttgtctccttcgacaatccggactcggcccaggtggccataaaggcgatgaacggcttccaggtgggcaccaagcgtctcaaggtgcagctgaagaagcccaaggactcgaagccctactagaggccaccatcggcggcaaggttaaacggacacatcgagtagaggaacactgagatttgtgaaatatggagtagtcaatgaatgaagagttgcccgtgtagagcgcgttgcaagatttaaacgatgatgcgaatgccaacgttatggagctcatggaatcgaccagcccggattcgatcaaggatcagccggatgcggacaatatcaagatgttcgtgggccaaataccgaagacctgggacgagacgaggctacgccaaatgttcgagcagttcggacccgttcacacactgaatgtgctacgggacaaggtcacatcgattagccgagggtgctgttttgtcacctactatacaagaaaggccgccctgcgcgcccaggacgcgttgcacaacatcaagaccttggatgggctcttcacgggccacggaaccatcgaggagtgcacagtgctccgggatcaggctggtcagagcaagggctgcgccttcgtcacattcgccactaagcagaacgccattggagctataaaggccctccatcaaagtcagaccatggaaggctgttcagctccgctggttgtgaaattcgccgacacgcaaaaggaaaaagaccaaaagaagatgcagcagattcacgcattctgtggcatcaatacgccgagcggtgcgacagcaggtgcggccacgcccaccattaatgccgcaacggctctaatagctgctccgccctcggcgggacgtaccaatccgtcgatggcggccgcactggcggcagtgcctcaggttcagcaggctggttctgcagcaacggcaccaaccaccctcgttcccctgaattccaccaccgccctcagtgcgtccttgacgcccaatctcctagccaccaatgccgcccaccagggggcggcagctgcggccgcctatttgggggcagatcccgctgcggcggcccaccttcagctgtaccaacaactacacggatacggactgagtccggcacactatctgccagggcctccaaatgccgccgacccctattcatcctcgctgagcggactgacaaatggagccgcctacggagccgcatctcaacctgtgaccaccagcgcccttcaagcggcagctgccggcgtgactggcaagcagatcgagggtcccgatggcagcaatcttttcatttatcacctacctcaggagttcattgacacagatctcgcgtcgacgtttcttcccttcggcaatgtcctttcggccaaggtgttcatcgataagcagaccaacctgtcgaagtgtttcggctttgtgtcctacgataatccccactcggccaacgccgctatccaggcgatgcatggctttcaaatcggcagcaagcggctgaaggtccaacttaaacgttccaaggatgcggctaagccgtactag

SEQ ID NO: 13512 - protein, 238 aa, DROSOPHILA
MLSSLDALAGKIATATPGTGAVTADSKNTQSLHHHHRLDYDYSAVEIEPPAEQLANSPRSERERLQQAQQAYEQQAQAELEFGLAEVDAKLTQLKSSHSLQHHHSHHHQLQRHTALNQQQQQLHHHQPHHNHHHHHPYQRPRPTSPPQQQTSSYQQQLSQLAALQDHHDLLQTQQELFHKQLATMQEYQRERERERERERERERERERERDRSSFIDNSDYDSQTEFKICLRDRSIDD

SEQ ID NO: 13513 - DNA, 9104 bp, DROSOPHILA
ccttgagagttgtgggtgctatcgattttccaggcacaccactgaccgccgatgacagcgcgctcatttcgatggagattttgtgggggcggatagctccacgcctctcccattttagcacaagcaactccagtcgcacagtgggacgagtatgctgcatatgtacttgaaaaccaattttgtttacattcacgggctgctacttatgatggtgtgtgtgtgagggaatgttcacacaagcatatgtataaatatatacatataccccgaaacgagtggagcatttacgcactggaagggaacgagaaaactctacacagttttcccagagcggagcggacttttcgccttccaaatacagaaacgattcagtttgcgtgcggagtagaaccgtttgaatgtcggaaaggcgaatagaaatcaaaggatgtgaatcgaatgaaatcctgtaaaagttaacccgcgaatcggttgaggatatagccaggtcaaagggttcgaaatcggaagaagtcggttggttttcggaacaaaggaaaattgaaaaacacaccgccacgttcaacggaaatcagttttcgcgacctatgtgtaccaccccctctgcccgagttttccagcacatttcgtgtgcatatactagaaaggaaaaaaaaaggtgatgtgagcagagaaccgcgacccgacgccactgacataaattcctatttttaacttccctggggccaaaaatccccatcgatgcggaatcaatttcgatccgattcgccagtcgtatgcaaattgtgctaaaattaagacgaccaagggctgcggaaatcccttccagttaacaatttaaagttatttcgcctgtggcttccaaaccgtttgacaatcgcatcgcctctctctctctcgcttgttccctttttctctctcttgctcttttgctatctctctcgcacacttggtaacggtgtttttatgtcagtgtcaaaatcgaacaccgtctgacccgatggttaaaatagttaagcaaagtatattgccaatgtcagtgttaatcatacaacaaagtgcaacaataaagctctcaaaatcctgccaaatgaacgaagttaaaagtttaatattcaatagaaattttgtatatgcctgattactcgaatcgtagcgcttttatagtctttttacaagcccaaaaccagttggtttcataaagtgttaagtgtagttgtaaccaactaaaccagccaactccaaactcaccgaaaccgtataggaataaaagtaatcgtggaatacggatacgtaatcattgccagctcaacgccttgccagccaccgtcaccatcacgttcatttccaccaccaccaacttcatcagcatcgcaccatctggtggtgctggtggtgctgttgtcctcgcacaggatcgtcggaaacatcgccaagatatcttcgttcgaggaagactaccgggctgacaggcccatggtgcagcgcgcctcttcctcggatgcaccctccgttcagggtggccaacatcgagagtctcgatttggccttggatacccctcctaccagagtggatacaacaaactattcacacaggtgccacaaacaatcaaacatccaggggtgggggggaccctaatccatgttctttaatgcgattttcagatgaatgtcacggtttttgtaatcttatctattctaaaacattcaatttaaagtctgatttgaaaatacctcttacttagaaaataatacaaaacaaatttgtttttgtttgccatattccatataggttttgtattttttatacatacgaattagcataaaacgaaacaaattgtacattatgtacattagttataatcgcataaaatgaaaaattactcagcattctcggaggccattatatcggccatgtacttgccaccaactgttgcttcatgtgcggcaagaagaaatattgaaaactatatacattttactgcattgtttggatatttgagttgggatgggattttggcagcgggccaattaaatttgttatgattttcagatggccggtccaattcatttgtctttaaatcggcacttttaaggcagattaaagtctattctgatcccatttattttgaaaatttccagggttctgccgactcgaactactcacaaccgtcatccgatctgtcgctagacgaggaaaaggaatcgcttcggcgagaaaaggaacgtcaggccttaagccagttggataaagcgagggtaagtgtgttgtgcattataaaaatggaaatccaaccctgtaataccctgtaatttcagagcaaaccagtggcgttcgctgtgcgaaccaacgtagcatacgatggcgccatcgacgacgattcgccggtgcagggcggagcagtttcgttcgagatccgggaattcctgcacatcaaagagaagtacgacaataactggtggatcggccggctggtcaaggagggctgtgatgtgggcttcatacccagccccgctaagctagacaacattcgcatgcaggttggatatgatagaaccaattcacacatcttccaagtgtgatctataacgacctctctatcgtagaaccaaaccagaccctcaagactgtatggcacaaagggctcgtcgagcgggaatcttggtgcgggcggacaagcaggtgcggagccatctcgaggtagcacaccccccacacctggtatgacacacatttcattctcctgatttcttttgggcgaggttttatttcgtatctgttcaattctgtgaatcgaattaatttcaatctatatatatttttcgctgtcttctatgtaatgtgtttacttttgtaaatcaccaaaagaggtactcccttcgaggagcccaatatgattatgagcatccataggtccgacagacggatgccgagcccgactcgagctcatcgatgtctattgtaattggacgcgtgttttatgattttcatttcaaagcgaaccaaatcagattccagaccatattgaaaaaaaaaagaaaaaaagaaaatgtgggccaagctaaattcccgtaattttgtacttttgtgtttgatctaattatatatcatgtgacattcatataaaccgagtgcaagttaatgcttacttatatcaacgacttcacccggcaatccgatgcaaatccgtccctagttatgcaaacggcccatttatcggcctagagctagccctagatcccagcatgaaagccgaatccaccagcagatcggtctagactgcttgatattcccgttttagacccaaattcaccactgtaaacacacaaaagtacacaccttaccagcttcaatagccacgattttctccgttcctagtttgtctaaatcaaagctcctcgttcatggtctgcttgtaaactaaccaattagccaatgtgaacactattaaatgcactcaaactctcttttatctaacacaaaactgttgacaacactaaccaaatgaacaaccacaacgcgacccaagatccctacagtacaacaccgcgcaagaaaaacaaaggtttgtccacgtctctcatcagaatctcagaaatccatttcaatcgcaaaaatatcgctagctctttcagggagtttcaggaattttcaaaacaaaacaaatctactcaaaacaaaaaagttcttaaaaagttagctactcagctgtagttgataaagcttaatacattcttaaattaactttacaactttatcagaacagatctaatcagttattatatttcaactttttaactgaatcttttcaattttcgtaagtaaaatattctataaactgaatcaatcagacaaactcattccaaaattcgtatcatctgtccgtaaaactctgttttttggctaatttgtaatgtcctgctaaccgaaacccgtacttagttatagaaatctgtgtaaattgaaagcaaacagaacacttcatacaccctcgagttggcattttaaacagcattaaatggtgcgtagaccggttttaaaggaaaaaagcaaaaaaaaaacgagatgaaaattcaaatcaacctgatattgcgaacctgccgtagaccgacacaattgcccagcacaaaacacgagcacaccgaaatccacggatcagatcaattcgaaaacactgtatatactaactaacccacaagcgtcttacgtatttacgataatatcttaaattggcctagcaattcgtactgatcgatcgcactggctcgtaccaatcataagctcgctcatcctttgccattatttcgtcctgtttgccatgatactaacgctcaggtgacgaatcagattccatgggaccaggacgacacggcaagacaccggcggcggcggccaacaaggagaagcgaaagccattcttcaagaaacaggagacggccagtccctacgacgtggtgccctcgatgcgtcccgtcgtcctggtggggcccagtttgaagggctacgaggtgaccgacatgatgcagaaagccctcttcgacttcctcaagcaccgcttcgagggccgcatcatcatcacccgggtgatggccgacatctcgctggccaagcgctccatcatgaacaatccctcgaagcgggccatcatggagcgatcctccagccggagcgactgcctcggcaaggtgcaggaggagatcgagcgcatcttcgagctggcccgctcgctccagctggtcgtgctcgattgtgatacaatcaatcatccgtcacaactagcgaaaacttcattagcgccaacaatagtgtacttaaagattagtagtagtaaggtgagctatacaatggttgctctctggataaacactttacttattaatatattgttcttgcaggttttacagcgtttgatcaaatcacgtggcaagtcgcaggcgaaaaacctctccgttcaaatggttgccgccgagaagctagcccaatgtccaccggatatgttcgatgtaatcctagacgagaatcagctggaagacgcctgcgagcacattgccgagtacttggaggtgggttaaaggacatatgggttagattcgcaaatatattatatattaaaatattacgtatacgcacattgggacttaggatttatcatgtatgtatctaaactaatctataatgtcttgcagacgtattggaaggccacccacccggacattcgagcagtgccgcccatcgcccgccccctgccgcaggaggcctcgccctccgcagatcccgcgcgtctgggaccgacgcctccaggtaaaggaacacctgcccgctcgttcgggctcatctacggtcgcattgccattttcatacgagcgattccaccaaagtcctcgcccatgcccaagcagctgcgaaatttcaatcaaaccaatatcaatatcaatatcgatatcgaaatcagagtcacccattattgcctctcaccttcccaattcaaacgaattcgatccgacgacccattaagaatacatatcagcatgtgtgtacatagcgatggatatgttatgtatgcacatcagatcagcagtaaaataattttcatttgcttctcaacatactcaacacacttatacaaaatacaattctaaaatttgtctttttcaaatttaaattcccatgactgtaccaaataaaaccaatcgattctccttctggctctctctcccccgatttccaacgcgtggtggtgggcacggtgtgatgagcagtagatggcgaggagtttgtcgatgagcaggatcccaggatgggcatgtccggcggagatcgcgagggaagtcgggagcgagaccgcgatagcagggaaagggagagggagcgcgaacgggagcgggattactgggatcgggaattcaacagagatcgcagctccaaggatcgcgaaagggatctcgagtgggagcgggaacgggctcgcgagtgggagagagagcgggaacgagattgggatagggagttcgattgggaccaaggtaaatttcgtttatactgtttcttttcgtttcgtttacttttgtaccgataatatatatacgtaaactcattaagtatcacttgcccccagaaatcgaattaaagatatatagcattcggttctactgaaagtttagctagaattacctcgtcccaagttagaagtccatatgaagttgtagcctattgtatctctcttatacatagattgtacatagactaaggtgaaaagtagcttcggcaccggctcacatctccacccatctcgattgtatgtagctgcagctcatggcatttacttagaactttcccgctttcttctagacacattttgtacatatagctctcagcaaacaacatcactggtatcctcaatttttcgtttattttctatctttgtttctattttgtgaccacactttacagcattcacagcacgtgacatacccggtccctttacaacaatgctatagatcaaaacgagttcaaatctaaatcaagcaccacgaccaacacaactgcgacatcaacagtacaaaatgccaaagacaattgaacccgaattgaaattgaaattgaaaaccaaaagcaaaaaccaaatcaactggaactagcaaaactagcacccaccgaccgacatctccgacgatctccaccagtacaactctttgccaagtcaagacatccacgaaatccatgtgatgaggtgtgcgcacaccctcgagattaaaccaacccccccgattgcccactaatgttagccgactaagactacctttctgccgtttgagttctactaaccgattaaaagcgaactgcacgaactgcaatcgtagtgccctcctagtgccaagccctctcaaacatccgtcatcaatcaatcaagtctagctaatcgatctcacccattcgaatatttgttccattccaatcgtgcgttttatcgactgatctctgtacttgtttttagttacaccgggtgttgtgcgcctgtaaactgccgcaatccgcgccaaacccgatttctcacattcttccgggtgttttcctagatcagctcaactcaacccaaatcagctcagttataatatatactatatatatatgtacatgtattccgttattgtcgaaccttatgttttcaccatttcaagttgcaaaagcaaatcatctaatcgtttagatctggtttagtgagtaccgaaacccccacgatgtgtttgcgttacattattttttgagcgattttacccattccatattagtgttaaagttatactcgtaactgtcccccgaaattatccttgtttccctaaatgtaccatgcataactgacgctaggtttcgatcatctgctgtttttttttcagcgaatatattgtttattactactttgaaggtttaaccaaatgtcttatttattactaacgttttaaagttacaagctaattaaccaaaaaatagctaaacaaatgcgagcatttgtttattagatgctcacatgtttattacatagaaaagttaccaggtagtcagccacataaataattctttaaataatgtactttcaataaattaaattatattttctaaataattacttggtaattataccatagccccaagtataaatgtatttaatataccaatcttataatgctctcatcgcttcctatatgactagattcctttgtaatataaatcattatgaggtatctcctttagttagagaccgcactgaacacaaaatcccaaatgaccaatttaccggtattggatatctaaagcctgataccaacctttcgcctattgacccttttttgaatgctttagttctggttctgttttccgtttttcgttacccttaaatgcatttgtgtaataacaatttcactaacatattgccgtgttgggcgttttgcaggaggaacctcttaccagcacagccgccgacaaccgacctcggtacgccaccaggagcgcggcggaggggtgggcgcaggcggcggaggtggaggcgtcggcggtggctacgagcgggaccgcgaacgggagcggtacgagcgggcgcgagcgtgacctcatgcactacgatctcaatagcgacgagctgctggacgagcgcaactttgagtatccggcgatgaggagcggtcccagcggcgcctcccaccacggccatctgtccaggggcggacgcctgctggaggatccggactttgagcgcgaagaggcccagatgcggatgagcagctcacgctacggaccctcgaccaggatcgacgacccacgggatctgccgcgtggcgccaccgttgtcgatcgcgatgaatacagtccgcacagaggtggtgggagtagtaggagaatgcttaatgccatgtaggaatcgtggatataggggtgggatcagatcgatgcgagagtgccaggtttgatggaagcacgcgacaatagttttgatcttgacatgatacaccaccagcctcagtctcaatctcaatctcagtcacaatcacagtccaggtccaggtccagacctttaggtctgccacgccaatcctccctgcccagtaatagagcacccgtgtcgtatttgccacgccagtcctccctgggcacacactggctatcctcctcctcgcagagcaacctggatcaaggaccccaatctcgccgagagctttatccactgctgcatcagccgcagtcctattcccagcctcgatcccagtacaccagccactcgtatacatccgcaccacagcacaccagtcagtcgcgttcccagtcccagtcgcactcccagtcccactctcagtatcgctactccgtgcaggacacatcgtttgcccacccaccaagatccctgcgcgaagagttcctcagtcccaccatgagcaaggtcgaagctgtcacccacgccattcgcaacaagatcatcgtggaggaggacgaagaggatatcctgagcacggatcggttctattaaagagatttcagtcgtccaacccgcgtcgattttggtttgggtaaactcttccttgcgggcgggaaagcaagtgcagcagtgccaaaa

SEQ ID NO: 13514 - DNA, 2004 bp, DROSOPHILA
atggttaaaatagttaagcaaagtatattgccaatctcaacgccttgccagccaccgtcaccatcacgttcatttccaccaccaccaacttcatcagcatcgcaccatctggtggtgctggtggtgctgttgtcctcgcacaggatcgtcggaaacatcgccaagatatcttcgttcgaggaagactaccgggctgacaggcccatggtgcagcgcgcctcttcctcggatgcaccctccgttcagggtggccaacatcgagagtctcgatttggccttggatacccctcctaccagagtggatacaacaaactattcacacaggtgccacaaacaatcaaacatccagggggttctgccgactcgaactactcacaaccgtcatccgatctgtcgctagacgaggaaaaggaatcgcttcggcgagaaaaggaacgtcaggccttaagccagttggataaagcgaggagcaaaccagtggcgttcgctgtgcgaaccaacgtagcatacgatggcgccatcgacgacgattcgccggtgcagggcggagcagtttcgttcgagatccgggaattcctgcacatcaaagagaagtacgacaataactggtggatcggccggctggtcaaggagggctgtgatgtgggcttcatacccagccccgctaagctagacaacattcgcatgcagaaccaaaccagaccctcaagactgtatggcacaaagggctcgtcgagcgggaatcttggtgcgggcggacaagcaggtgcggagccatctcgaggtagcacaccccccacacctggtgacgaatcagattccatgggaccaggacgacacggcaagacaccggcggcggcggccaacaaggagaagcgaaagccattcttcaagaaacaggagacggccagtccctacgacgtggtgccctcgatgcgtcccgtcgtcctggtggggcccagtttgaagggctacgaggtgaccgacatgatgcagaaagccctcttcgacttcctcaagcaccgcttcgagggccgcatcatcatcacccgggtgatggccgacatctcgctggccaagcgctccatcatgaacaatccctcgaagcgggccatcatggagcgatcctccagccggagcgactgcctcggcaaggtgcaggaggagatcgagcgcatcttcgagctggcccgctcgctccagctggtcgtgctcgattgtgatacaatcaatcatccgtcacaactagcgaaaacttcattagcgccaacaatagtgtacttaaagattagtagtagtaaggttttacagcgtttgatcaaatcacgtggcaagtcgcaggcgaaaaacctctccgttcaaatggttgccgccgagaagctagcccaatgtccaccggatatgttcgatgtaatcctagacgagaatcagctggaagacgcctgcgagcacattgccgagtacttggagacgtattggaaggccacccacccggacattcgagcagtgccgcccatcgcccgccccctgccgcaggaggcctcgccctccgcagatcccgcgcgtctgggaccgacgcctccagtagatggcgaggagtttgtcgatgagcaggatcccaggatgggcatgtccggcggagatcgcgagggaagtcgggagcgagaccgcgatagcagggaaagggagagggagcgcgaacgggagcgggattactgggatcgggaattcaacagagatcgcagctccaaggatcgcgaaagggatctcgagtgggagcgggaacgggctcgcgagtgggagagagagcgggaacgagattgggatagggagttcgattgggaccaaggaggaacctcttaccagcacagccgccgacaaccgacctcggtacgccaccaggagcgcggcggaggggtgggcgcaggcggcggaggtggaggcgtcggcggtggctacgagcgggaccgcgaacgggagcggtacgagcgggcgcgagcgtga

SEQ ID NO: 13515 - protein, 667 aa, DROSOPHILA
MVKIVKQSILPISTPCQPPSPSRSFPPPPTSSASHHLVVLVVLLSSHRIVGNIAKISSFEEDYRADRPMVQRASSSDAPSVQGGQHRESRFGLGYPSYQSGYNKLFTQVPQTIKHPGGSADSNYSQPSSDLSLDEEKESLRREKERQALSQLDKARSKPVAFAVRTNVAYDGAIDDDSPVQGGAVSFEIREFLHIKEKYDNNWWIGRLVKEGCDVGFIPSPAKLDNIRMQNQTRPSRLYGTKGSSSGNLGAGGQAGAEPSRGSTPPTPGDESDSMGPGRHGKTPAAAANKEKRKPFFKKQETASPYDVVPSMRPVVLVGPSLKGYEVTDMMQKALFDFLKHRFEGRIIITRVMADISLAKRSIMNNPSKRAIMERSSSRSDCLGKVQEEIERIFELARSLQLVVLDCDTINHPSQLAKTSLAPTIVYLKISSSKVLQRLIKSRGKSQAKNLSVQMVAAEKLAQCPPDMFDVILDENQLEDACEHIAEYLETYWKATHPDIRAVPPIARPLPQEASPSADPARLGPTPPVDGEEFVDEQDPRMGMSGGDREGSRERDRDSRERERERERERDYWDREFNRDRSSKDRERDLEWERERAREWERERERDWDREFDWDQGGTSYQHSRRQPTSVRHQERGGGVGAGGGGGGVGGGYERDRERERYERARA

SEQ ID NO: 13516 - DNA, 3196 bp, DROSOPHILA
tgaaggtcgggaaaatcgaacaaaattgatggcagtcggagacgggctgattgattgaaatccgttgattgatgtactagatgaaaaataatcacgacgttggaaaaacaattaaactaggtcatacacaatgggcgggcgaaacaccgttttcggcatttatatttagtgaaaaaaaaaaggaaacatacttaggttgtgtgctgctcttcatttgccgttctccaattcggtcaattatcattttttccggcaaatcgtttagcagcagcagtccagttcagtgtaaatagtttgggtcagaacatgtaaatgtcatttaaaaggttaggttaacgagaaacacaacaactacgggaaatcgtaacacgaaatgtgcacaactttatatatatatataatatagatgcgttccaaaaaagacttacaggttttgattaacagacgagcatagagattaaatcatttaccaatgcgatgtaaacacgaaaaagaaagaactatgcgaacgagtagatcctaagttaacgtatgtgtagatcgtaagaggcagttcgaaaccaaactagctaaagcatgcacataactaagctactaagcgccacggcaaattgcattcaccacccactatctgaactcacttgatccactcactcacttaccactcgcgtacaccactcactcgatgtttaatctttgctaaccacacgaaagaaatcaaaaagcgacatccaaatcgaaaatgaatcttatctttgcacagtttgtcggggacagatgacgagtttgagtattgcaagtaaaaatttagatagatcataacacatatcttccaaaatgggggcggctcatggcccattgataacaatcaagcaactcaaactataatttctagaaaagagaacaagtgtaaatatatgaacgacaaacagccgaatcattcgaatcgaagttacgatcgatcgttggcgatcgaagagcgaatcaataaacactgcaaatcaccttactttatagagctaagtcaggacatgcacacccgtacaccccaaaaacaaaaagaaaaaaaaaaagcccaatgagacacgatccccggcaggagaagacctagcaaagatcaccacactcacacgtttagccagtaagaccgattcgattcgtagggaaagatcgcatgaatttctctgtagtgcaatccaaacctggaacataacccaagcccagaaagaagcaacgccaaaaaccacaaacgaaagaaattctaaaagtacatacatatacatagacccggcaataacacatcaatgccgtcggtgtgaaattaaaacagcaaatcaaatgcctaagtgaaagattagtagcataattttacaatatagttgaaataattgttgtcacccgaaaggaaggtaatcctagaatggaaaccaggataaaaacgaaataattgtgtaaaacccccagaataatgatgtttgtgaaatgtttataaataaatgatgcaaaacgaaatgaaagaatacacagtgtctttaacttctaatggtattatatatttatttgactaactgatatacaaaaatataaataaaatgttcagctcctattttttaaatgcaaaaagtaggccttgttggccattcgattggtctttccattggcactacgctgtaggtcatccacaatgacggctcctccgttcaactgcttgtacttggaatcagtccgagacctcacatagtccaccacatcctgggcctccagctcactgcccagtttcttaacaacagcagcagcagcttcgtctccaaagatgttgctccatatcccgaagacacagacctcggcgacctggggcatctctgagatgacgctttcaatatcgtttggatagtacatgatgttctggtacttcagcatctccttctttcggtccataatgtacaagaagccatctcgatccatgtatccgaggtccccggagtgataccatcccagtgaatctcgcatgttacgagtctcaacttcgtttccgtagtatcccgaccagtgctggttattcatgatgcacacctctccgatctcatcgggtcccagggattcgccgtcatcattaattatcttcatcttcagcccattgaccaattgacccaccgatccggttgtctcgtcgaagtgacagttgatggtggccatggcacccagttctgtaaatccataaacaaactgcaggcaattatggctaagacggctacggatgcctttctgaacctccaaggcagcccgagatcctccaaacatgtagcaccgtaggctcgacagatcgcacgtctcgaaatctgggcagttaatcattagagccatagatgatggtggctgtatggtccacgtaaccttgtactcttcgatgattcgcaaggcaaaggcgggatcgaaggcattgtccgcaatgatgcgggtagtgctgaacactccggaggtaatggtggtaagcaaaccagtgatccagtcaagggtgttgtgagagtactgaacatcagcggtggtcagatgactagtggtacaaaaggaagcaaactttaaaatcattccaaataatatgtataaacaacttactagttgcctgcgaggatgtgccgactgttagttatagttactgcctttggagtaccagttgttcccgaagagcagagaatggccaaagtctgatcgttgcccttttccagcttagctggctggaagttttcttcgatgggcgtggccacaacttcatcgatctttatggaatccaacggatgattgcgcatggtgacaatcttaacatccagttctgcagtggcagatcgaaccttctcaaactcatctccatcgcagaaaataatagaaggccttgtgaccttgtagatcttttcgatcgtatcgcgatcgtatgtaatgttgagtgagtgaaaagctattccgttgaagaaacaggcgtaggctacggcaagcatgtgggtggtattcctgcctatgatgcccactatatcggattgaaggagtcccaatgatcgcatatagctggccaagcgcatggcgttggcaaggagctcccctctggtcagcacagtaccctctgtagcagagatctagaagatattataatgaatcatttgtttagtgggtggtgacctttaatgtactcacctgggcagta

SEQ ID NO: 13517 - DNA, 1196 bp, DROSOPHILA
atggccaccatcaactgtcacttcgacgagacaaccggatcggtgggtcaattggtcaatgggctgaagatgaagataattaatgatgacggcgaatccctgggacccgatgagatcggagaggtgtgcatcatgaataaccagcactggtcgggatactacggaaacgaagttgagactcgtaacatgcgagattcactgggatggtatcactccggggacctcggatacatggatcgagatggcttcttgtacattatggaccgaaagaaggagatgctgaagtaccagaacatcatgtactatccaaacgatattgaaagcgtcatctcagagatgccccaggtcgccgaggtctgtgtcttcgggatatggagcaacatctttggagacgaagctgctgctgctgttgttaagaaactgggcagtgagctggaggcccaggatgtggtggactatgtgaggtctcggactgattccaagtacaagcagttgaacggaggagccgtcattgtggatgacctacagcgtagtgccaatggaaagaccaatcgaatggccaacaaggcctactttttgcatttaaaaaataggagctgaacattttatttatatttttgtatatcagttagtcaaataaatatataataccattagaagttaaagacactgtgtattctttcatttcgttttgcatcatttatttataaacatttcacaaacatcattattctgggggttttacacaattatttcgtttttatcctggtttccattctaggattaccttcctttcgggtgacaacaattatttcaactatattgtaaaattatgctactaatctttcacttaggcatttgatttgctgttttaatttcacaccgacggcattgatgtgttattgccgggtctatgtatatgtatgtacttttagaatttctttcgtttgtggtttttggcgttgcttctttctgggcttgggttatgttccaggtttggattgcactacagagaaattcatgcgatctttccctacgaatcgaatcggtcttactggctaaacgtgtgagtgtggtgatctttgctaggtcttctcctgccggggatcgtgtctcattgggctttttttttttctttttgtttttggggtgtacgggtgtgcatgtcctgacttagctctataaagtaaggtgat

SEQ ID NO: 13518 - protein, 199 aa, DROSOPHILA
MATINCHFDETTGSVGQLVNGLKMKIINDDGESLGPDEIGEVCIMNNQHWSGYYGNEVETRNMRDSLGWYHSGDLGYMDRDGFLYIMDRKKEMLKYQNIMYYPNDIESVISEMPQVAEVCVFGIWSNIFGDEAAAAVVKKLGSELEAQDVVDYVRSRTDSKYKQLNGGAVIVDDLQRSANGKTNRMANKAYFLHLKNRS

SEQ ID NO: 13519 - DNA, 6016 bp, DROSOPHILA
taatgatttacgacgacgatcgcgccgcctggaaggtacgtagccttaattaaataactaaatattctattagactgatatgatatgatacaatgtgctcctacaggtaccccataccaaagagaacatgggcaacatacgcactgacctgctcaagtttgccgaaggcaatatctacgaggagcaccaaaagttcatcacaacgtttgacgagaagtggcgcatggacgagaacataatcctgatcatgtgtgccattgtcctttttacctcggctcgatcgcgagtgatacacaaagacgtgattagattggaacaggtgagtaagcacttgataccatactgcagtattactaactttctttcattcgatagaattcctactattatcttctgcgaagatatctggagagtgtttattctggctgtgaggcgagaaacgcgtttatcaagctaatccaaaagatttcagatgtggagcgtctgaacaagttcataattaatgtctatttgaatgttaacccatcccaggtggagcccttgctgcgtgaaatattcgatttgaaaaatcactagacaaccgatgcgtgtcgggcatttaatgcctatgttgatgcccaatgatgaatggtcaacaagctgtagttgttgttgttgttgatgtctgttttatcttgtcgcttgtaatgttagattttaatcgaatgtgattgttagatttgcatatactgcatagattttatatttctacatcaaagagagcatatttaggataccaagtgcaaagcaacacaatctatatgtaatgtacaccgtttacctagtttcaaataaactagacgataatgcaataactaacttggaagcgtgggttctgtgcaaaaaggaaaaaagacaaaaaaaataaactgactttgagaaccagtggtaataaaatgtctcgtattcttttctactcgaatgaatttcgaaccctccaggacaaattacgcaaacgagtgattttgaacaacaatccaaaataatttaattccgaaagtcacaaaataaaaattcgaagtaggaaaaaacaaataagatgtttggaaaccaacgagagatgtgcttcgttaaagcatcaacccggggaaacaccacagcaaccgcgcatgtgtacccgcgaccagtcctcagaaatccacgtcgtgtacgtatccgcagccagcgtatgtgtccgcatctgccgaccccgtcttacatagtcatttatgtataatgtaggtaatataatagctcgagctcgctccgcaccaccaatgtgcgtcgtgcaagtccattccaattgttatccggtccactcgccgcgcaaatcggctttcaggttgattcgcggcaatccttggcccattgcagaaactcatccaacgcgctgacggccaaattgcgagaaagagccttcacacgcagattacgatcggttgtaatgagcaccaattccgtttgaatgaaacacttgccatctgcaaaagagttttagttagaaatgctatcaggaaggacatttaacggaagcagctcacctgtgcattgttcggtttttgccgttttcgagacagccattgccgttgccagaatcttgtcgtcattggacaaatattcctcctcaactagggcaaacaccgatgcattgacaaacgagccctttgtggtagcacatctagaaaagaaatcaataaggtattattgatcagcaggaaaagctttcctgaacaactattactactgatttaaaagtaaaatttcaatacattatcaggaaacttttatctatctcaatagcaaccaatgaattagacagaattataaatagctaatcgctagtaaaccctttatcagatatcagtaataaaggaactatgagctgacgcgcggaatataattaacaatagcttacttcacattgcctttggccgacttgatgaactctaacgactttttggcccgcgacgacacctcgtcaaagtggtggatgcgctgcgtctgcttcgaactgcggtacgagtccaacttaacgcccttggagaggccatccagttccttaaccactgtcagtggtataataagtgtgtagcgtttaaactccgtggacagtttttcaaagtcttcaaggcagtcgataaagcagttggtatccggtagaagatagcgcggtcgcacctcgatgtatattttcgtgtccacgaacttgagaatgtcctccaacttgctggtgcatatctgcttaaccctagccttggcctcaagctctttcttcagcttgcacagctcggaaacatcggaatcagttgaacgacacaacaattcctcaacggctttacattgaatctttgaaacgttcgccgcaagaccacaactttcagcatcatagttttccaatgcgttcttcatcgctgcgtttaggtgctcgacagtgaagcttgattccaacggctgctggagagcctcttgatgctggacgtagtattcctggaactgaccaatcctacgaacacgttcgaaaaactgaagacgttcggatcctcttttgagatagtccatgctcagcgtttcacgacccaacggagtgaaacctctaagggccacatcctcatccaacagtatttcgtttttctcaagtttgtgcttccccattaagcattcaatgtactcaaaaaggattgttagctcagcccagcaatcgatgaaagagtgtctgcaatattggagttaatgaaaaactaataaaaggcattcaatttatacatactcttccgatctgacgggttcccacacgtccaaactgatgctcaaccaacgtacataaacattcacgaactgtaggtatgtgttcacagtcgcaaagctgaaataaaagattaattagcaataataaataaacaaggcgaattttagcttactcttcttctgggagacactggacatttgtagaatcctctacaaaaccagccagcagctggttcgttttcttcatcatgagtccaaagaatgagttggcaaaattgaagctgtgataacgcatctcgcggcgtgacgctatacaataatagaaagcattaagttttaccacgattagccgttatcattcatacttttgggtttgttgtgctcgacgacgaacaagttgagtgctactattttcagcagtttggagcgtgacaacaggttttcgtgccttaaagcgacgcctatttggatttgcagtttccttagcaacgggtataacgagtccacactgtaatcaattcgaaagttaagtaacctatcggttttcaactttcacattaaaatcaaagttgaatatactcactctgtgccggtgtagagtttgcctaataagtacagataaagggaaacaatgcgaggaagaatctcctccggcggcatctcctcgtaacgattgacctctgccatagtggccttgttgcccttcgccttgttgcccttgtcatcggtgcgatgtaggcgtctgatcccatccggatagatccatacctccttgcgcatctgcttcgacttttgattcttcgatccagctgcatagtgcatgggagattgcttcatctcggtctcctcgtacttacgccgaatctcgtcgaacaaatccagcaggctttccttggcagattggatagagttcgaagtcaacaagctgcggacatagtaataaactgcatcgaagcgcttgtgctaaaggggaaatataaagattataaccacaataaagaattctgtgtagctttttttcttacgtgataaatggaaatgaccgccagctggttgaaaggtgccccgttgccaggtaccagttcctgcgccctctgatagtacctggccgcctccatgtaatctgtggccttgacatggttaacccggtagcgcgtcagatcgcccaaacagatgagcagcctctgggccaccactttaagtgcgctgtcacagcgcgacgatgccacgcacttggccatcagcttgtcgtagagcatgcggtaaaacttaatggcctgttcaatcaaaaggagcgtatgtgtgtgcgcctggtccgtttgctggcgcttcaagtaattccgcacattgtagaagagtagtttccaaaagaagacatcaaccttgtgctcgcacacgaacttaagttgctccaaaagaagttgcttgaaagcgtcctgcagctggtcgtgaatgtagcagaagttcttccagttctgggcgagattacatgatgtttgtttagtgagggtggcttttgttgcccagctatatatacttactatcagtatgagattcctctgattgaggaccatgagctgatcgtacagatggactatattcttggcatggggcagacccaacagcggctcaaaccaatccggatgctcggtggtcaagcgcgtgcgcgtcactggcgactgcgtagcgtgctccttgtccttgcgacccctgcgccgagcactgttaccgctcttgttcttgccctgaccctgtccgttcctgttaacatcgcccgccaccgaggtggtcacgcgcaggatgcctggaatcccgccctcccacgccattttcccgctggtatccaaaacgggttgctttgactgggcatcgggtttgcctcctcctgtgctagcattgctcaggatttcgactgtggcgaaattaagagatgttattgacgaacctattgtgatgcgtcatgcaaacactcacctggccttgaagcatttgctgtcgtagccacgggctccgcattctcagcgttttccgtctccaacgcctttgttgttgttgccgctgctgctgcgtggctgcagctggccgcgattttgttctgcaggcgtttcggcagcgtcccaattatcagcgatatatcattttgttctcgtgttccctttcgactcatattttaaacgatgcttttgctgttgcatttattcctttcttggaagtttgtcaaatgtgtagagtgtaaattacgcctcgaaaaatctttagatcagcagtgtgaccggtggccaaggcggatgagtgtgaccagaccgctaacaatgctgtttggactgctgacatacgcattttttaggcgccagatttgaatgccaaatgattttcaacgtttgctttagaattgatttcttttgaccggaatgcttgatttttgaaaatatatagagataaactatctgcacttctattttagcgacaaaataaccaatttgccagtatgaaatggaattctaaaggtacatttaagcatggagaattcttaattttcattttgacctcagaacattacttacccatttcattcgccacagatcacaaaaccaagatccattgtttctgcctctcatttagccttctatttaaatttaatttcaaactaaaaaaaatagctcatcgaatcagaaaagtcgttgcagtttgagtatgagttcgctttatgtttgcatgttttgttgggtttaattttgttacgtacatgacttcgtttattatactgtttcagtcttccactaacgtataattattggatagcgctgtgaaagtaataatatgcggcccatattgctttacgtgtaagtattatttagaaaatactattttaagctggttggaaaggtaagtttttgatcaatctcttacaaatagcgcatttatgtgtcgagagatgttggtagattagtcaatgagtaattgatggattggttactttaattatattatacatacataagtcgtgtacactttagattcaaataagttgtataaattgttacagtgcaactacaaggaatggctgaagcagactccttggtgtttataaatgttgtatatatatcggcaaaatcgatcattaatttttttatgaactgttcaatgtgagcgtcaatagatttatataaatattgtaataaataattacgtaaaaatgttatcatactttaatcgttaatcctagatcccacatgttcgttatatatgctcg

SEQ ID NO: 13520 - DNA, 3292 bp, DROSOPHILA
atttttcgaggcgtaatttacactctacacatttgacaaacttccaagaaaggaataaatgcaacagcaaaagcatcgtttaaaatatgagtcgaaagggaacacgagaacaaaatgatatatcgctgataattgggacgctgccgaaacgcctgcagaacaaaatcgcggccagctgcagccacgcagcagcagcggcaacaacaacaaaggcgttggagacggaaaacgctgagaatgcggagcccgtggctacgacagcaaatgcttcaaggccagtcgaaatcctgagcaatgctagcacaggaggaggcaaacccgatgcccagtcaaagcaacccgttttggataccagcgggaaaatggcgtgggagggcgggattccaggcatcctgcgcgtgaccacctcggtggcgggcgatgttaacaggaacggacagggtcagggcaagaacaagagcggtaacagtgctcggcgcaggggtcgcaaggacaaggagcacgctacgcagtcgccagtgacgcgcacgcgcttgaccaccgagcatccggattggtttgagccgctgttgggtctgccccatgccaagaatatagtccatctgtacgatcagctcatggtcctcaatcagaggaatctcatactgataaactggaagaacttctgctacattcacgaccagctgcaggacgctttcaagcaacttcttttggagcaacttaagttcgtgtgcgagcacaaggttgatgtcttcttttggaaactactcttctacaatgtgcggaattacttgaagcgccagcaaacggaccaggcgcacacacatacgctccttttgattgaacaggccattaagttttaccgcatgctctacgacaagctgatggccaagtgcgtggcatcgtcgcgctgtgacagcgcacttaaagtggtggcccagaggctgctcatctgtttgggcgatctgacgcgctaccgggttaaccatgtcaaggccacagattacatggaggcggccaggtactatcagagggcgcaggaactggtacctggcaacggggcacctttcaaccagctggcggtcatttccatttatcaccacaagcgcttcgatgcagtttattactatgtccgcagcttgttgacttcgaactctatccaatctgccaaggaaagcctgctggatttgttcgacgagattcggcgtaagtacgaggagaccgagatgaagcaatctcccatgcactatgcagctggatcgaagaatcaaaagtcgaagcagatgcgcaaggaggtatggatctatccggatgggatcagacgcctacatcgcaccgatgacaagggcaacaaggcgaagggcaacaaggccactatggcagaggtcaatcgttacgaggagatgccgccggaggagattcttcctcgcattgtttccctttatctgtacttattaggcaaactctacaccggcacagatgtggactcgttatacccgttgctaaggaaactgcaaatccaaataggcgtcgctttaaggcacgaaaacctgttgtcacgctccaaactgctgaaaatagtagcactcaacttgttcgtcgtcgagcacaacaaacccaaaacgtcacgccgcgagatgcgttatcacagcttcaattttgccaactcattctttggactcatgatgaagaaaacgaaccagctgctggctggttttgtagaggattctacaaatgtccagtgtctcccagaagaagactttgcgactgtgaacacatacctacagttcgtgaatgtttatgtacgttggttgagcatcagtttggacgtgtgggaacccgtcagatcggaagaacactctttcatcgattgctgggctgagctaacaatcctttttgagtacattgaatgcttaatggggaagcacaaacttgagaaaaacgaaatactgttggatgaggatgtggcccttagaggtttcactccgttgggtcgtgaaacgctgagcatggactatctcaaaagaggatccgaacgtcttcagtttttcgaacgtgttcgtaggattggtcagttccaggaatactacgtccagcatcaagaggctctccagcagccgttggaatcaagcttcactgtcgagcacctaaacgcagcgatgaagaacgcattggaaaactatgatgctgaaagttgtggtcttgcggcgaacgtttcaaagattcaatgtaaagccgttgaggaattgttgtgtcgttcaactgattccgatgtttccgagctgtgcaagctgaagaaagagcttgaggccaaggctagggttaagcagatatgcaccagcaagttggaggacattctcaagttcgtggacacgaaaatatacatcgaggtgcgaccgcgctatcttctaccggataccaactgctttatcgactgccttgaagactttgaaaaactgtccacggagtttaaacgctacacacttattataccactgacagtggttaaggaactggatggcctctccaagggcgttaagttggactcgtaccgcagttcgaagcagacgcagcgcatccaccactttgacgaggtgtcgtcgcgggccaaaaagtcgttagagttcatcaagtcggccaaaggcaatgtgaaatgtgctaccacaaagggctcgtttgtcaatgcatcggtgtttgccctagttgaggaggaatatttgtccaatgacgacaagattctggcaacggcaatggctgtctcgaaaacggcaaaaaccgaacaatgcacagcagatggcaagtgtttcattcaaacggaattggtgctcattacaaccgatcgtaatctgcgtgtgaaggctctttctcgcaatttggccgtcagcgcgttggatgagtttctgcaatgggccaaggattgccgcgaatcaacctgaaagccgatttgcgcggcgagtggaccggataacaattggaatggacttgcacgacgcacattggtggtgcggagcgagctcgagctattatattacctacattatacataaatgactatgtaagacggggtcggcagatgcggacacatacgctggctgcggatacgtacacgacgtggatttctgaggactggtcgcgggtacacatgcgcggttgctgtggtgtttccccgggttgatgctttaacgaagcacatctctcgttggtttccaaacatcttatttgttttttcctacttcgaatttttattttgtgactttcggaattaaattattttggattgttgttcaaaatc

SEQ ID NO: 13521 - protein, 949 aa, DROSOPHILA
MSRKGTREQNDISLIIGTLPKRLQNKIAASCSHAAAAATTTKALETENAENAEPVATTANASRPVEILSNASTGGGKPDAQSKQPVLDTSGKMAWEGGIPGILRVTTSVAGDVNRNGQGQGKNKSGNSARRRGRKDKEHATQSPVTRTRLTTEHPDWFEPLLGLPHAKNIVHLYDQLMVLNQRNLILINWKNFCYIHDQLQDAFKQLLLEQLKFVCEHKVDVFFWKLLFYNVRNYLKRQQTDQAHTHTLLLIEQAIKFYRMLYDKLMAKCVASSRCDSALKVVAQRLLICLGDLTRYRVNHVKATDYMEAARYYQRAQELVPGNGAPFNQLAVISIYHHKRFDAVYYYVRSLLTSNSIQSAKESLLDLFDEIRRKYEETEMKQSPMHYAAGSKNQKSKQMRKEVWIYPDGIRRLHRTDDKGNKAKGNKATMAEVNRYEEMPPEEILPRIVSLYLYLLGKLYTGTDVDSLYPLLRKLQIQIGVALRHENLLSRSKLLKIVALNLFVVEHNKPKTSRREMRYHSFNFANSFFGLMMKKTNQLLAGFVEDSTNVQCLPEEDFATVNTYLQFVNVYVRWLSISLDVWEPVRSEEHSFIDCWAELTILFEYIECLMGKHKLEKNEILLDEDVALRGFTPLGRETLSMDYLKRGSERLQFFERVRRIGQFQEYYVQHQEALQQPLESSFTVEHLNAAMKNALENYDAESCGLAANVSKIQCKAVEELLCRSTDSDVSELCKLKKELEAKARVKQICTSKLEDILKFVDTKIYIEVRPRYLLPDTNCFIDCLEDFEKLSTEFKRYTLIIPLTVVKELDGLSKGVKLDSYRSSKQTQRIHHFDEVSSRAKKSLEFIKSAKGNVKCATTKGSFVNASVFALVEEEYLSNDDKILATAMAVSKTAKTEQCTADGKCFIQTELVLITTDRNLRVKALSRNLAVSALDEFLQWAKDCREST

SEQ ID NO: 13522 - DNA, 3088 bp, DROSOPHILA
tgtagtcgccgtactggaaccaagcatcggctaccctggtgttcaccccatccttgtagttcgagttccaaccgtgaatggtgattctatagagccattacagttattttaagaatgaattgatctcttgcttgctcacctagttggattttgaggattgaaaaaagaaccatcgatggagtcttgggtagccttgatctgttgtcctgtactaggattctgcagcgtgtaaaggtagaagttaaccgtgttggtggacagacgaccttccaacgcctcctgagcctcgtagtattccaactggcgctccgcctccgccttaccaatccatcttaggccaccttccctttgagggacaaaccaaccattgatgccatgatctcgaaccgaaagttggtcgaccggccaggcgctggctaaattcaattcatgctaggttaccgaaatctgtcaatgtgcaaagtttttaccagctatcacgcagcccagcacaagaaggcacaatctcatcgttgaagtgaatatttagaatggtttactagttgttcgtggtactgctatttataccttcagtctgcaaatgttgaatgagaaccaaatctgcgcaacaacagtaaagtgattagatcaagtttaatcagtaagattctaagaccacgaaaaaaaaaacattgcgagcacttaacgaaattcttggaaatttattttgtgctcagcaattttagagaatatttccaaagtaatatcatttcggttttaaaaaaaaactagtccattattaaattatttcttaatacaacgaaattaccaaactatctttcattcaattttcgttttataattaatttttgtttttaaaagctttaagttaaagtaaatctagcaagttcccaaacttgcggtccacaatggtagcccggaatatcggtaaaataaagctcacaacggattgctttcgctcacagagctttcacacaatttattagattatagactggacttagttgcccattccgtagggagcatcgctacggacgggtacatagtaatctccagcgaccatgtaggcattggtggtggctcccatgcggacggagctgtaggagctaccgcactccttggccacagcctcctcgtagtcgccgcagcgcatggtggggaagttgttctcggtcacggactcggcgtagtagatcactgagcggctgtgggcgcaggatccggtgagatcaacaccacatccgggctggctctttcctccgttggggtagaaggctcccttgccgatgggcttcaggaatcccagggttcctccgttggtctggatggactccacgtagtaagcatcggtggagctcaggcgcttgttgggggaatcgtagctgaaaaggggcagggcggggtccagaccaatgatggtgtgcagctggccgttcttcacattcttgccagcatagcccgagacatgggcgcccaggctgtgaccaatcaccatggtgttgtccaggttcaggccgtgattgctgcgcataaagttgatcagggtagccacctgctcgccgactccgggaacagccagaacggaggaggcgtagtccacggaacgagcacgtccccagtcgacggcaatcatgttcatgtcgccgtgggtgaaccaggcatcgcggacaccgtagttgatgaactcatccttgctggaggaccagccgtggatagtgaagcgggtggggtggttggggttgaagtgcgagccagagatcgatgctgacgtagccttgatctcctggggagagttgcggttcgagttggtgtacaggtagaaggtgacggggttcaggacgttgcgtccttccatgcggttcttggtctccaaataggcctcggcgaactcgcggtccatccactccatggtaccatcggcctggggcacataccatccgttctcaccattcacacgaacctccacggcattagctgaaaatgcgaaatgagtgcaaataatggaataaggatgatattgtggtaccttctcgaacttacccgccaggacacaaaaggccaaggccaggaacagtttcatcattgcggcaaagtcaacttcaactaacaactgtaggtggcgtggtagctactttatatggatggtgggtccgatcagtcgatcaaatcacagacaagttgaagcataccacttaagataggccactggattggccactcggaccatcggctgtttcgataagagtggaacatgtgtttgggcaatctgttcttagttgaatgtccatcttgaatataatttgattgaattgatttcttcttggccgcgtgtccctatgaagtagttcacgtttcagataggcaacaattgttgacgttcaatttgatcagtgcttttatcatctttgtgtgaagagatagactatctttaagccaatttcagttaacagagtgtctgtgtcataacatcactcttcaaattatatttaaattagatataaatctcattcattgttcacacatgaacacgaatatatttaaagacttacaattttgggctccgttcatatcttatgtaaatgaatcgagagcgataaattatatttaggattttgttatctaaggcgacatgggtgcattgctcaaaaacatgtaatttaagtgcacactacatgagtcagtcacttgagatcgttccccgcctcctaaaatagtcccttagtgggagaccacagataaggtcctcgccgctcaagataggcagatgtgcccgagcgtgggacctcgataaggcggggactatttacgtaggcctctgcgtaggccatttactttaagatgcgattctcatgtcacctatttaaaccgaagatatttccaaataaaatcaagttttcttacaaaaactcaacggagtaaagtcttcttatttgggattttcatttggtcatcgagcctttaatcgactctgcagtttccccctaccaaaggtaagggaactcagagaaaggccagctcctttaagcatcttacagctaaaggtagcaaaaataagtgactcttgtttccccctaccaaaggtaaggac

SEQ ID NO: 13523 - DNA, 1022 bp, DROSOPHILA
ccgcaatgatgaaactgttcctggccttggccttttgtgtcctggcggctaatgccgtggaggttcgtgtgaatggtgagaacggatggtatgtgccccaggccgatggtaccatggagtggatggaccgcgagttcgccgaggcctatttggagaccaagaaccgcatggaaggacgcaacgtcctgaaccccgtcaccttctacctgtacaccaactcgaaccgcaactctccccaggagatcaaggctacgtcagcatcgatctctggctcgcacttcaaccccaaccaccccacccgcttcactatccacggctggtcctccagcaaggatgagttcatcaactacggtgtccgcgatgcctggttcacccacggcgacatgaacatgattgccgtcgactggggacgtgctcgttccgtggactacgcctcctccgttctggctgttcccggagtcggcgagcaggtggctaccctgatcaactttatgcgcagcaatcacggcctgaacctggacaacaccatggtgattggtcacagcctgggcgcccatgtctcgggctatgctggcaagaatgtgaagaacggccagctgcacaccatcattggtctggaccccgccctgccccttttcagctacgattcccccaacaagcgcctgagctccaccgatgcttactacgtggagtccatccagaccaacggaggaaccctgggattcctgaagcccatcggcaagggagccttctaccccaacggaggaaagagccagcccggatgtggtgttgatctcaccggatcctgcgcccacagccgctcagtgatctactacgccgagtccgtgaccgagaacaacttccccaccatgcgctgcggcgactacgaggaggctgtggccaaggagtgcggtagctcctacagctccgtccgcatgggagccaccaccaatgcctacatggtcgctggagattactatgtacccgtccgtagcgatgctccctacggaatgggcaactaa

SEQ ID NO: 13524 - protein, 338 aa, DROSOPHILA
MMKLFLALAFCVLAANAVEVRVNGENGWYVPQADGTMEWMDREFAEAYLETKNRMEGRNVLNPVTFYLYTNSNRNSPQEIKATSASISGSHFNPNHPTRFTIHGWSSSKDEFINYGVRDAWFTHGDMNMIAVDWGRARSVDYASSVLAVPGVGEQVATLINFMRSNHGLNLDNTMVIGHSLGAHVSGYAGKNVKNGQLHTIIGLDPALPLFSYDSPNKRLSSTDAYYVESIQTNGGTLGFLKPIGKGAFYPNGGKSQPGCGVDLTGSCAHSRSVIYYAESVTENNFPTMRCGDYEEAVAKECGSSYSSVRMGATTNAYMVAGDYYVPVRSDAPYGMGN

SEQ ID NO: 13525 - DNA, 6779 bp, DROSOPHILA
actaggtattctatttggtcggtgtatttaacacattacatttccttaggtccgtaaactttaagaacaagccagaaggaagctctcgtgttgtcgctgaggaaatcattgaggagatcaaggatgaaccgttggacacaccgtcagctcctccaccagccaaacaggccaagcccagcacgatcagtctttccgccacatcctccagcaaagcatccgcagcgcagtcaatggttaaaaggaagacaccattggtgctggtcaagcccaaggcaaccgcagtagcaaagcccacggtagccactggaacgacgcaagttgaatccaaaccagccgcaaccacgccctcagttgtgtctgcaccagcggaaactaaagctacaaatcagccagctgccgctccagctggactttccctcttggctgcctacagtgacagctcagaggattccaactgaccaagcatttacctgatgacacacttacaactcgaagacagattaaagcaagttcaaataataaaagcagtcgatggttttattttactaaacttgaaatatgccgcaatccaccaagatccccattgactgaaaattccgataaagtattggaataatgcatcattttattaaatattttgactttgtttcattttgtattctttcaaatttttttcaaggccaaacttaaggcaaactcatttcaaattcaaacagaaaattaatcaaagcaaaaggtaactgcaaagtattcttctaaggtacactcccactcatttggagctgtcatagccgatttactggcaaccatttgataaacgagtgtgtttccacgcacgaaactgatatcgactacaattaaagtctaagtgatatatatacagtggtgaatgtattacgtctaaaactcgggcaatcaaaataataaataatatcacaagcgaaagaaaattataaatatacatatacgataattaaatattatgcattacaagttaatgataatcgattctaacgattaatttcataaattacgaagacactggtatgtttctctagctgtcctatttccatagcaaaggcatcaataaggccgcctgctctatggtcgtggccagtccaaaagtctgggccaccatctacgaattataattacgagttaaacagtctttgtgttcgttttgggggcggactgcggttggggttacggtgcagcctccagtttttggtatatgatcctgatcatcctgctcatttggttaagccaccgctcaaatgtccactgttgtgcactgttggatggagctgtagttgctgccgctggcaccagcgctgcatttgcggagcagcgcgttgggcaccattttgttgaccccaccagcaacgccaatcccgccaccgtcgtagttgtgattgttgttctgcagaaagagatgctgctcgggttcagcataattcacttcgtatgtatgctttatgtatggtggctcgttttcttcatacacctcctcaacctcctcctcctcctcgtcgtcggtgtgatgcttatgactgggcatggccacctcaaagtcatccagagtgcgtttcacagccgcatccgaaccggtgcccgagtccttgctggacaaatgatcctgctgggcctccaagtccgtctggcgcagatagcttagggtcagtccctgctccaggcagcgctgttcggaggggggtgttgacatcacggtgagacgtctgtggttcgcctcatcatagctacagcccagatccgcaaggcttcgcgggcgtaactgcgttgaatgcctttcggcagccaggctcatgcgtagtttctttttctgatagcgcagagtgcaccaaatgatgcagcagtcgaccacaacacagatgacggttactgtgattatgcccaccagcaagacgacccagttaaggttctccttgaccactaccagctctgattgcagcgtaaacgttcgcgagttgtccgttatctcacagcgaaagtgtccagcatcgttagactgagcattcaggatcacgagcaattccttgttattggaaaaatagtaacgatcgccgtccggagctgttggcgagatgtgtatcggtttgttctccttaaaccactcgcggtgcggatgttctagctcaaaatcagcattggccgtttcgctaagacattgcaacacacatgtacggcccacaaccacctcctggtgcaccaagggaatgctaggctgcggtttgtctgtattgaaaagaagaaacacattagtgaagaaagtaaagtaaaaggcttaaaggaacctaccattcaccaccaacgttgcattgaccttaatctcgcccgcagcacttaacgctgtgcacgtgtaaataccagaatcgctaggcttagcgttggttatcaaaaatgcgttctcctcgcggatcacttgcagccgacgctcggttgccgctggaaactcactaccgccgaacttttgcagcgctatctcaggtgtgggatcaccgctggccgagcagaccaatcgagccatttcgccagcgtccaacgttagattcgacggcacttgcaaaaaggtgggatgaactgggaatgtaaggatagttattaatataaatctaaatgacaaaggcaatgtgtgtgcgtacttcctatagatatcttaaatttctgtgcataggtggttccgaaggcattcgataccacgcactgatagcgtccagcgctttcgtaggtcacattcgtgagcctcagatagccatagatggaggtctgattggtgctcagatcatgacggatctgcgtttccgtgctagcaccgtcgtgcacagccggtcgctcctggacatgctgattgtcgtggcgccatttgatcttcagctcatcggcggcggccagtgaggcagctgtcggtgaactggcaatgcattccaaagtgatgttagctgcattcacggccagcatgtcgtccggttcttgttccactcgcggtttcggggagtccacttgaggagataaataagcgcgttagtaatctaaacattaaacattataatatcacacttaccgcacaccaactccgaactgctcagtgactttagatgccgatctagtagatgctccggatagccacacaccgcgtgctcggcctgctggggaaaacgattcttcagccactgttggaaccagaccaaatcgcagtcgcagatgaagttgagcgatttaaaaaccaatttatttaggcgaagcatgtgctcaaaagcgttgacctgaatgctggccagggcattggaaccgagattgagtatctccaggttgttgagaccactcatcgccttagtgctgatctgctttagattattgccatgcaaatccaagcgtcgcaattttcgtagccctttgaacggagccgccgcactctgatcctcgatgatccaggacaaacgattgcgacgcaggttcaactcctcaagatttttcacacaatcaaaggtgttttcctgcagatattgcaatcgattgtgggctaggttgagcgttttcaggcgatgtaggcagtccaaatgctgtggcttaaactcgttgattgcattgttcgacagatccagcacttccagcgactgagtgaactcccatgtgtcaacctcaatgcgtgaaatggcattaaacgacagattgaggtggcgcaattttgtcagattaaagagaccctggcgggaaagggaactgatctggttcatggccagatcaatggtctcgattttatgcatcacatagaagacgccgtcctgcagcgcacggattttattggacttcaattgaagatttttcatcgactccaggccacggaacgtggaccagtttatctccagttggttaaagttgagagctctgtggtaaagtgaaatcaaaacattgtaaaggttgttcaaaatgcagtattttaataacttacagcttcttcagttgattcagatttttgaaaacccttatgggcagagtgcttaggcgattattactcagctccagatctgttaggttgtttagagtcgcaaacgagtgctcattcacattggttatctcgttaaaactgagtattctgtgggcaaaaggattaatatttgcctaaatcaaggaacattcaaggtaactcacaagtgaactaggttatttgacttcggaaaagagttaagctcgatggtgtgcagcttattcctggacagatccaacgttctcagcagtggcaaagctgccagcgactcgctggagatgctggttatatggttgttagccaataccaagtgcttcagaccgctgaggccaatgaatttcgggattacctccaataaatttcgttttaatgaactaaaagcaaatgtaaagtgtaattagtttaaagtattctcggataaactctcgattgacttacacttttgtcaaattcaacagattacgtatctccagaacggttgtatcgttcaatttgttgttagccagatgcctgcaaaaaaaagataaaagttaatttacgccatttgtaaaatccttggctagcccaatgcaactcaattatgtcgcaattatcgatgcaaagctactgataaaaaccgaacgacgtttgcataattttgccatgcattaaattgattaaaagcgcaacgataaaatcgcaacccccccaaaaaaaaaaaaaaataatgctaaaattgaggccaaatgtcgatgtagagggttgtgccactctgtaatttatattcgcagagaatatctgatgggggtggctcgccatttcatcccccaaggaatttatggatttaaataatgtcgaatgtttcaaactccaccaatattcgctattcttctgaagttggaagtttttgaagaagaaaaaccacaatgaccttaagttaatgtgaagctgattaaatagtttttccaatcaaaataaaaaaaaatgaagatctgcctgaaatttcctcctctattaacaatatacttacaaagtttgcacgtagctgggcaagacgggcacccgttccagatgcagcttatcgcagtcgaagaggacattgaggcacttgcagtccttggggcagtcgatgttgtacttattactggccttggctgccgcagcagcagcttccagtgctttctgggcatgctcgtactgtccaccatcgtcggccacgaatccatttgtctccagcgagccggattgtatggaaatgccggaggaggaggaggatccttgaacgccagccggtggatgtgaggcagacagcggatagtgcaatgcagccatatcctcctcgtccacatccgcatccgagtaatcctcgctgagtgccatgaagtgctgcctggcgctggtgtagcctctgttgccgccactcgatcgcggtcccgacgagccacctccattcctggtcagcatggcgaagagctgctgttgcggcaactgttgattgtaggaggcgccaccggatttgagtagagcactcaggggggatcccccagtggaaccggatcctccaactccattgccattcgatgatgacggcgactgggcggcgctttgacaaattgtggccgctgttatcagcagcatgtacgtaattagcagcaatttattgattttattgaaatcattggttgtagaataattgcaattatcattactgcgactttcagatgccgcattgttgttgttgctgctgctgttgttgttgttattgttgttgcgccgccgacgacgactccacgacattaaatatttgccattgccactcgttttgatgtcgcagattcgataattactaatgaccatagagctatcatcatttgactccctcgtcggatgtcggccttttatggctgaaacgtgcattttgcgacttttgttaaattcgttgagtttcaagcggcggtaagaaagcgccgttatttccagcgaacgtcactcgccctcggccagtgttggaaagctcctttcgccagccaagcattctggtattccgtgcatagtgcctttgaaatgaatggaaaagaaatagaaaatcagatttggaaaatactctacaaatatttgaaaatggaaataatacgaaatctaaatgcttacgtgtaaagaaagaacgaaaataaaaaaatacttaaaagagaaacacttaaaacattttatgcttgctgctttcataacataaatgtcttttaaatatataaataataattgtgcagaaagtgccagtgtctctggccgagcagagaatttatactcattaaattaaaatacgaccggatgttttgtgcgaaatgaaaaacaaaaaaaaaaaaaaacgcgcagagccaacgattttataatgaaaacaaaacagcaaccgagcaccgcgcactgccgtagttgcaaaaacagcaaaacatatcatctcatcatcatttctgtggcgacgaccacgagtacgagtacgaagtgtctactgccagacggaggcccccggaggcattcggaatgcagaatttaaaaaactcagacgtaatgtcttcatcttgctccagaattgtgcagcgtgcgctggatttattttgaatacataaatgcggagggcgttgcgttggaatcaaagctcgccaaattcgttgacagtacggcggcgagataaagtacgtttgtatgctgcgcagtttgtggtcgctgctatcacctttttggtggcccccggatgcgagcagaaatgatgctggagcactttcccaccatatagacacac

SEQ ID NO: 13526 - DNA, 3792 bp, DROSOPHILA
atgtcgtggagtcgtcgtcggcggcgcaacaacaataacaacaacaacagcagcagcaacaacaacaatgcggcatctgaaagtcgcagtaatgataattgcaattattctacaaccaatgatttcaataaaatcaataaattgctgctaattacgtacatgctgctgataacagcggccacaatttgtcaaagcgccgcccagtcgccgtcatcatcgaatggcaatggagttggaggatccggttccactgggggatcccccctgagtgctctactcaaatccggtggcgcctcctacaatcaacagttgccgcaacagcagctcttcgccatgctgaccaggaatggaggtggctcgtcgggaccgcgatcgagtggcggcaacagaggctacaccagcgccaggcagcacttcatggcactcagcgaggattactcggatgcggatgtggacgaggaggatatggctgcattgcactatccgctgtctgcctcacatccaccggctggcgttcaaggatcctcctcctcctccggcatttccatacaatccggctcgctggagacaaatggattcgtggccgacgatggtggacagtacgagcatgcccagaaagcactggaagctgctgctgcggcagccaaggccagtaataagtacaacatcgactgccccaaggactgcaagtgcctcaatgtcctcttcgactgcgataagctgcatctggaacgggtgcccgtcttgcccagctacgtgcaaactttgcatctggctaacaacaaattgaacgatacaaccgttctggagatacgtaatctgttgaatttgacaaaagtttcattaaaacgaaatttattggaggtaatcccgaaattcattggcctcagcggtctgaagcacttggtattggctaacaaccatataaccagcatctccagcgagtcgctggcagctttgccactgctgagaacgttggatctgtccaggaataagctgcacaccatcgagcttaactcttttccgaagtcaaataacctagttcacttaatactcagttttaacgagataaccaatgtgaatgagcactcgtttgcgactctaaacaacctaacagatctggagctgagtaataatcgcctaagcactctgcccataagggttttcaaaaatctgaatcaactgaagaagctagctctcaactttaaccaactggagataaactggtccacgttccgtggcctggagtcgatgaaaaatcttcaattgaagtccaataaaatccgtgcgctgcaggacggcgtcttctatgtgatgcataaaatcgagaccattgatctggccatgaaccagatcagttccctttcccgccagggtctctttaatctgacaaaattgcgccacctcaatctgtcgtttaatgccatttcacgcattgaggttgacacatgggagttcactcagtcgctggaagtgctggatctgtcgaacaatgcaatcaacgagtttaagccacagcatttggactgcctacatcgcctgaaaacgctcaacctagcccacaatcgattgcaatatctgcaggaaaacacctttgattgtgtgaaaaatcttgaggagttgaacctgcgtcgcaatcgtttgtcctggatcatcgaggatcagagtgcggcggctccgttcaaagggctacgaaaattgcgacgcttggatttgcatggcaataatctaaagcagatcagcactaaggcgatgagtggtctcaacaacctggagatactcaatctcggttccaatgccctggccagcattcaggtcaacgcttttgagcacatgcttcgcctaaataaattggtttttaaatcgctcaacttcatctgcgactgcgatttggtctggttccaacagtggctgaagaatcgttttccccagcaggccgagcacgcggtgtgtggctatccggagcatctactagatcggcatctaaagtcactgagcagttcggagttggtgtgcgtggactccccgaaaccgcgagtggaacaagaaccggacgacatgctggccgtgaatgcagctaacatcactttggaatgcattgccagttcaccgacagctgcctcactggccgccgccgatgagctgaagatcaaatggcgccacgacaatcagcatgtccaggagcgaccggctgtgcacgacggtgctagcacggaaacgcagatccgtcatgatctgagcaccaatcagacctccatctatggctatctgaggctcacgaatgtgacctacgaaagcgctggacgctatcagtgcgtggtatcgaatgccttcggaaccacctatgcacagaaatttaagatatctataggaattcatcccacctttttgcaagtgccgtcgaatctaacgttggacgctggcgaaatggctcgattggtctgctcggccagcggtgatcccacacctgagatagcgctgcaaaagttcggcggtagtgagtttccagcggcaaccgagcgtcggctgcaagtgatccgcgaggagaacgcatttttgataaccaacgctaagcctagcgattctggtatttacacgtgcacagcgttaagtgctgcgggcgagattaaggtcaatgcaacgttggtggtgaatgacaaaccgcagcctagcattcccttggtgcaccaggaggtggttgtgggccgtacatgtgtgttgcaatgtcttagcgaaacggccaatgctgattttgagctagaacatccgcaccgcgagtggtttaaggagaacaaaccgatacacatctcgccaacagctccggacggcgatcagctggtagtggtcaaggagaaccttaactgggtcgtcttgctggtgggcataatcacagtaaccgtcatctgtgttgtggtcgactgctgcatcatttggtgcactctgcgctatcagaaaaagaaactacgcatgagcctggctgccgaaaggcattcaacgcagttacgcccgcgaagccttgcggatctgggctgtagctatgatgaggcgaaccacagacgtctcaccgtgatgtcaacacccccctccgaacagcgctgcctggagcagggactgaccctaagctatctgcgccagacggacttggaggcccagcaggatcatttgtccagcaaggactcgggcaccggttcggatgcggctgtgaaacgcactctggatgactttgaggtggccatgcccagtcataagcatcacaccgacgacgaggaggaggaggaggttgaggaggtgtatgaagaaaacgagccaccatacataaagcatacatacgaagtgaattatgctgaacccgagcagcatctctttctgcagaacaacaatcacaactacgacggtggcgggattggcgttgctggtggggtcaacaaaatggtgcccaacgcgctgctccgcaaatgcagcgctggtgccagcggcagcaactacagctccatccaacagtgcacaacagtggacatttgagcggtggcttaaccaaatgagcaggatgatcaggatcatataccaaaaactggaggctgcaccgtaaccccaaccgcagtccgcccccaaaacgaacacaaagactgtttaactcgtaattataattcgtagatggtggcccagacttttggactggccacgaccatagagcaggcggccttattgatgcctttgctatggaaataggacagctagagaaacataccagtgtcttcgtaatttatgaaattaatcgttagaatcgattat

SEQ ID NO: 13527 - protein, 1173 aa, DROSOPHILA
MSWSRRRRRNNNNNNNSSSNNNNAASESRSNDNCNYSTTNDFNKINKLLLITYMLLITAATICQSAAQSPSSSNGNGVGGSGSTGGSPLSALLKSGGASYNQQLPQQQLFAMLTRNGGGSSGPRSSGGNRGYTSARQHFMALSEDYSDADVDEEDMAALHYPLSASHPPAGVQGSSSSSGISIQSGSLETNGFVADDGGQYEHAQKALEAAAAAAKASNKYNIDCPKDCKCLNVLFDCDKLHLERVPVLPSYVQTLHLANNKLNDTTVLEIRNLLNLTKVSLKRNLLEVIPKFIGLSGLKHLVLANNHITSISSESLAALPLLRTLDLSRNKLHTIELNSFPKSNNLVHLILSFNEITNVNEHSFATLNNLTDLELSNNRLSTLPIRVFKNLNQLKKLALNFNQLEINWSTFRGLESMKNLQLKSNKIRALQDGVFYVMHKIETIDLAMNQISSLSRQGLFNLTKLRHLNLSFNAISRIEVDTWEFTQSLEVLDLSNNAINEFKPQHLDCLHRLKTLNLAHNRLQYLQENTFDCVKNLEELNLRRNRLSWIIEDQSAAAPFKGLRKLRRLDLHGNNLKQISTKAMSGLNNLEILNLGSNALASIQVNAFEHMLRLNKLVFKSLNFICDCDLVWFQQWLKNRFPQQAEHAVCGYPEHLLDRHLKSLSSSELVCVDSPKPRVEQEPDDMLAVNAANITLECIASSPTAASLAAADELKIKWRHDNQHVQERPAVHDGASTETQIRHDLSTNQTSIYGYLRLTNVTYESAGRYQCVVSNAFGTTYAQKFKISIGIHPTFLQVPSNLTLDAGEMARLVCSASGDPTPEIALQKFGGSEFPAATERRLQVIREENAFLITNAKPSDSGIYTCTALSAAGEIKVNATLVVNDKPQPSIPLVHQEVVVGRTCVLQCLSETANADFELEHPHREWFKENKPIHISPTAPDGDQLVVVKENLNWVVLLVGIITVTVICVVVDCCIIWCTLRYQKKKLRMSLAAERHSTQLRPRSLADLGCSYDEANHRRLTVMSTPPSEQRCLEQGLTLSYLRQTDLEAQQDHLSSKDSGTGSDAAVKRTLDDFEVAMPSHKHHTDDEEEEEVEEVYEENEPPYIKHTYEVNYAEPEQHLFLQNNNHNYDGGGIGVAGGVNKMVPNALLRKCSAGASGSNYSSIQQCTTVDI

SEQ ID NO: 13528 - DNA, 4047 bp, DROSOPHILA
gcgggctgtcctcaaaatggacatgctcactcaattaataagagcagcgccgcggcagagcagtagataccctactttgaaaataaacatttactaagtttagtcaattgtttaaaaaaaaaaatagcatgtacaattgttaaaattgatagtaaaaataatacagtttttgaaatactacaaatgatgattctttttgttgagatacagatgcttgactgtagttgcgtaacttttcaatctgagtccctgggattcgccatttcgcagctaggatcaaacttggcccaggatgtgtgtttgtatataattatgcgtatgtaattatgtgcgcattggtggccgtaggggtctttcagtgtcaactgcagccgcactcacaaattatgtggccgaaaaagcttttgggatttcggtgcttcatttcatttcatttcattttttgtttggaggtttattcttgtctttcccgtttaatgtacatcatgccgaatctgttttactccagggtggagtgttctgcggaagggaacaggccctacctgctcaagctctcgattccaagtccaatcccatgcccatgcccatgcccctgcctattctcaaacccgaaactggcgcggagatctggttttcaatttttctcgtatgcgcgctgtcgtcttcgctttatggtttttgaatcttttcactcgggttgaaggacccgatcgaagaaacccttttcctgttttttgggccgatttgttcgccagcggcggctaattaaaaaaccgaagaaaaaattcagcagcagcagcagcaggaacaacaatcacacgaaaaccagaaatatgccggcaaagatatgtatcactcccgatttgacgtgcttatatgtgggtcagttttgcgaggagacaaatgaagtgcacattgccgtgtcatttatttacgatcggaatcgagcattaaattaataactagggatgctcctcaaaacatatgccggcatctgagcttaaatgctgtcttcgccaaacttggagatcggtgttccaccgccaaaccttatattgattccctcgggaaattcggattcatcggatgtggtagtgctcctcttggaaccccattttcctttgctgcgtggcctttcactttctgtagtatcagttgtagttgcctggtacttagaatttcttgcatgggttcttgcagcaggaggtggtgcgtcagcagctccgtcggcagcaggagcttcatcccctggtccaggttcttctccatcgcagtccgcccaatcggcacaagtccaacagcattgtggaaagtcaacgtccgtcagaacagcggtctccacacattccgcaaaagaggcaggtatctgacagctaaaaggatttcgaaggtggaacggatatttaaaataatatgataaaatattacaattaagcttggaagtaatttagttatttgatttttaaacacattggcatataacatactagtggatgaaggcatccccttccgtattttgacaagtaagagctccacaagtcttttcatcctgctcaacagcacccacagccatctctgtacccttgggcgatttgcatccgttctctgaaattaatttcagttttctgtatcgatttgaatagataatttctggcacgtacttcctttttccagtttcatatagtgcacgagggcacccacactggagcacgtgatcaaacaggctatcgtcaccaggaggcacttcatctcaatcggagtaatgggtttactttgatatttactcctaatgtaagaagcttttatagccctcaaaaggtgttacctgatatcatatggcagtcacagctgctattttactaagagtatccagaaatcgttgtatatagtttctataaaacgatgtttatgtatcggagtaaagccaaatgctttgtatactttttacttaattggaaacgacttcactttataataataaataaagcttaaatgtttctagcatgaaagtttaatggaaataattttgttggatcaattgcataataaagctgcaccaaggtatatttatttaaaaaatatagtaacgtggtacaggtggtccagccctctgtttggcttccacggcggcacaggcagccttgtaggcggcctgcttggtcttctcatagtcgtcgtgggcactcaccagttgcttttggagcatggccatccggttgcgagccgcttccaggagctgtgtcttggcggccatttcctgttgcgatcccatggccaccgtctgaatattggtcagtgactccctggcggtcttctgcagttcattgatggtttcgaattgctgcacggccactttgacagcttcaacggcggcattcatattggcctccgtgtggtggatcgaattggactcctcctcgacaacggcactagcttcctggacttcctgctccagttgatcgaccatcatctgtttgcccatcagagcagcctcggccgccttggccgattgaaaggccttctcagcgagttccatcttaatgtgttgggcagcagcctggccagcggccgattgtgcttcactggccgcctttgcatcctgtgcagctttcattgcgatcattgaggatttctgcttgggatctccgggggttatgatcgtctttacattgcactttgcctgcggatcgcattgcttattggaggccgacttggaattatctgttcccggtcccggtgcggttccttctcctgatcctgacatcgctccaccagcattgtacaaagcaattgatctagcagaattctttggagcaacttcgctggttcctggttccttgattgcagcaaaatcgtttaagagctcacggggatcgatcattctcttgtgctgggggctgtgtcgctgaggctgaaagacgaacaaccagttgaagaagttcgagatttagtaaatcacttgccctaaccaatgtgtgaccggtggtgcagtggagtagcaggcggaggaacatcagatacatggccaatactccacgtattcgcatgaagatagttggattgtattcgctatggatttcattcgatttgataatgaattttagttcaaagctgactaacccaaaaatacctataaccccctttttgcataccaaaaccgtttctctgttgaaaacagatttttaaagatattctggccaaaatgcaatgatattaaaataccaaaaaaaaaaaatacgtttaaataaatacgtttaattaatggtagaattcttaatcgaactcggactgggcatgtataacttggagattggtcttatcgcgtgtgtctgtagtttagtagtggttcagaatgaaaataattccagataatagattattaaaaaccaaattgaaatctaaagatatatgtgcataacgtatcatgtcaagcaatttaactttagactaaagcggattaaggaaaaccttgtgaaatcttgttcccaaaatccgtacatctttccgaatcattcgtactccggttttcgcttttacgccacttaagatctccgtccatctttcgcatctcaaagatactggctgcattctaaagtgtctgcgagtgatgagcacgcggcatttagggatccggggacccataacaaagagagcatcgaatagaatatagaatgcgaaagtcggagaggcatgaggtggaaacaaaccatatagacacgaattgctacaaaaatgccagctatgctagaagtaaatgctaaaactgaaagcgcaccgcaaactgacggctagacagaggtggacacaaacgaatccggacggactgacaatttgacggacgaacggacggacacgggagacacactcgcggacaagcggacaattggccggacagagggtgaaaatagatttaggagcgccatttaagagggaaaggaacgtcttcgacgccgccgactgtcggttcacattgtctactcggcgaaatgtcagagtcttaaaaataaaagttaaacggaacgccaaaaaaaatgtatacattatcaa

SEQ ID NO: 13529 - DNA, 1389 bp, DROSOPHILA
atgcgaatacgtggagtattggccatgtatctgatgttcctccgcctgctactccactgcaccaccggtcacacattgcctcagcgacacagcccccagcacaagagaatgatcgatccccgtgagctcttaaacgattttgctgcaatcaaggaaccaggaaccagcgaagttgctccaaagaattctgctagatcaattgctttgtacaatgctggtggagcgatgtcaggatcaggagaaggaaccgcaccgggaccgggaacagataattccaagtcggcctccaataagcaatgcgatccgcaggcaaagtgcaatgtaaagacgatcataacccccggagatcccaagcagaaatcctcaatgatcgcaatgaaagctgcacaggatgcaaaggcggccagtgaagcacaatcggccgctggccaggctgctgcccaacacattaagatggaactcgctgagaaggcctttcaatcggccaaggcggccgaggctgctctgatgggcaaacagatgatggtcgatcaactggagcaggaagtccaggaagctagtgccgttgtcgaggaggagtccaattcgatccaccacacggaggccaatatgaatgccgccgttgaagctgtcaaagtggccgtgcagcaattcgaaaccatcaatgaactgcagaagaccgccagggagtcactgaccaatattcagacggtggccatgggatcgcaacaggaaatggccgccaagacacagctcctggaagcggctcgcaaccggatggccatgctccaaaagcaactgtgtgggtgccctcgtgcactatatgaaactggaaaaaggaagtacgtgccagaaattatctattcaaatcgatacagaaaactgaaattaatttcagagaacggatgcaaatcgcccaagggtacagagatggctgtgggtgctgttgagcaggatgaaaagacttgtggagctcttacttgtcaaaatacggaaggggatgccttcatccactactgtcagatacctgcctcttttgcggaatgtgtggagaccgctgttctgacggacgttgactttccacaatgctgttggacttgtgccgattgggcggactgcgatggagaagaacctggaccaggggatgaagctcctgctgccgacggagctgctgacgcaccacctcctgctgcaagaacccatgcaagaaattctaagtaccaggcaactacaactgatactacagaaagtgaaaggccacgcagcaaaggaaaatggggttccaagaggagcactaccacatccgatgaatccgaatttcccgagggaatcaatataaggtttggcggtggaacaccgatctccaagtttggcgaagacagcatttaa

SEQ ID NO: 13530 - protein, 462 aa, DROSOPHILA
MRIRGVLAMYLMFLRLLLHCTTGHTLPQRHSPQHKRMIDPRELLNDFAAIKEPGTSEVAPKNSARSIALYNAGGAMSGSGEGTAPGPGTDNSKSASNKQCDPQAKCNVKTIITPGDPKQKSSMIAMKAAQDAKAASEAQSAAGQAAAQHIKMELAEKAFQSAKAAEAALMGKQMMVDQLEQEVQEASAVVEEESNSIHHTEANMNAAVEAVKVAVQQFETINELQKTARESLTNIQTVAMGSQQEMAAKTQLLEAARNRMAMLQKQLCGCPRALYETGKRKYVPEIIYSNRYRKLKLISENGCKSPKGTEMAVGAVEQDEKTCGALTCQNTEGDAFIHYCQIPASFAECVETAVLTDVDFPQCCWTCADWADCDGEEPGPGDEAPAADGAADAPPPAARTHARNSKYQATTTDTTESERPRSKGKWGSKRSTTTSDESEFPEGINIRFGGGTPISKFGEDSI

SEQ ID NO: 13531 - DNA, 4150 bp, DROSOPHILA
ggaggtttataaatcagatgaagtgcaacacaatgacactggcccaccgatgactaagcccgatgagtcctgcatcagggacataaatggggtttgtgttgatccacttgcaaaatgcagagaagggcagcataaattagatcctaataattgcgcaggatacctcaaatgtcaaaatggcgagctaattgaggaactttgccccaatggcttctactacgattttctaatgaaaatttgcttggtcgataggagaggaatttgcgttactaacatacaaatttgcgatgaaggagcacttgaagaggatccccatgactgtgctggttacaggcaatgtattgatgggcaggtcgaaaatctgaaatgtccgtttggaacatattttaatgtgcccctcagagattgtcttattgatgtggatgaaatctgtgtgaggccagaatacaaatatttcgaatattaacgtggaattgattatgttctggaagtatttctatacgataagacaagaatatttaaatctaaaaaacgaagcaaaagaaaagtaaaagtaattgctctaatcagggtagccaatttaccaacctgattatttcatacaatttcgcatgaataataaatatgcaggcatgataagttcgaagtatataaatctagttaattgggaagtagccatttggtaaccgggacttttcggaaagttttttattgccgccatcgaaagcagcagtgactggcgttaatgtgataaaagaacttgtatatactaatcagcacgttctgtctcagtataatcaactgttcgagctgattaactagacatataacatggatttcgagttccttgtcactattaattgtgagtcacttccaattaaatagagaaaaacgaactaactaaaccgtttatattggacttgcaatattatttgaattttattcttattttctcttcgccaaatgggcgagaaactatgtaagaagcattgccttacattcaacttttgttttctatctttacattcaccaaaaacacgttaaaaatgaagatgttcttggtatttccatcttgtggtggtgatgttgacggaacttctggagccagagtggtaatgggaacttcaggaggaacacccgttgtcgaaggtagcttagtgggcacagcggttgtggatacatcctcgaggtcctcccttgtcgattggtcaccttctggatcaacagtactatcaacatccggttcaacggtagtcgttacttctggttctgcgtttgttgtagatgtctccttatcgggttcttctgttgtagactcctcgggaacttcagtagtcgaatcctcaggttcttcggttgtagttgagggttctactggctttttggtcgttgtagtatcttcttcgggctcctcggttgttgaatcatcagcatcactgggtgatgtagtggtctcttcggggtcctcggtggttgtttcctcttcgtcacctcctggagctgcggtagtatcatcatcttcgccaggtgctgacgtagtatcatcatcttcaggacttgaagtggtggactcctcggattccttgggggtagtagaaacatcttcaggctccttagttgttgaatcctcagtatcaattggtgatgtagaggtctcttcgggcttctctgtggtcgtttccggctcttcagtcgttgattgctctcctccgtctgttggagaagaggtcgtactttcgtcttctggggcttccgtagtcgaatctattggttcttcggttgtagtagtcgagtcttcgggctgttcggttgtagtagaggattcttcgggctttccgtttgttgtggaatcctcttcgggctcttcggttgtcgactcctctggcttatccgttgtcgtcgatgtggagacctcagtcgtcgactcatcttcaccatcaacagtagtagaagtaatttcaggagtaccagttgtagcctctccgccactgttcagttctccaagtccgtaaggggattccttgtttaccggcacatagaagataccttctgcgacaaagaagtttatggaagcacccataaagactgaactgtatgtattgccacagttgttcttgttggcgtccacggaggattcgcactttatcgaaggaaagttgttccacagcagcgcctccacgtaatacagaacagctttggtgtgtgagcaactgccggttatatcgataccacaaccaggctgtgatctaccaccgttcatgtagaaggaagcttttccaattggctggccgaagcccaaaatggcaccgtttgtctggattgactccacatataatgcatcatcgctggacagacgcttttcggtgtttgagtaactgatcaggggggaggcgggatccaagcccacgacttttcccaccttgccagagttcacctgcttggcggtgtgtcctgcaacgtgggcgcccaaactgaagcccacaatttccagagtgtccaagctcatgccgtatccctccactaggaagtccacaagtgcggctactttctttccagctcctggggctccggccacagaggaagcgtattccaaggaacgtccacgaagccagtctactgcgatcatgttgtagtcgccgtactggaaccaagcatcggctaccctggtgttcaccccatccttgtagttcgagttccaaccgtgaatggtgattctatagagccattacagttattttaagaatgaattgatctcttgcttgctcacctagttggattttgaggattgaaaaaagaaccatcgatggagtcttgggtagccttgatctgttgtcctgtactaggattctgcagcgtgtaaaggtagaagttaaccgtgttggtggacagacgaccttccaacgcctcctgagcctcgtagtattccaactggcgctccgcctccgccttaccaatccatcttaggccaccttccctttgagggacaaaccaaccattgatgccatgatctcgaaccgaaagttggtcgaccggccaggcgctggctaaattcaattcatgctaggttaccgaaatctgtcaatgtgcaaagtttttaccagctatcacgcagcccagcacaagaaggcacaatctcatcgttgaagtgaatatttagaatggtttactagttgttcgtggtactgctatttataccttcagtctgcaaatgttgaatgagaaccaaatctgcgcaacaacagtaaagtgattagatcaagtttaatcagtaagattctaagaccacgaaaaaaaaaacattgcgagcacttaacgaaattcttggaaatttattttgtgctcagcaattttagagaatatttccaaagtaatatcatttcggttttaaaaaaaaactagtccattattaaattatttcttaatacaacgaaattaccaaactatctttcattcaattttcgttttataattaatttttgtttttaaaagctttaagttaaagtaaatctagcaagttcccaaacttgcggtccacaatggtagcccggaatatcggtaaaataaagctcacaacggattgctttcgctcacagagctttcacacaatttattagattatagactggacttagttgcccattccgtagggagcatcgctacggacgggtacatagtaatctccagcgaccatgtaggcattggtggtggctcccatgcggacggagctgtaggagctaccgcactccttggccacagcctcctcgtagtcgccgcagcgcatggtggggaagttgttctcggtcacggactcggcgtagtagatcactgagcggctgtgggcgcaggatccggtgagatcaacaccacatccgggctggctctttcctccgttggggtagaaggctcccttgccgatgggcttcaggaatcccagggttcctccgttggtctggatggactccacgtagtaagcatcggtggagctcaggcgcttgttgggggaatcgtagctgaaaaggggcagggcggggtccagaccaatgatggtgtgcagctggccgttcttcacattcttgccagcatagcccgagacatgggcgcccaggctgtgaccaatcaccatggtgttgtccaggttcaggccgtgatt

SEQ ID NO: 13532 - DNA, 2043 bp, DROSOPHILA
ttcacttcaacgatgagattgtgccttcttgtgctgggctgcgtgatagctgccagcgcctggccggtcgaccaactttcggttcgagatcatggcatcaatggttggtttgtccctcaaagggaaggtggcctaagatggattggtaaggcggaggcggagcgccagttggaatactacgaggctcaggaggcgttggaaggtcgtctgtccaccaacacggttaacttctacctttacacgctgcagaatcctagtacaggacaacagatcaaggctacccaagactccatcgatggttcttttttcaatcctcaaaatccaactagaatcaccattcacggttggaactcgaactacaaggatggggtgaacaccagggtagccgatgcttggttccagtacggcgactacaacatgatcgcagtagactggcttcgtggacgttccttggaatacgcttcctctgtggccggagccccaggagctggaaagaaagtagccgcacttgtggacttcctagtggagggatacggcatgagcttggacactctggaaattgtgggcttcagtttgggcgcccacgttgcaggacacaccgccaagcaggtgaactctggcaaggtgggaaaagtcgtgggcttggatcccgcctcccccctgatcagttactcaaacaccgaaaagcgtctgtccagcgatgatgcattatatgtggagtcaatccagacaaacggtgccattttgggcttcggccagccaattggaaaagcttccttctacatgaacggtggtagatcacagcctggttgtggtatcgatataaccggcagttgctcacacaccaaagctgttctgtattacgtggaggcgctgctgtggaacaactttccttcgataaagtgcgaatcctccgtggacgccaacaagaacaactgtggcaatacatacagttcagtctttatgggtgcttccataaacttctttgtcgcagaaggtatcttctatgtgccggtaaacaaggaatccccttacggacttggagaactgaacagtggcggagaggctacaactggtactcctgaaattacttctactactgttgatggtgaagatgagtcgacgactgaggtctccacatcgacgacaacggataagccagaggagtcgacaaccgaagagcccgaagaggattccacaacaaacggaaagcccgaagaatcctctactacaaccgaacagcccgaagactcgactactacaaccgaagaaccaatagattcgactacggaagccccagaagacgaaagtacgacctcttctccaacagacggaggagagcaatcaacgactgaagagccggaaacgaccacagagaagcccgaagagacctctacatcaccaattgatactgaggattcaacaactaaggagcctgaagatgtttctactacccccaaggaatccgaggagtccaccacttcaagtcctgaagatgatgatactacgtcagcacctggcgaagatgatgatactaccgcagctccaggaggtgacgaagaggaaacaaccaccgaggaccccgaagagaccactacatcacccagtgatgctgatgattcaacaaccgaggagcccgaagaagatactacaacgaccaaaaagccagtagaaccctcaactacaaccgaagaacctgaggattcgactactgaagttcccgaggagtctacaacagaagaacccgataaggagacatctacaacaaacgcagaaccagaagtaacgactaccgttgaaccggatgttgatagtactgttgatccagaaggtgaccaatcgacaagggaggacctcgaggatgtatccacaaccgctgtgcccactaagctaccttcgacaacgggtgttcctcctgaagttcccattaccactctggctccagaagttccgtcaacatcaccaccacaagatggaaataccaagaacatcttcatttttaacgtgtttttggtgaatgtaaagatagaaaacaaaagttga

SEQ ID NO: 13533 - protein, 676 aa, DROSOPHILA
MRLCLLVLGCVIAASAWPVDQLSVRDHGINGWFVPQREGGLRWIGKAEAERQLEYYEAQEALEGRLSTNTVNFYLYTLQNPSTGQQIKATQDSIDGSFFNPQNPTRITIHGWNSNYKDGVNTRVADAWFQYGDYNMIAVDWLRGRSLEYASSVAGAPGAGKKVAALVDFLVEGYGMSLDTLEIVGFSLGAHVAGHTAKQVNSGKVGKVVGLDPASPLISYSNTEKRLSSDDALYVESIQTNGAILGFGQPIGKASFYMNGGRSQPGCGIDITGSCSHTKAVLYYVEALLWNNFPSIKCESSVDANKNNCGNTYSSVFMGASINFFVAEGIFYVPVNKESPYGLGELNSGGEATTGTPEITSTTVDGEDESTTEVSTSTTTDKPEESTTEEPEEDSTTNGKPEESSTTTEQPEDSTTTTEEPIDSTTEAPEDESTTSSPTDGGEQSTTEEPETTTEKPEETSTSPIDTEDSTTKEPEDVSTTPKESEESTTSSPEDDDTTSAPGEDDDTTAAPGGDEEETTTEDPEETTTSPSDADDSTTEEPEEDTTTTKKPVEPSTTTEEPEDSTTEVPEESTTEEPDKETSTTNAEPEVTTTVEPDVDSTVDPEGDQSTREDLEDVSTTAVPTKLPSTTGVPPEVPITTLAPEVPSTSPPQDGNTKNIFIFNVFLVNVKIENKS

SEQ ID NO: 13534 - DNA, 16398 bp, DROSOPHILA
ttgaacactttgccgatcttggcgatgaactgcaaccggctctggaggataagccccatgtgcccttcgttcccggccagaatctcaaccctaatggagccaaacgcttatatgaactcatgcgtggacgccgtagcattcgctcctttaatagccatcccaaaccggatctcagcgtgatagaggactgcattcgggcggcgggaacagctcccagtggcgcacacacagaaccctggacgtactgcgtcgtacaggagccggaactcaagcgatccattcgggaaattgtggaacaggaggagctggtcaactacagccagaggatgcatccgcagtgggtcaccgatctgcgacccctgcaaaccaatcatgtcaaggagtatctcaccgaggcgccgtaccttatactgatcttcaagcagacctatggattgtcggagaatggaaagcgaatgaggaggcattactacaacgagatatccacttcgattgcggccggtatccttttgtgtgcccttcaagcggcaggactcgcatcgctggtcaccactcctttgaactgcggtccagccttgagaaacctgctcgggcgacccgtcaatgaaaaattactcatcctactgcccgttggttatccgaaagatggatgcacagttcccgacttggcgagaaagaatttgtcaaatattatggttactttttaaggtttatttacgtccgtgcagcttacgaaatagttcaataaaaccaaactaaaatttatggtaattcttatattttttctattgataaacgaaattttcacattttccttaaatttattcttcattataattgttaatcaaaatataatattcttaaatatttgaaacgatagtctccaccatccctgccaaccgatatacggctgctttccagcaccacgctttttggcctcttgtcaacactatcgataacgatagctacggtaagtgacacaaaagcaaagggaaaatttctacgtgcggttcgtgtgctgtgtgttgaaattacaaatagccaattatccggcattaatcgttttagggctctctcgattttaattgtattatattgtactataatacagatataaacccgatttgatcgagtgtaacggaaatcgacgcgattcccatcaaggtggtccgtacctaataagtgttcacgaatgagagcaaagcagatggcggagagcgtcctgcgtttcaatgtgtgtgtgcgtaaacgagtagaaagcggcggtaaaaaccttctcgtgtaacacaaaacaaattatacaaaacattcaatctcaatatcaaaacgttactgtattgtctattgaaaaacaagtacaagcgtacgcagggaaattggaaaatccattgaaaatcgagagcaacagtcgccggagcggaatcagcggacgaaaacaaaaacgctttaaaaacgcagccgatacagaaagtgccagcgtgtgagtgtgcatatgtgtacgtagttgtgggcaaagagaacggtaaagaataagaaatcgaaaaaaaaaaataaaaaactaactgtggaagtgaaaaatgcgcgactgataaagattgtgataatcacggcataatataacaagcaaaaaagaagaatgaaaagaaaccgcaaccgaattggttgaataatatttaagccaacgccagtgctgcataaatcggtgcacattatcattggaacgttcagtgttgcacatcgctaccgccccacgcataatccaacactcttccccctccccatccagatccacccactcacacacacacacactccgattcggatttcttcgtctgcattataatattgcgcttataatctttcgcgaggtgagtcgaactcccaaatagtgttctattcagaaatgagtttccccatccaattgtccgctaacagcgggaaaattactcccgcctgcgttgaaactgtaccatattgtggatgaagaaatgggatagaaatgggcaatgggcattgggaaggtacggtgaagattgcctaaatagaacacaataagaaacagctatgttcaaaacatcttgcggaataaatttcaacaattcagttattatttatttagtatttaaaatgtgtgaactggaacatttatatcgtacatgttgtctatgcattgttgaacatccatgaatagaaaaaactaattcagtttctaattaaaaatactacaacaataaaacagtctagctagccaaaatgacaactttatgtcagtactcatataagaatgtgtcaaaaagtttaatgattgtctacaaattgttagcgattttcgaaaaaatgtctttactttgatttctgtttttccagctcaacgatgcgccacgatcagtccctggacctttttatttttatttgttaattcctggaatatccatcgattacgtgaggagcacgtagagcattattaaaggcataggatcttttacggaagaatctagccatgagtcgcttgcaaaagcaaaactacgagatcttaagcggtacaagtacgtcgcgcctcaagaatcatcaacatccccgtgaatcggagtcactagcctacgaggagccagatcaaatggtgcggaatcatctaaatggccagctggtagccaatggcaatggcaaaacgcgaaagaatagcaattccgaaacgatgaccaatgggaaaaagtccaaactgaatacggagggatccggctctggttctggaaagaccttgaactacaataataataacaataacaacaacagcatcagtgccaccaacggtcagtacaccaatagcagcagcaagaccacttcagcatctgcaagggattacacttaccgcgagaccatatcaccgcccacacctccatccccgcccaccacaaatgtggcggatattgtttgcatatcggatgcggagagcgaggacggacgcgatcccgagcgggagtactacgaccaggacatggaggaggatgagccgaacgggatagagatcgatgaatccagctccagcttgtccaaggccaagtccaacaatgcagctgcagcggcggcggcggcggctgcagcagcggcagcagcagcctcgaaggcctcctcgtcgaccacgccctcctacgccatgcccaccagcaatagtacaccccttgatctggacaatgaggcccatcaacgggacctggaggcggtcaccgatctgaaatactacggtgagtcattccactcaatgatagtgataaagaagaccgggccaactgcaagcacaagctagataagaaaatttgttacaagttgcaggtcaggatgtacttatgttaaatatgatagtttaataattccgtccatatcaaattaaaccgcaacttcttccctgtgaatatttcatgccattttaaggcagctgccacagagcttatcaaacatggtagtgtggtggaataattgataactttaaccgggtggatgtctcaaggttttattgaaatgtcggcagagggtggctggtcaatgccagatgaagtgccgtctctatcgttctttgttaaagtggagcacatgcatttaaccttgacacgattacccagaaaactcaacccggctttgttcgctctttgggccaaatccaaaactactgacctcccctgaaatcgcccaacctcgccgtactcacctctcaccacactctacatacatatacacaaagcagacagaatatccaccacccaaatgtctaatttgataaccgtgggtcgaaaacctattgttgctgcttgttatttgttaaatttgacacttttcggttgcatttttaaataaatattatttactgaggacattggtctggattttggtgtggaaagtaacacctttttgaagtaaacgtttttgtcaagaggttttcacaacagctgtttataaatcgaataaaataaatctagataaaaactaaaccttctctagtttcgattaaaattcaattcatcaaagtttctatctatctcgataattaagatgtagtattatttcttaaatagttcttatatctggcttatatctttcataatatcatatggaaccactgtgccacttttcgtcatcgccgtgcagtcgtgaccatgtcagttgtttgtacaaatgtgcgtgcaacgctgtttgcgagcgtttgctgtactcacaaacatgcttgtttgcataaacggttggttgttgtttctaggcaatttatttacttgaacttggcaatgcaacttgccaagcatagatacatatgtatgtatgtaggtatgtacataaagatagggcaacgagttagcctcctggataattgccttcaaattgataggtgagctgtgtttgttgtttgctgttaattatcacaagaacatcgtcacggcaacgggtgctgctagaatggtgggggaggggaggggtgagttgtatcattaaccccacccttttgtaaattaacaataataattacacaatgcacagagaaaaatacagattggttctcaagtaaagttagcaaaatcttttaaaatattatgtccaattgttgtcttataacgaattaattaaaactgcattcaaatgtattgttacatttcatttttatctgtgtagttttcacccctttcactttttaatcagtaaaatcgatatcctcgtacagtacagtaccgctagcacattataaacattacttttaagtggggtaaacatttcttatgcgacaatttacacttgacaatgagaagtaaaaatagaaaatcgaaattgttgctatcagaacgttctcaacttgttgcggttttcatattattattcatattctttcggtctgcgttcattaaactttgcctagtcattttttttttggtctgttattcagtttaagaacctggccagagtatataatgcatatcaaggccaatttatttgctcgacgtcgtcgtcacacgctttcaaacaggtcgtcttaaaaatacaaaagaaaattcgcacttgctttaaataatgactaaaatattcaatttccatttgatatccgaaaaaatacaaaaagtagcaatatacaagggtttttccgcgacaggtcgccaccactttgcaacatctttccagtttttcttgttgaatcaataattccggcgaaaagttgccacccactcgaaaaagtcctgggttcgatgcacccttaaagaatttcggcacgcgtcattccgtgcgtttggctgcttgtttttcgcaaattacatatacagtttgtcaagaaactgtttacacactgtgaaataagttgaatttttgactttaaagctaaaaataaagggttttttgcttaattaaacgcaatttttttataaaatataattaaacaatatttattttacttataaatcaaaaaacaaattaaaaatattaaatatacaagaaaataaacaacaaattccaagtttacacacttttgagactgtcaagaaactctttacacattttgttttcctactttgttttgttctttttcttagaacgaactcgatttttccgttatttttggctttgcattgctttttacaacgcttctattgaaattttgttgactttgcttgtgaaattttgctgatcaaacggtgcttaaagcgaattattaaatttaataaaatgcctggaaagagattaacttttgaagttacccaattaataaactataaccaccagttgggaaaatcttttccagaattagtataaatgtttcctgtatcccgtaagaccgtctacaatgttttaaaaggctcggaaaaagagggcaggcttgaacctaagagcggtggtgggcggaaaattaaaattaaaaagcgtgtagaccgctttattatgcgaatagtgattgcgaacccccgaatctcggtcagatcacttgctctggatatcaggcaagaatgccacctaactgtgtcacaccgaaactgtgcgccaagtcatcctacgccataggtacctcttcaagatttgcaaggaaaaaccctttgctatcagatgccaatatggaaaagcgtcattaattcgctgggagcatgatggatcatgccggaagagtactgggatgactgtcatattttgtgacgaaacaaaaatgatgctcttttataacgacgggccaagcagagtatggcgcaaaccgttgagtgcgctagaaaaacacaatatcattccaacgataaaatttggaaaaatgtcactgatggtttggggctgtatcaccagccgtggagtgggaaaactagccttaattgagagcacaataactgccgtgcaatatctagaaatgttaaaaaacaaatttgaaggccagtgcagaaaaattcgggctagttagcaacaacaagccaaatcttaagttttaccaggacatgatcagaaacataaagagtgcaatgtacgcacctggcgccttaataactgtgggaaagggatcagataccgccccctcagagtcctgatctgaaccccattgaaaatttgtggacctacttaaagaagaaggtggcaaaaagggacctaaaacacaacaacagcttatgactgtaatagtcgaagagtgtgaaaagatcccgtttgaatatgacctgcaaaaacttgtccaatccatgaaaaaaaggcttcaacttgtagctaaagccaatggggaacatactacataccaaaacttttaaaattttaataaaataattaaaaaatttaggattaaacttcgatttagtgttttgtgtaaagagtttcttgacagtctcaaaagtgtgtaaacttggaatttgttgtttattttcttgtatatttaatatttttaatttgttttttgatttataagtaaaataaatattgtttaattatattttataaaaaaattgcgtttaattaagcaaaaaaccctttatttttagctttaaagtcaaaaattcaacttatttcacagtgtgtaaacagtttcttgacaaactgtatttgctgttagcaagttgtatttgcaaaaaataatacaacaggttcggtcgagcaggctcaactctcgataccaacaacccctgctgaagttttgtgtcaatgtttcttgatttcacaacaacgctaaattttgacagctcccgttgcacgcgggttgaattaagattgtaataatagtagtacaaatgttacagacgcgctctgaataaggtccttcggggttcaaggacacattcgccagctgctgtggctaggaatatttcgcaacaaacttcacattaatattcgtcacatattcagacgttttggaacgggatgaatggtggtggtcttacgtcgggttgactgactcatttgccaaaatgcggaggttgaggatgatgtttgcttcaacgaattggtcatttgggaacgctttatttaatgtcaaagctaattgaattacagcggtcacaggcttttcgattgagctgaataattgcggttattaaattgaatggcagatcaggtgaatgccttcaaggagcaaccttctctgagggtaaattggaaaggcatcactttcaatcacgtctgcacattttaatggaaaagtttataaagtgaatttaaactaaaattatgggttgcaaatgttgttataattataacagcccagtaattcatattgttttacttattagatattaagaagcttcacttttaatgcctgcaaatgcctcaaactttgtctgcttcgtgcaataatcgtaaacagtgcaatctttgggccagacatttgggccagtgaactgttattgcttgtggcacatgccccctaagaagcctgaaatatatgtatgtctagagaaaagttcctctcccccctttggcagagttccttgacgtgtccttggtccgtgaataatacacacaggctgtggtcaacaaagtttctgttagaccagcatttccatggaattataagctcataatgctacatatcacatacatatgtatgtatgtacataggtagtctgataatcattgtagggtagcattttccacttgcccgctttcgcctgcgaacaagagcgaatcaagtgtctggcacgtgctgcgctggcgataaaaataaaatgtgataattcgtttcacatgtggttaagtaaacaatgcgaagaactatttttatcgcccaccctacaaatttagtgcactatctatgtatgtacatacatgtatgtagtacacattcgttctcattcattatcgttcttagagagcgaaataatttggtttgtagtagcaagggattagttcaggtgcaatttggaaatacatgtatgtacatacacatgcatatttcttcttttggtgccgatttcaatgcttatctgcgtgtttttttttctttttagtaaaattgtacagtgatgaggccgttagtctgaatgacttcaaaataatacgcgttctcggaacaggtggtaagtaaagtattattgaaatataaatacaaaatgtatggaatattgacttgttattgtttacatatttttcatagcctatgggcgggttttcctcgttcgcaagctaactagacacgatgccggaaaattgtatgcaatgaaggttctcaataagataacggtggtccagaagcgaaaaaccgcggaacacaccaaaacggagagagtggtaagtggagagagtggtaaatatttaatttaaatatggatggatataaaaaccaaataataattagtgtttaatcattcttatcacgattagtcttaattttgaaaattaaccataccatttttgtgtataagctaaatacaaactggcccaaactgtaaagcgagaaagcccttttggtcattttttaacaagcaaacgtgtttaatcaaaccatttttttcttgtagcttttttactttccgattaccgttacctttaccgctgcgtgatgtttttgcaatcacaccgctttccgacttcttttactttaaattgctcttcactttaatgacgacaataaagtgcagcttattgaaattaaacccgatttgacaaccttcaagtcgcacgtacagtttacggtagcgaatcggatgaaaagaaaaagaagccagtaaacgggaaaaggcacaaggaggaaagtgggtggagagagggagagagatgttcttgtgacccacatagcaacttgttcttgttgcaccggcaaaaagccaacacagtccaaagagaggatacacacgtacactgcaaaaaaaaaatttcgaaagttaaaatttgtatgtcatgctaaaatgataaaaggtgtaatctcacatattttattcatgtactttcaaaaaaataaccacttccagatgcctttattatgttatgttttttttattgatgtttgttcttgtgtagaaaatcgggagagctgaagagagcattcagcttagatcaatagtggaagttgttgttgcaaactggctagtgcaaccggtttttctgttattttttttctatctctttctttcttttcgaaaacgagagagtcgtagtaaaatagaaacggaaaagggagaaaaatcaaaacggcgttaaataactgcaaacaggtgtaggcgccatagctgcagataacttaaacaaatttacaattgggcgctttaacgttgttttcatgcgctattttcgagtctctctgttacccttttctatttctcctcctatgccacccacttgaatgtttcaaggtgtaataattgtgctactaacccagttatcaaatgttgccggtatctgcgattcgacaagtttataatttgtctggcggtcgccaaaatagaaaggaacagtagtcaccaatattgagcgaagacatatagtttttgcaaatttacaaaatattttacaaaaaaacaaattttaatttatacaaattctaatgacatttaaagcatattagttactattagttttaaaaatgttgatgcatattttcttactcttcgggttacaattataattgtatgtatatttaataattttattcccttaatacatttttaaatttacaagcctcggctatttgtataacttgataactccttaaaattaatttcttgcatttttaatgcaatcgtggtgtttattaaaacgaacgagaaatgtgaaagtttttatctgaaagaaatgagcaagagacaaatccacttcattaattcattttcaaaatgcttgatttcacttttcctcttgcacgccattctctttcgttcttacgcggaacattaatcggcaacaacaagtaaatagcttatacttatactgatgcattcaaactgtattggcgtaaataaaactcaaaacaaaatagaaaaaacaacaagatctgtgataagcgagtgagcgaaagaagtgggaaagagagatcaattatcaatgtttgctataaacaccttataagtaaaaggtagtataaaatagttatatgaggatatattgaattaatatacatttattttaagaggatacatgataagctaaatacacgaatttgcattaattgcaacagattaggtgtgcgttaaaatgtttccttcaattttgaaaaaatatttgttttctgtttctaggtactggaggccattcaacgtaatcccttcctcgtgagtctacactacgccttccaatcctcatcaaagctttacctcgtgctaggtaagatcataataccaactatcggaatctgagcaaaaccaattaaatctgataaattgacagactttgccaatggcggtgagctcttcacgcatctctaccactctgagaactttgaggagtcccgggtgcgtgtgtacatagccgaggtggtgctggccctggagcaactgcatcagttggggatcatctatcgagatattaagttggagaatattttgcttgatggcgaggggcacattgttctgtccgactttggactgtcgaagatccttaccgcggagaatgaataccgtgcgcatagcttctgcggcactctggagtatatggcacctgagataatccgtacggggccgccaggacacgacagtgccgtggactggtggtcggtgggtgtgctcacttttgagctgctcaccggcgcttcgccattcgccacgtccgacggccaggtccagcaatcggaaatctcgcggcggattcagaaggagcagccaatgattccctcatcgttcagtgccaacgcccgcgactttgtgctaaagatgttggaaaagaatccaaagcggcgcttgggtggcaaccatcgcgacgccagcgaaatcaaggagcaccccttcttcaacggcattaactggcaggagttgcggacaaagcgccgcaaagccccctataagcccaccctcaccgccgaggacgatgtgcagaacttcagcaacgagtttaccgaccaagtgcccgaggatcccgagtgcgatgctccgcccagccggatacgactatttcgcggttacacatacgtggcgccagagcatttggagcagatgcgaagggataaccactgtgagattcaatactttaatacaggacttcaggttggtttaattgcaatattatctgttagtcatgactaataccaagctcttgtccttgtagaatataccttgtcggccagatgatcttgaattgggcacacgcacttcaaacggagcctatggcacatgccattttgtggtggacagctctacggatttggtgtttttggccaaaataataccgctatccaagttccgcccctccgaggtcgacgcgctgatctcgtgcgctctcgacacgaccaatcacaaaaatatcgtaagctaccatggaacgttcagggaaaagtgcgagacatggatcgttatggagtacctgtccggcccggagctgaccgcatccattcgcatggatgaggattcgtgtcgggagatctttctgcagctggtcatggctgtgcggcacatacactccaagcactttatacacggtgacctgaaaccggagaacataatgttcgagaaccgagaggataggactgtcaaactgatcgattttggcagcgcatggtaatgctattggcctaaatctcattatttccatattaaattcgtattctttaccaatagttacaataatcgctttaagagctggaaggacaagccgcgctacacgctggactatgctccgccagaaatgctcgcggatgcgaatctcgttacttattcgccagccgtggatatatacggtcttggggccacgctgtataccatgctggtgggtcatcggccgtacagacagaacgaagacgatgtggatcattccgcagcggcccatcacgagcttcgaaagcgaatgcgccggggaacgtttaatcagcgttctatgcgctgggagagtgcaagtcctgcgttccgacatttggttagctggtgtctgcagcgggatccggctgatcggcccacattgtcagatattctcgacagcgagtggctgcagtacggctcaaatgatccggacgtggatatcattctgccacaacagatggttgtggacctcagcgaagacactatggaacaaccgacgggaggtatgttcgacgatcagcaacaactggaattcatgcacgacaagtcggcggaggatgagggcataaccctagtcagcgagcccatggatacgactgtcgcgactcacgagtctaggagaaatgcagccgcattttcgtcggtagttgctccaaccaccgacgacgagatagtgcacgaacgatttgacccggcatttgaggtccaagcggacttctacggtttcgacgagaatgcgccgcctctgcctctgcccgaggagtactactccgaactacctctgccagaggaggaccggcagtacataccacctccaccagcactgattcctgttgaaccagaaacgaccttccgacggccaagaacacgccagcagcgtcgcactgaaagccagctagtacaacctgtttccgtcgctacgtatgaggacagcaaggcgtccctgcgcgtactaatgcaacagctgccgccgccaggtgacaatgtggtagcacgcattccgaagagaacacatcgagtcgtacgtacattgcctccgacctttggaaccaccaagcgagaagagaatttctatggatttagtaagacagcaatatcgtggcgaaagactcgggccagctggcgtcacttctgtctgcttatcaatggtgtgcagcaggtgcttaaggttcggttcaaaaaagcgcgtcgcgtctactgcctgccccatataaaagaggaaaaacttgatcatgcgtacgaaaaaccgttgacgttcccgcggccaaaggcacaactgaagcgcaccaagcgggagcccaaggtgccgcggccaccgactcgagttcagccggagagggcgcgggcaatgcgtcaactttatcagttccaatgacatgaggatgacgacggcgatgatgtggaggtggtggaaatcaaggaggagccgcgaaaggagggagaggagcaactgcgagcggtgctgcagtgggagggcgacttcaggaggccacggatgtacagctgaccacactcatcgacgcaatggcccatccaggacaatgacaaccagacgccggccaaaacagagggtaaagaaccagagggtttcagtgacccacaagaaacccactagcccccctcatgagggggaaggatccgcaagacgcaccaaagatcctgtcaatacagtttttcaagtttgttattcattaggttaagcttcagaactcatttcgcttatcgtttttttcaatcacgaaaaacaaaaagcaacttaacgtttacacctttagaaggacggtcggtgtattcaatatgcaatttgttgtgctagttaattatttgaatagcttaaatgtaaaaagtcagacacaaaacgggaatataacaaaggcaacttttgcattgatcttagcgcgattaagacatacaaaaacaaataccgacaacagaacacaaccaactaatatgataataagatttgcaattagtttagtgcaaaattatgattaagacaaaattgagaaagatattcttagggcgcctatattatatacactacacacacagtttgcttttagttgtgctttatgttaagttatatacattattcttaacacactatccctgaactaactaaaaaaaaaagaaatacttccaagcatgtattgccaaatgcaatatgaattagctaacacatttaaatgtaattgtgcttggcaatgttatctaattgcattcaattaatttcagttaaaactaaggggaaaaagaagcctcgcccgaaaaaccatttccacatgaaattgcgaagctcttctttgagatcgtgtcgaaaatataacgtttttcgcacacaaaactcaactattggggaaacgtgaatagtcgtagacatttgttgatggcaaacaaagatttaattgttttgttaagtatttttgatgtatattttttatttttctgaaaattctgtatctaaataagataaagcaatggatagcgatgaaatctaaataaaacttaaacaattatattattttaaactcgcttgatttgatttgtattgttttcagtttgtatggcccgcatttggtcagtttttaagagcaccccacttaaaccctccgctgacataaacttttaaaccctaacccaaaatccaattcacatatcgaactgtataaaatttgcgttagagctggataataaagaaggaaactgattgttgaggtcatggtgtaaattttagtataaaacaaataacatttatattaaaagttgccttctaacaagttgccttagaacacacacaaatgtaaagcccaataactccaaaaagtcgcaatatgaaaagttaaacataccctttacattttataagcaaactcattcggtatgagtttagtttttatgggtgcgatcattggcaatccgtcgtagtttaagatcactggaactatcaatgaccatagaatctgcccaatctacacttacaatggacgcaacaaccgatgggggacaattagttaaatgtaagaataaagcaatcaaatcgtattgaactcgatttttgcagttcggccaaagcatagttatgttaaccaaacaatcgaaggcgtttgattgattaacattgaagatcagtggagacggaggcatggagttgaatatgaaacaagttgctagcggttaagtcaccaaagtctgtacataaaaacaatatcaaaatgcagttaaaataaagcatttcaaatgataagcaaaggccacttttttccactaactttaatagaaattggttttaatctttcgtttagatatttacaactttacaaccacttaaatggagtagagtttgataatcgagtttagtttagtgttttcgtttcttgcccgctttctgtggtctaccgcctttggccgctggtttgccggcgaacttcttgcccttgtaggatttggagttcgatcgtcggttttcttcccatttcaattgtttgtcggaggacttgtccttgttaaagacggcattgctggttccctgaccctttaccttggccgtctcctccagcagcgaagagaagtcatcggcggcagcaaacagagaggacatatctaaggatgttgaaaaagtacatacattaataacctcatgactaccgttgaattctaaatcgatatcttaccgtgactctgtttgagtgttttggcaaagcttcgtcctcccaccatgtcggtggagtctttgcgggattttttggatctcggtggtgcatcttcgtcgtcgtcatcctcttcgtctggactctcaggagcatcgcttgaatcactgtcgccagggccgccttctgaaatcgagccctcatcgtcatcatcatcatcatcatcgtcgtcgtcatcaagtggctgcaaatcaatcgagcccgtttcatcatcggactgatcttcgccctcaatttcatcatcttcatcttctgccaagtcgtcatcaccccagtcgtcatcaatatcgtccatttcatcttccgccttgtcggactgcttcttctttttcttatccttggacttatccttctttatctcgccacccagctcctgcaggaagttcagctcctcttcatcctgctcttcgtcgacaccttccttgaacttcttgccgaaatatccatccaaataggcctcgaactcatcgtcatctacttcgccctccttcaggtattcctctccagcctcgccatcatctccctcttctgcggcgtccttc

SEQ ID NO: 13535 - DNA, 6366 bp, DROSOPHILA
ctacgtgcggttcgtgtgctgtgtgttgaaattacaaatagccaattatccggcattaatcgttttagggctctctcgattttaattgtattatattgtactataatacagatataaacccgatttgatcgagtgtaacggaaatcgacgcgattcccatcaaggtggtccgtacctaataagtgttcacgaatgagagcaaagcagatggcggagagcgtcctgcgtttcaatgtgtgtgtgcgtaaacgagtagaaagcggcggtaaaaaccttctcgtgtaacacaaaacaaattatacaaaacattcaatctcaatatcaaaacgttactgtattgtctattgaaaaacaagtacaagcgtacgcagggaaattggaaaatccattgaaaatcgagagcaacagtcgccggagcggaatcagcggacgaaaacaaaaacgctttaaaaacgcagccgatacagaaagtgccagcgtgtgagtgtgcatatgtgtacgtagttgtgggcaaagagaacggtaaagaataagaaatcgaaaaaaaaaaataaaaaactaactgtggaagtgaaaaatgcgcgactgataaagattgtgataatcacggcataatataacaagcaaaaaagaagaatgaaaagaaaccgcaaccgaattggttgaataatatttaagccaacgccagtgctgcataaatcggtgcacattatcattggaacgttcagtgttgcacatcgctaccgccccacgcataatccaacactcttccccctccccatccagatccacccactcacacacacacacactccgattcggatttcttcgtctgcattataatattgcgcttataatctttcgcgagatgagtcgcttgcaaaagcaaaactacgagatcttaagcggtacaagtacgtcgcgcctcaagaatcatcaacatccccgtgaatcggagtcactagcctacgaggagccagatcaaatggtgcggaatcatctaaatggccagctggtagccaatggcaatggcaaaacgcgaaagaatagcaattccgaaacgatgaccaatgggaaaaagtccaaactgaatacggagggatccggctctggttctggaaagaccttgaactacaataataataacaataacaacaacagcatcagtgccaccaacggtcagtacaccaatagcagcagcaagaccacttcagcatctgcaagggattacacttaccgcgagaccatatcaccgcccacacctccatccccgcccaccacaaatgtggcggatattgtttgcatatcggatgcggagagcgaggacggacgcgatcccgagcgggagtactacgaccaggacatggaggaggatgagccgaacgggatagagatcgatgaatccagctccagcttgtccaaggccaagtccaacaatgcagctgcagcggcggcggcggcggctgcagcagcggcagcagcagcctcgaaggcctcctcgtcgaccacgccctcctacgccatgcccaccagcaatagtacaccccttgatctggacaatgaggcccatcaacgggacctggaggcggtcaccgatctgaaatactacgtaaaattgtacagtgatgaggccgttagtctgaatgacttcaaaataatacgcgttctcggaacaggtgcctatgggcgggttttcctcgttcgcaagctaactagacacgatgccggaaaattgtatgcaatgaaggttctcaataagataacggtggtccagaagcgaaaaaccgcggaacacaccaaaacggagagagtggtactggaggccattcaacgtaatcccttcctcgtgagtctacactacgccttccaatcctcatcaaagctttacctcgtgctagactttgccaatggcggtgagctcttcacgcatctctaccactctgagaactttgaggagtcccgggtgcgtgtgtacatagccgaggtggtgctggccctggagcaactgcatcagttggggatcatctatcgagatattaagttggagaatattttgcttgatggcgaggggcacattgttctgtccgactttggactgtcgaagatccttaccgcggagaatgaataccgtgcgcatagcttctgcggcactctggagtatatggcacctgagataatccgtacggggccgccaggacacgacagtgccgtggactggtggtcggtgggtgtgctcacttttgagctgctcaccggcgcttcgccattcgccacgtccgacggccaggtccagcaatcggaaatctcgcggcggattcagaaggagcagccaatgattccctcatcgttcagtgccaacgcccgcgactttgtgctaaagatgttggaaaagaatccaaagcggcgcttgggtggcaaccatcgcgacgccagcgaaatcaaggagcaccccttcttcaacggcattaactggcaggagttgcggacaaagcgccgcaaagccccctataagcccaccctcaccgccgaggacgatgtgcagaacttcagcaacgagtttaccgaccaagtgcccgaggatcccgagtgcgatgctccgcccagccggatacgactatttcgcggttacacatacgtggcgccagagcatttggagcagatgcgaagggataaccactgtgagattcaatactttaatacaggacttcagaatataccttgtcggccagatgatcttgaattgggcacacgcacttcaaacggagcctatggcacatgccattttgtggtggacagctctacggatttggtgtttttggccaaaataataccgctatccaagttccgcccctccgaggtcgacgcgctgatctcgtgcgctctcgacacgaccaatcacaaaaatatcgtaagctaccatggaacgttcagggaaaagtgcgagacatggatcgttatggagtacctgtccggcccggagctgaccgcatccattcgcatggatgaggattcgtgtcgggagatctttctgcagctggtcatggctgtgcggcacatacactccaagcactttatacacggtgacctgaaaccggagaacataatgttcgagaaccgagaggataggactgtcaaactgatcgattttggcagcgcatgttacaataatcgctttaagagctggaaggacaagccgcgctacacgctggactatgctccgccagaaatgctcgcggatgcgaatctcgttacttattcgccagccgtggatatatacggtcttggggccacgctgtataccatgctggtgggtcatcggccgtacagacagaacgaagacgatgtggatcattccgcagcggcccatcacgagcttcgaaagcgaatgcgccggggaacgtttaatcagcgttctatgcgctgggagagtgcaagtcctgcgttccgacatttggttagctggtgtctgcagcgggatccggctgatcggcccacattgtcagatattctcgacagcgagtggctgcagtacggctcaaatgatccggacgtggatatcattctgccacaacagatggttgtggacctcagcgaagacactatggaacaaccgacgggaggtatgttcgacgatcagcaacaactggaattcatgcacgacaagtcggcggaggatgagggcataaccctagtcagcgagcccatggatacgactgtcgcgactcacgagtctaggagaaatgcagccgcattttcgtcggtagttgctccaaccaccgacgacgagatagtgcacgaacgatttgacccggcatttgaggtccaagcggacttctacggtttcgacgagaatgcgccgcctctgcctctgcccgaggagtactactccgaactacctctgccagaggaggaccggcagtacataccacctccaccagcactgattcctgttgaaccagaaacgaccttccgacggccaagaacacgccagcagcgtcgcactgaaagccagctagtacaacctgtttccgtcgctacgtatgaggacagcaaggcgtccctgcgcgtactaatgcaacagctgccgccgccaggtgacaatgtggtagcacgcattccgaagagaacacatcgagtcgtacgtacattgcctccgacctttggaaccaccaagcgagaagagaatttctatggatttagtaagacagcaatatcgtggcgaaagactcgggccagctggcgtcacttctgtctgcttatcaatggtgtgcagcaggtgcttaaggttcggttcaaaaaagcgcgtcgcgtctactgcctgccccatataaaagaggaaaaacttgatcatgcgtacgaaaaaccgttgacgttcccgcggccaaaggcacaactgaagcgcaccaagcgggagcccaaggtgccgcggccaccgactcgagttcagccggagagggcgcgggcaatgcgtcaactttatcagttccaatgacatgaggatgacgacggcgatgatgtggaggtggtggaaatcaaggaggagccgcgaaaggagggagaggagcaactgcgagcggtgctgcagtgggagggcgacttcaggaggccacggatgtacagctgaccacactcatcgacgcaatggcccatccaggacaatgacaaccagacgccggccaaaacagagggtaaagaaccagagggtttcagtgacccacaagaaacccactagcccccctcatgagggggaaggatccgcaagacgcaccaaagatcctgtcaatacagtttttcaagtttgttattcattaggttaagcttcagaactcatttcgcttatcgtttttttcaatcacgaaaaacaaaaagcaacttaacgtttacacctttagaaggacggtcggtgtattcaatatgcaatttgttgtgctagttaattatttgaatagcttaaatgtaaaaagtcagacacaaaacgggaatataacaaaggcaacttttgcattgatcttagcgcgattaagacatacaaaaacaaataccgacaacagaacacaaccaactaatatgataataagatttgcaattagtttagtgcaaaattatgattaagacaaaattgagaaagatattcttagggcgcctatattatatacactacacacacagtttgcttttagttgtgctttatgttaagttatatacattattcttaacacactatccctgaactaactaaaaaaaaaagaaatacttccaagcatgtattgccaaatgcaatatgaattagctaacacatttaaatgtaattgtgcttggcaatgttatctaattgcattcaattaatttcagttaaaactaaggggaaaaagaagcctcgcccgaaaaaccatttccacatgaaattgcgaagctcttctttgagatcgtgtcgaaaatataacgtttttcgcacacaaaactcaactattggggaaacgtgaatagtcgtagacatttgttgatggcaaacaaagatttaattgttttgttaagtatttttgatgtatattttttatttttctgaaaattctgtatctaaataagataaagcaatggatagcgatgaaatctaaataaaacttaaacaattatattattttaaactcgcttgatttgatttgtattgttttcagtttgtatggcccgcatttggtcagtttttaagagcaccccacttaaaccctccgctgacataaacttttaaaccctaacccaaaatccaattcacatatcgaactgtataaaatttgcgttagagctggataataaagaaggaaactgattgttgaggtcatggtgtaaattttagtataaaacaaataacatttatattaaaagttgccttctaacaagttgccttagaacacacacaaatgtaaagcccaataactccaaaaagtcgcaatatgaaaagttaaacataccctttacattttataagcaaactcattcggtatgagtttagtttttatgggtgcgatcattggcaatccgtcgtagtttaagatcactggaactatcaatgaccatagaatctgcccaatctacacttacaatggacgcaacaaccgatgggggacaattagttaaatgtaagaataaagcaatcaaatcgtattgaactcgatttttgcagttcggccaaagcatagttatgttaaccaaacaatcgaaggcgtttgattgattaacattgaagatcagtggagacggaggcatggagttgaatatgaaacaagttgctagcggttaagtcaccaaagtctgtacataaaaacaatatcaaaatgcagttaaaataaagcatttcaaatgataagcaaa

SEQ ID NO: 13536 - protein, 1207 aa, DROSOPHILA [sequence omitted]

SEQ ID NO: 13537 - DNA, 20672 bp, DROSOPHILA
gagagctggaagccttcagttcaagagcatctgagcgcactggtgctctctagaatggttctctacacagaacagggcatagtgaaagtaaaataaattaacttgccaattcacaactcattacaactcgagtgccaagaaaaataagctacatattttaaaaaaatcagtttttaccaaagtaccttaaaacattaccatctcagttgagcaaccgaaaaaacaccgcaaagggattataatatttaatgattcccaattaaagtgacaaagttggcatcataaagataaacatgccgaatgtgataaagtagtatatattatctttctctttcgttagacgacgaaaatatttatgatcagcatttagtccaaatatttgaaagcatacttttgggggaaacaaaatatatctcggattttatttcaattgaaaaattaactgttcatattcttgtgtcaatatttaactaaatcactacgttcatacatagtttaatacacattaatttagttttggtggtttttgttgttgtaactgttttataatggtgatattttcattctattctatacacacacggattattcttgtagaaattgatagatcctttcatataagcatttataaaaagttcgatacaataatctcatacatacttgtatgaagtgggatattcagtttgtttaatggaaagattctgacaatgcttttttaatgggagtgtatgcattttgtatgtgtgcacgccctcttctgcgcaaagttccttagcgtagtttgtataacattaatcattacggttccattaagtaaagcacaccaagttctgttgcagtctctcttacaaaaattaaatcaagtaaagccataaaacaaaactcatgcatataaataaaaatgtctagggcagcgcagtgcggtaggcgagcagcatcattttatatccatctccagcatcctcgggcaaccagagactattagctcttccttctctatctattgccacatactgctctcgttctccgtatcacttaaaatttccacgacctcttcctcgcccgtcagcaaaccctcttcttgcgggaaacccttaaagccatcgtccacttctccatcgccttcggcatcgccatcagcttcgcattcatccgcattctcgccgagcagggtaatatcggtcactatggcatcatccggttgcgcttggacggtatttgtggctgctagtgaaggagccacggcggacacatccatcggtggtagcgtggccacaggattaaagggcgcatccaagtcctcgaggccacgtggcggcttcagtttcgacaactcctcacgcaggtggcgatagtggcggcgcaggaccattgagttgaacgatatagtgcgactggccctctcggtgtactgcggcttaccgagttcctcgatccagccctctatctgggcgcaaatctcctctctcttcaaccagaagtgcttgtgtatgacctttggtgtttaataagtaatgcttgttaagtacagctgggcatttatcaaacttttcaaataaaacttacatctttaaagcactgacttggactccgtatttgctccaacatagcccaccgcacacaggcctgatatatattgctattatattctcgcgatgaattggtaccacttggactgccacgacttctttcaaagcccggttcattgaaatagggctcgggaacgaggatcagggactggatggaaacgagtacctgcaggaagcttgaagtctgtgcattccatttctcctcaggccgaccatgccaggtgttgagaactgacaggcaaactttgccgtcattatagaggtttgggttaaagcgcaccgaatggcgacccgtcgtctccagattgatgagcatgggctggttagggtagtccggcggaaagaagacatcaaactcaaagcacccgttggcgtaaggcgtgtccgccggaccagttatgagtacctgtttgagttgttatataaaaacaaaacatgaatcttttaaaccattacaaaccaatacaaatttcaacataccttcatgatgtccaatctatcagtatcacagcgtacaaatacagaactactaaagctgaggggtaggctggtggacagtgtaactgcctcctgggcaagtcgcttgacccgcgacggatggtaacgatcgccagcgagccgaaccattttttcgaagtgatgcgagaccacaaagcggaaactgttgttatccgactccacaatcatgtcaaacgtatcgaactggcgcttcttcattagctctaagtagcgctgttcaattgatttgctctggggctctagctgtgcgctgccgtcttcgttggtatgcaacatgttgattagcgcatcagcatctgtggttttttgcaccagcacactggtttcatggatatccggaataagcaaagctaatccctcatcgtcgccatcatcgatgttaaaggtcaactgatgtgtctgtccctttatgtttgacttcttgttaactctgtgaaagtggatgtgtttaaaaaaatgtgttttgtaaagtctaacgtctactcactttaaccgtttggcgtaggtatccacacaggtcttcatgcttgtgagcaactccactatgggtggcgtgctgtccccactgccactggcagatggttggagcaacgagacaagcatcttagacagcgatagggcacgcagaagtttgagtatggcacggtatagcggaatgtggcgcgtgatatcaagcactgaatcgttgcgcagataggagctgagggcggggattaagcaagactgctgcagtagggtttggaagatgggcggcaactcgccggtaacatctcggacatcatgataagctaggatgtcctctccgcacatttcacttgggatacagtcacccggatttatgtaactggctagaacaagcagcaacactgtgacatgctcctcctcgctcttttgccgaagaagcgcctgctccacattccacgactgagtagtagaaccggtaccgaaaccagtgcccttggcccagtacatgtggcttttgtcgtccgacgtggcactaggtgtggcctcttctggtgcattagttttggtaccgcttacacttccgtttccacttccattgccaatggtgccgctaccactactggttccacttggcgatggttcgctaatcggtgctccaatcctgttgttgtgcgactgatgcgagaaaatgccgaggcaattaagcactaggtgcatggcccccacttcgattaccacgcgtcgtagcaaaacaccgtcgtcggtggataacggcacactatcaagaagctgacggaagacctcgaagggtaatgtaggcaaggagggtgccagcgacagactgtatatatcatctggaacagagagcgggttagttaatgaattaatggaccactcttttaacgtactgccatccccatctcccgtgactccgagcactaagcggagaagacactgcgcccgcatcttgtctcgcagcaagacatcagagtaggcgggcaggcgcaggaataatccaaatgcggccagcgagtgctgcggcaccgaactgaccgttgccagcttagctgctggctcacagagagtgtcctccaaatcctcatagatctcgtcgttcggttccaatttcacccagtcagagagcgggggacttttctccttctcgctaaacaccaaggtggtcttgcgacctgagtgttccggatatacggtgggcaggtagtgagcgagtaaagatagaccaccactgctggaaaatcgttgcagtggtgatggcaacggctcagtgcaggcagctttggtcttctttgcctcgcttgtgtcatcagagcgctgttgaagtaccagatcaaacgatatacagggcgtcgaaagagaatgtcctgcattctgaagcgaggccaaaacctgcgagatggtggcatctccagctagaacaatatcagaatactctggaatgaccaactggttaccattaacggcattcgccgattgcaacaagaactcatccacattgaatatatctgtaagagactattttgtttagaatgcatttatggcaaatctagcgaatactcactggaagccaagttcgttgagctggtctgagtctccttgtccttgttcatggctgcttggttcttagcatcttttatgcgcttgtccttggctgccacagcagcaccaacggtaaggaactccatgctacccgcttctacgttgttaaagttcaggaagctgctcttttccattttgctctcactggatttggcagttgcactcgatacgccgctgctcgaggcagaggtctcgccagctcgctgatctgttggttgttgataaactagattactaaacactacggggtcaaaataaaaaaaaaaaatataaagaaattaaattagagacaaaaaataaaagtaggctaagccaaataacaaaagcagatacaaataaatggtaaaattaaaaaaaaaaaaactcaccactaacgcaattctgcataatctcttggcacgtggtgctagtggtcaccgtgaatagcatgtggtgggcgctgctcctcctggccggatgattgttgactgctgctacgggtaagctagtacttgcaccactcgaaatcccgcctagaacggcggagagggtatccctccgttgcaagggctgctgacttctaacagagactgtgatgtgttcattctcgaggaggagctgcagcaccatctgtctagtaaatccagatatagttggtcgaactccatgcgaaaatcttaatggtttgcaaattatggctccaatgagcaacgatgtaagattttcctggtttccgggatggcaggcgctaactcgcgtaaagaagttgattgtggccctctccaggcggataaacgattgttccttaggcaacgtcttgctgaactgggcggcatgtgtgttacagagcaactgcagcagaggcttccaaaatacggagccctgcatagtacctaaccaatcacgcattggaccttcggcacaacattcggcaaagaaatctagcactttgggtacattcgagctacttagcagtggagtattataaaccacatttgcctcggccttgtcaaagtccgtaagagacgagtcctcgtcatctgctgcagcggctgcctgattgttggctaacggttcgtcttccggcactgtagatgcagaagctactggctccgatcccggcatgagatgcatgcaatactcgtaaatggcgtgggccaatagctttggaagtccggagtctagcatctggtaaactgctgcaggggactggcaggccaaggctagagtctttaggaatgtgggacgctgtagcaaaacactaaggttttcgctaccctcacggcggaaccaagcactaccactttgcactttgctgtcatcagtttgacctcgagctggaggttccagcttaactcccagcttgaccaacagctggttaaacagttctggcttaatgaagcacaatgcacacaacaaggagtcaaaactgctcttcagtggctcatcgtgctccagcgaagagacccattcaaaacaggtctcgaacagcgaagatgaaatgagaagcggtaactcaggcaattgttgctgggtatgcactttccacagaatcgaagcaatcaccttaacaaatccactttgtgggttattacagcgcgcctgcttgctgtagttgtcgtgcaattgcattacccagtcgataagcacgcgtagtttgtccagtaggtgctccgtcgatccggtaactacttcataaataagatcacacaccgaatcgctggagagtttaaaaactgtcaaagtacatttttggaattagttcggacaaaaaaactggagtcaaaaagctaaccttgcggagtggtgtgccacaggagcgtcctaagaagttgcaaactgatctcgtggttgtatgcacttaattttaacaaaatggtctccaagtgttgctgtgcaagactaggaatcattggcattatgtttagcaatgagcagcaggcctctaaaaagccgggatatgcagccggataggcggcgataagatcagccagcttactgtctggttgtaaagcggccacatggaaacagcgcgacagaatgcgaacccagccaatgctagtcttcgcaaaagcatcatcttcaagcatggaatccgcatccattgcggctaaaactgccgtttgcactggcgaggagcacgttgctagggagtcaatgaacggactcggtgagcgaaggccatgcatgcgatttccgaagattgtctgaccaagcacagcgatttgtacgagacccacatttccacagtccttgggtctaaaatacgaaataatgattacatataaaatgagaattaaaaaaaaagtaagtttttgcaacttacttgtacagcctcagaacaatgctggtagccacctctgccttggccagctttagtctaatgcaggtcagaccagtggtggccatgggagcacccactgggatcgaaccaaggccgtaatctctagacagctctagagccaccgcagatggacaggatgccaaactagttgtgtgcggcaccagctgcacctctttcaacaaaattgctgtgggcaacgttatagtcagatccacatgcgtctcatttggatagaacatataggtccaggctggcgatcgcggtcttcgatgtgaattatttggatttgatattagtacctctgcactttgtgtcgcatcattttcggagacaatatgcgagaagggtgcaaagttgatcagaccatcgtactgagcagcacttctcggcggctgtgctgacgtgggacatgtggttcccgtaccagtcgttgtctttttgcaagcactacttgccgccacatgattattacgcttaaagcgcgtattgcgcgtcaagtgttgcataatcaaagaaatctgtaaaagttcactgttgtagttatttgtagagaacaaattagactgttatcttaccaatcctggttgcatgttgatgatagttttattaagtcgcaccaggctatgacatataatctgaattccgcccaattgggtgaacgtttgcactgccgctggtacttccaataccttcgagatgtaccacaggaaaggttcagaatgcggcagacgcggcagcgttgcatttctcggaatagtggctgtaggtgaaaaaatcgtcagaatttaaagcaaaatagcttaacaaatagacttactttcttcaaggtatcggcaaatgggcaccacaacaagtcggggatgcgaagccttgtcgttgagagtaatcatcaaactaaagacggcgtctgcaattgtctgcgggtcatctaaaatcatattggacttcggtgaaaagaaacagccagaggacatcatggtgaaggtgtttgtcgagcactgggaaagcgttccaaaaagtcgcttcattgtggggaaatggcggagtactaaaatgggagttattaattaagaaatatatataagcacaataaattgaaacctaccccaatctgcaatgcaaggcactttgctgcgatgtccttccgtgtttaactgctccgctttagtctcatccgtttgactctgattggaaagttcctcctcctcgggaatggtaacctcctacagtgaaaatatgcaaatgtgataggtttcataacgttttgtacgggaacatacacttggttgccggggcatctctgtcaataccatgtgtgacgatagtttcagcagatttataataagtgagttgtcgcaaattgcggcattctgcttgttgggattttctgatcccagaacgttggcaaacaaattgctaaaattgttgccaactgggctgttttcatttccacgctgacattgtagcctctcgccattggatatgttgttgtacaccaggaaagctatggaaaaaaaagagctccataaaaatgtatacagcgaaataacttttactacttacaaacactttctgtgattttaagcgcaatgttgaggtcccccttatcattgggcatcataagcaaatcacgaaccagctggttttgagcatcaattggaccctgctggttgctaatagagccaccaggctgcaccaactgaagcacaacatgcaacaaaatgtccttaagtcgacgcttgcacggaatgccactcgtctcgcttttgctgtgcagccagagcaataactcatgcaagtgcttgcaaatagtaggtccagcctgataaaagatttatttaatttgttagtcgcttcagatgtaccatgaaatcagttaaataacttacgcatcggttggtgatgatagatgagctcatgccataaccggaaaagaatcgtagcagcactttttcaaagttttcatcattcacgatagcctcgttgatacgcgtacaatccgcatcatctccgataggcaatgagttgcaagcgagaaacaggcactgaaagccaagacaccaggtccgcagttttatatcactgtgccaagccaaagccaggagcaatccctgcaccgcatttgctccaaacggaatttttggaacatccgagtgagtgatgccactggtgtatggcttgtccgagagctcgcaatttagcgtcagccacatctgcagcacctgctccaagtgcacccacgtgtcttcaaggtgcaattccgccaggatggagtcaaagacccttttaaacatcacataagtattgtcaccgttgtattccgtgcctgaccaaagttgagtcaaatattctggccaaggagcagcctcaggtggtggagagacaaactcattggtcaacacctgaggaagcgatgaatagagatccagggatgtgcgatttgttagccttctcagctgagtttctacgtgcaattccagacccacgtccaatcgtgaatccagagcaatcgagatagacttgcagaagaaattgaatgtattcttagacagggcattactttcctttttggtaactggcttcgttcgttcaatcatgtcaatgtcgtttagcatttcatcgaattccgtgtcatcgcattcaattaatgaaggtaggtaattatatttgacggctgcaattaaaaattgagtatatgataaagtatatgactgttcgcatcgatatataataaaattggaggacacgggtaggaaaatcatacgtaatgggaatcaaacataaagcatataaatgggaaaaaatattcttgtaccaggaaccgtaaatgattaatattatattgcttagttgattaatttcaattgcttaaattatttttgaaaaagttacggtccccaaacacagaatatgtggtagtcaatccatcgaactgtgctccttgcatatataccaggctggggctgggttctatggttaagaaaataactctgattaccctcttgataaaattctcttgctgtcggcatcagcgtctcaaatagtgcctcagtacacgaggaagcagtggctaaaagtatgaaaaattcattggaaattctttacaactcttgataaggaaaaacaatgtccggggaaaaaaatatctaccggcaatccgaagaaatgaatacctctgcaaatgtttttgtggacaatatattgagcacaacttttcacacgtatcgtattcatttataaaataatcgattttgaccatttcataaatattgaagcatttagcttaactaaggaagcttggtacttacaagtatagtcgctgaaaagatcccgtgtttcctggatcgcagcttccattgtacgcggcgtgtcatttgtaggtgtgacatcattgtcccggaactgcttgtccgcatccaaaagatcctgcaagtattattagtatatagtttattagttttattctattgtcaagttggcttgatgaagtcgatgttgcacttacttgcagtaaacacgtaatggcatgaacagcccagggatgctgctgatcattccacacggatagacgtacaagttgctgcagttgggcgatggtcacaatcttacacagctgtaccgacggtctgcatgcagccaccaaacgggcaatgactttgcaagtgagcaaaaactggtccatattgcaatcgaagtccatttcaagcaacagtgcaaagagaccgcgaataaccaccttaatgttatccattcgaagtgattttaatcccttgtcaaagttgctgtctcgttcgccatcggtacccggcacagcctgattcttaggagaggatgaggaagccgcactctttgatgtattgccactggaacttgaaggaccacccacgcacaggccagaggatcccatattaatcttgccacctgtagaggtcgacttggttggtccagcgccctttgatttcgttgacagctccatgaaaatgcctggatgctaaggataaaacaaataattattataaaattaagtattaagtgaagagtaaactctcacctcattctgtatcatataaatcttctttccccagtcagcgtaaggctgcgccaagtacttgttttgctgaatgatgcgttttttaaagcatcgtagctgtttgatgttgggagttgcactaggtctggccttagtaaaatcgccctcgcagctcatgaagtcccagcgagctgctgctgcaatttttaaatattattttccattgttctattagaaaactgcgtttaaattgcacttacatttatccttgcgctcgttgtcatccagacacactgagagaaacagaagtagccaggtaatcagctgcagatcagatgtggtgcccattgctgcattgcggtcagcagcgtttgccgacgtgctgggctgctccgactggaatttgtagtgcggtgagatgggggccagcagcttgacgagcgtcttaagcacggcatcgattactatagatcggcatgcgcccatagcaatgcttcgacgtcccaggtaggtgagcaaaaagaatatgctgtaacaatatcgaaaattagtttcgtcttagtttcgtagattttagtactaaccggtcctgggggaaagccttgcagttctgggcagagaataggctgcagaaggtgtcagcgagaaagtcaccccaccacggttggaagcagcacatacgcacaagcaaggagcatgttgccaactgtagctgggcatcgccgtacacaaccagggcgttgaaaagcgccttcgccgtggcggcattgaatctctgatgaacgggcaggatgttcttgattccatactcaatggagaagtgcaagagcacctccaccagactcagactaagcactcgcaacttgtccctcgaggcagcgcgcaggatatcctccgttagaggaatagattgtcccggaagaagcgttgtcgtcggagaattaggggaaagagctcgttccaaacggagcaccacgttacgtataacattgatctgatattgcagaagcatgcactcatcatacagtgaaaccaccttattgttgttttccagcccacttagctcctcttcacgttgcttgttgataaaggcctgtagatgagccacattggacagttcactatttctcatgggagccagtagatccatcaacttggagctagccaagctataacggcagtggacatcctcgtacagtgcatttagcgactttatttgcgattgaaggctatgtgtgggatgcttgatgtacttcataagctggtcaccatatccgtcgtgctccagcactactgggtggccaaagaaacgtcccaacggcactttgcacttggtggccgacatgccgatacgaccaataatggtcaactttaggtaacggcatattggggccggctgaatgtcgctgagcacaagcgttttggtttgaatgtcattcacctgcaccaaccgcgtgcaatcggtctcttcgtcaaaacaccagatgtcgatattaagggaggtcaactcatcgcaagagggaatcaccaaatctgttagaagaatatgctgtccaaagtctaaaaccacaaatcgccgtgcacccgaatgcatgcgatcgatgacgatcatctgtttgggcggcggcgtgattaatttgtgccaggcaatcggctggcacggattggcgtttagactctcagtgatcttttcgctatccgcggcatcgtcaagtatgttaccacctgctgacgtggcttgttgtgacatgtttgattcggacgtagcctcagagcatacgatgggagcttccacctccaaattaaatggcggcgttgtgttaccgtcccagttgtccagttttccaaagtcatcgaacgaaatgtgctcattgatcttcttttgcatgtagctttcaagtagcgacaacttcggtaaaaactttgcaatagttaatttgtccattatgtctgctttttcttttttaacctcctcctttaaggtctgtttaacggagtttaacgaagacactattaaaagataggtcgatatataagttttgcatgaatatatatatagtttttaagataatgcatgtgtcttaatagaaattacttacatgttttatctttgaagccattgaccagaccaaaagcatcgtaatcgaccttttcctgcttttcattttcatctaccttcatttcctctaccagacactcaacatcattgaccaaatcattgagctagtgaatattaaattagattctataaaaaagtatatcactaattattggtataccatttcctctcctttctcctttgcaaccacttgttttggcatcatcataacatcctcgattatcacgttggcaccagtgttccctcccacactatcaatattgtcgatacgagtagcttcggaagtctgaacgcagttaaagtgaagctgaaccacctctaacaatccacgcagttggttactgatgctttttcctcggatcagatatggaaatgtgcggaagtctacgccatctgcaaatgaaaatgttgctattaactgaagtcacggattttattatttagaatgccacctattgagcttaatcgcttgatgtccagaccagtcactggcagaattgtgggactgctgcgtatcacattggcaaccgatgaaccgggaccttgtctgctgacgttggggaagtcaaaatcaaagatttccggctcaaatggatacccgtagagcccgaatcgcgtgcataacagagcacagtgggggtcccaacgcttgtcgatttcggctgcaatctcttttaacagactgatcgcctgctcagagatgctattgtgggactcggcggtggatgtggcgcaggtcagcatcatataccagcgcacaacgctaccacactgagcgcgcggtagctctggaaaggtgttggcaatcgccgctttgaagctataatccagcgtcgtgtgatcctgcacctctgccggcagattggttgcacccctgcaagttattttattgttgattttcattggaaattggataaaacacgtgctgttacttactctgtcaacatgatcagcagtttcacacatttgtgggccgtactacgttcgctgtagataacgcagttccgcagcaattgctcgatatgcttctcagccagggaaatgcactcgaactgctgagcaagcaaatcttggatgttagcggctgtctgtttattaatctggtccttgagccgctccgatttgggtgaacgaaaacggttcagccggatgaagcaaatccaattgagtatatcaagtgataggttcttggccaacgagctggaggccggatcactagcgatgcgtagcagttgcaccagcaacacgttgctctccaacatggctatgcgctgcatccgtccattgctgattctactgtgagacttcacagcacgcacactgatggatatttcgtgcaaccagtcgcagcctacaaataaaaacagaaatacaaattttataaggattctggaccatcagaaggaaatgcaacgccatgaagtaccttccctactgggcagttgctcgagcctgcgtccaacagagggagcaactgcagctgactggctttgggtcttgtttttaatgatcttcgccacaaataccttttcattgtcttgggtcttgggtttgtttacttgaataattttaacgcaagcgttttttgccgctggaaatacttcaaggactgctgtcttgaccacactgattatatttgccgccacattaaaggggtttctagagaccttgttacgttccacaaatccctcaacatgatgcggccgcttgtgccgcgttggtgaatctgcaaaatggggcgatatggaccgtaaacgacttcaaaactgtccgcagaaaaggcgcaatgcaggctgttggactctaattctgacccgactcaaaattcaattggcgttaagttagtttagaataggtatacagaaagcaaataacaagggtatgtattctaaattatttggtaagattacgatttgagaccaaattttatcgccacctttccccaggttacatacctctagtcttgttctgcccatctttcgacggatccgacactgttttgatgtggagcaagaagtttctagtacgggtcttaaatagttttggggatgtgagcgtggcggtgcctccctgatcacacagatcaatgcaagaggagagttcaatgggaccggccaaaacttccgcattgtgggctagtaaatattcctcactcagcacaggattttcgttggcaactaggagaaggatagacacattgttaagaaacagctaacgctatgtgtggttgaacttactatatgagagatcaatgttgtcatcgatgacattcggcttataactggagtgaggtcccttcattctgtacccaaatccattgttattttgtttcaataacgtaacctgaattgctgcagggtttgagcattgctggtagaccgtaaactttagatcaatgtgtcccagagatacgggttgtgccaagttaagctctataatgtgctcgtcccaggtggttctacaatttaaaacatccattttttttaacaaatattaccattcatattcctgctaagtacttacgcatcgttgtgaagacgccaggtgcgagtgaaatctcgttcgtcgccaccatgtcgcatgttttgggactgtttacgttgattctgcacctgcccgatatcgttccaacaactgggaacttcagctgagtagacggttagtttatcatcgaattgggtgagggcgtaaaagacttttaggtcttcgagtgtcaggtcagccgtcttgtaagcgagcaggttcgcattggtggatggcgcggaagatgccgatggcgaagtttggacgtgcgcaccctgagccgcgctggaggagttcgggattgcagctgcctcactgccagcatccatgcaaatagattcgttggcgagcagggtcttgcccagtagatccgttctggctaattggcgtccgccatccgtaacacttacgtccgctgcctgtgttaacgtggtactgcagtcatcgtccatttccaaaagttcgtctccagaatcgttctccccatcgcttagcgagtagaagagcaagccaccctgtcgagagcaacagcatagcctatccaagttccggcaataaaccacagactcgaagtgctcgccttcctcctcgatgaccattgtgccttggaagtcagcgagagaatatatttccacggtgccatctgcacacaccacacatatggacccggcatccttatgctctggagaagagttgaagtgcggcagaatgcacagttgcttggggaacttggccctactgaaagtcatggccagggtgtagtcgttggatatttcagtgtcatcgtagtcgaacactaagagctgagctgctacattcccttcggcgttattatctgaacgggtgaaaaatttaactcattcttatttgtgacaattaagagagcgatttccctcgtacctgtctccattgactcgtctgtccgctgctcctcatcctcttcctcctcctccttggccacggtagccatgatgattttgcttccctctgcctccggtgccttggtacgcagcaacttgaccagcagttggttgcacttgggagtagtcggaagaatttcggcaatttcgattacctcctggtccatgtggttcacaccgtttaccccactgctggcaccatctaaagcgttcatgcgcttcacacttgtccagctctcaactacacaatctatctcttcgatggctgtcattttgtcgatactgctgttagtgcctccattgatcatgatgttattgttattattagaggaatttcctcccagagaactcgcctcgttgttgttgttattattattattattgttttggtgactaatctccacatccacgaccagcttattaatctcgttgcccatgccaatattgctgacattcaccgtattcgatgatcccaccatcaaactgagaggctcctccagattgtgatccagaatctgggacagtgtgcacaaatcgaaatcatacagggctgaggcatcgtcggtgttttggctaactccattattcttgttgtaggtcataagagcggacacaaatccgttgctatcgaagccatcggcgaacttctcgtatggtgtcatagccttgttatcatcatctttggactcaagattcacttgggtcactgtggcattgttttcagcggacactgtagcgaaataaatagttcatatataatgatgatttcagtttatacagggttatcaaaagtatgtacaaaaatttgagttccaaactaaccgttgaccatcggagaagaagacttcatcagttggcctccaccgcttgagacgctgccgctatcattgctgacgctcgttgagctctcactgttgcggtccacttccacgatgttaagcactaccatgcgcaaggccaattctccgctgctctggcgcacgctgactcccagaacaattttggatccaacaacgccggcccgaagcgtggacgtggaggtgatatgctgggcattcacactgccaaactttccaccagatacagcattcaatcccgagttgcatcccgctccattgctgcttcctgagccgccataattagccgccgagtacacataattcaccttggtgcgagctcgtgcattcggtagcacacatatggcagtaacgcgtgcccactcgaagctctcctcgaaaatgtagttaagcagtgtcggaacatgaaaggtgtgcatcagcttcagatggcgttcaatgctccacacgctcaactctcccgtttgcgagcaactggtgcagagcacgttcgcgtaatcactgtttgaaatgatatcgaacccaagtcctggtgctggcaatgcgggattagtggcgtaggttatggacagcgggacgttctgtgtatattcgcccttgacaaatggacacagtggtgagtgcctctcatgctcgctccacggctcatccgtcttctcccagcacacaagacacacgctgcaggtgaagcacatggcgcgatcctctccagatgaagatggctgatggtaaaaaccggcctgagccatctgatcgggcagagcccatttgtagtccatatggggccacttctcaaacgtctggcgtcgcactgcctccgaatgcataagtacgcgctgaaaattgctaaagttccagccaaaatctggcacgcgggagcccatcatcatgtcggtcagacgctcattaatggcggaagcgatggccagcacgggaatgtggcgctccagccgcttcagtaggataaccatattattggatactagctttaggctagaatagggtacctccagacatatggtattccactgaaacgaggaaatctgttagtatgaaaaattcgaagtattaggaaaactaaataccctctgggccttaatgcccttcttggctttcagctgcgcctggtttatcttttgcgtcagctcgttgctaatgtcacaggggcactccaagccctcactttccagttcggttatgcagttctgaaagatgatcgcttcggacaggatgatctccagcttgatgtagtcgtcgttttggccaattggagcctgtagaatggtgtccagcaacagcacgccattataatcgcctcgcaatccgagattgtgaccatcccagaacaagatcttgtcttgcagaggcatatatcgaccatgcacaatgctgtcgcctgaagagggaaagcccggacgaaagaaaacattagaaagggaatgtgacttattcttgccgatttcatcataagtttgtttcctaagcctatagataacgggactatatccgtgaaattgaagaccgaaacttttccgaaaatcgtttccgtggcacaagttcatgggcagcgggggcgaatggggccattaaacagaacaactgcgtaatagaagaaaaacaaaaacaaaatgcgtgctgctagcggctaatcgcaagcaataacaaacgcactgcgataggacagtacataagatttcagcttccatgtcgaaccccatggattggatcaaattataagtctccatttaaggatttcccagagcttttgttaaaaattgatgacaaacgcatacacaaaaaactgccagaacacacagcctcacatacaaacaagccgacaagtgcaaggcaattacgtacagaaatgcaatacagtaagccatagctgtgacgactgcaaaactactatgagggcctagcaggcaaacaattggaatttgtttttactaaattcgcaactagaccggtagaaatgctaatggaaaataatgcaataataccgttttagtgtctgcgaatacattagcattttcaatggaactcttaaatcaaatttaaattgaaaatttcaataatagataaaaatttaatattgtattttttaaatttgttaatgtttctgtttaagaccaaaatgtttagcaacaatttgaaatctgtgttacatcgttcttctatagatatgattcagacaattcagatattcgatgaaccagaagactattgatatattgctattttttgctgtgtgggttctaattcgcagttttccactgtattgacatttgcgtgcgccagtgtgagtgagtgtgtcccattcgtgtgtgcataggtgtgatttttttttcctcggaaatcttaccattgctactgaggtgataggtctgcagaatcactcctgaattggcgtccaggaccttgaccgtgcttccgttgtcaaaaagcaaaaggacatttaattgcggatggtagacgacgttgcgcatctcgaatggtcgagatggagcgctattacagtcgcccaaatccaagtagccatcttgcttgaggacgcgctgctggtgatgctgctccgtggccattccggaggtgcgccgcggcaatttgtgtgctcctgcttctggttgggatactctgtaggggtttttttcgcaattcaattcggaaaataattgctgcgaaacagagctctgtgcttcttcttcttcttcgttttgccccttcttcttctaccttctgacagatgtgtttgccattcgattgctagcaatcgcctgtgaatgccaaaaattaatcgagtgcccagggggcgcgcgagtgtaagtgggtgtggccacgtcaagtcagcaaagtaaacacatttaaaaaataaataaaatagtccacttttcaagctagagagcaacaaattcggcctactgcgcttagggcattcgataattcagagccattcgatagacagagatgcctatcgagtaatcgattacaggaatgtcaacaaagtggaaataaaatgaatattttaccaaaaaaacggtaagttttatactgattctaaagatacctctcatcaattcacgtgtatttcttagctggcatgtgcgtaccaaggagaacattgcccgcgtgcgccgggatcaagcggctgccgcagcagaagaaaaagtccggcaggagaaattggaatttgctgtgggtattgcccaaatatcgtcaatttaacatagtaatgtgtacttttatcaaataggaaagcgaggcacgaatcaacttcctgcgccgccaatcgggcttgccggagaaggcctccaaggaatctcgagaggagtcgcaatgcagtactgaaacaaccaaaggggtggatctctttgccgactacaaggcgagagtgaagaccactaacaaagacttggaaaaggagcaaaaggaggagcaggagaagtatgagaagcagatcggctacctcacctacttgggccaggacaccaatgaagctttgaaagtgcgcagctggtacgagttagcccccaaaagaccagaagttggggatcccacagctactgaaactcatcataagcaaaagctagcccacgatcctctgaccctaattaatgctttgttgccgccagaaaaaaaggatcccaaaaaggccacaaaaagaattcgcgaaaggacacccgcgccttctcaggaaccttcaataccccaca

SEQ ID NO: 13538 - DNA, 14843 bp, DROSOPHILA
aagaagaagaagaagcacagagctctgtttcgcagcaattattttccgaattgaattgcgaaaaaaacccctacagagtatcccaaccagaagcaggagcacacaaattgccgcggcgcacctccggaatggccacggagcagcatcaccagcagcgcgtcctcaagcaagatggctacttggatttgggcgactgtaatagcgctccatctcgaccattcgagatgcgcaacgtcgtctaccatccgcaattaaatgtccttttgctttttgacaacggaagcacggtcaaggtcctggacgccaattcaggagtgattctgcagacctatcacctcagtagcaatggcgacagcattgtgcatggtcgatatatgcctctgcaagacaagatcttgttctgggatggtcacaatctcggattgcgaggcgattataatggcgtgctgttgctggacaccattctacaggctccaattggccaaaacgacgactacatcaagctggagatcatcctgtccgaagcgatcatctttcagaactgcataaccgaactggaaagtgagggcttggagtgcccctgtgacattagcaacgagctgacgcaaaagataaaccaggcgcagctgaaagccaagaagggcattaaggcccagaggtggaataccatatgtctggaggtaccctattctagcctaaagctagtatccaataatatggttatcctactgaagcggctggagcgccacattcccgtgctggccatcgcttccgccattaatgagcgtctgaccgacatgatgatgggctcccgcgtgccagattttggctggaactttagcaattttcagcgcgtacttatgcattcggaggcagtgcgacgccagacgtttgagaagtggccccatatggactacaaatgggctctgcccgatcagatggctcaggccggtttttaccatcagccatcttcatctggagaggatcgcgccatgtgcttcacctgcagcgtgtgtcttgtgtgctgggagaagacggatgagccgtggagcgagcatgagaggcactcaccactgtgtccatttgtcaagggcgaatatacacagaacgtcccgctgtccataacctacgccactaatcccgcattgccagcaccaggacttgggttcgatatcatttcaaacagtgattacgcgaacgtgctctgcaccagttgctcgcaaacgggagagttgagcgtgtggagcattgaacgccatctgaagctgatgcacacctttcatgttccgacactgcttaactacattttcgaggagagcttcgagtgggcacgcgttactgccatatgtgtgctaccgaatgcacgagctcgcaccaaggtgaattatgtgtactcggcggctaattatggcggctcaggaagcagcaatggagcgggatgcaactcgggattgaatgctgtatctggtggaaagtttggcagtgtgaatgcccagcatatcacctccacgtccacgcttcgggccggcgttgttggatccaaaattgttctgggagtcagcgtgcgccagagcagcggagaattggccttgcgcatggtagtgcttaacatcgtggaagtggaccgcaacagtgagagctcaacgagcgtcagcaatgatagcggcagcgtctcaagcggtggaggccaactgatgaagtcttcttctccgatggtcaacgtgtccgctgaaaacaatgccacagtgacccaagtgaatcttgagtccaaagatgatgataacaaggctatgacaccatacgagaagttcgccgatggcttcgatagcaacggatttgtgtccgctcttatgacctacaacaagaataatggagttagccaaaacaccgacgatgcctcagccctgtatgatttcgatttgtgcacactgtcccagattctggatcacaatctggaggagcctctcagtttgatggtgggatcatcgaatacggtgaatgtcagcaatattggcatgggcaacgagattaataagctggtcgtggatgtggagattagtcaccaaaacaataataataataataacaacaacaacgaggcgagttctctgggaggaaattcctctaataataacaataacatcatgatcaatggaggcactaacagcagtatcgacaaaatgacagccatcgaagagatagattgtgtagttgagagctggacaagtgtgaagcgcatgaacgctttagatggtgccagcagtggggtaaacggtgtgaaccacatggaccaggaggtaatcgaaattgccgaaattcttccgactactcccaagtgcaaccaactgctggtcaagttgctgcgtaccaaggcaccggaggcagagggaagcaaaatcatcatggctaccgtggccaaggaggaggaggaagaggatgaggagcagcggacagacgagtcaatggagacagataataacgccgaagggaatgtagcagctcagctcttagtgttcgactacgatgacactgaaatatccaacgactacaccctggccatgactttcagtagggccaagttccccaagcaactgtgcattctgccgcacttcaactcttctccagagcataaggatgccgggtccatatgtgtggtgtgtgcagatggcaccgtggaaatatattctctcgctgacttccaaggcacaatggtcatcgaggaggaaggcgagcacttcgagtctgtggtttattgccggaacttggataggctatgctgttgctctcgacagggtggcttgctcttctactcgctaagcgatggggagaacgattctggagacgaacttttggaaatggacgatgactgcagtaccacgttaacacaggcagcggacgtaagtgttacggatggcggacgccaattagccagaacggatctactgggcaagaccctgctcgccaacgaatctatttgcatggatgctggcagtgaggcagctgcaatcccgaactcctccagcgcggctcagggtgcgcacgtccaaacttcgccatcggcatcttccgcgccatccaccaatgcgaacctgctcgcttacaagacggctgacctgacactcgaagacctaaaagtcttttacgccctcacccaattcgatgataaactaaccgtctactcagctgaagttcccagttgttggaacgatatcgggcaggtgcagaatcaacgtaaacagtcccaaaacatgcgacatggtggcgacgaacgagatttcactcgcacctggcgtcttcacaacgatgcaaccacctgggacgagcacattatagagcttaacttggcacaacccgtatctctgggacacattgatctaaagtttacggtctaccagcaatgctcaaaccctgcagcaattcaggttacgttattgaaacaaaataacaatggatttgggtacagaatgaagggacctcactccagttataagccgaatgtcatcgatgacaacattgatctctcatatattgccaacgaaaatcctgtgctgagtgaggaatatttactagcccacaatgcggaagttttggccggtcccattgaactctcctcttgcattgatctgtgtgatcagggaggcaccgccacgctcacatccccaaaactatttaagacccgtactagaaacttcttgctccacatcaaaacagtgtcggatccgtcgaaagatgggcagaacaagactagagattcaccaacgcggcacaagcggccgcatcatgttgagggatttgtggaacgtaacaaggtctctagaaacccctttaatgtggcggcaaatataatcagtgtggtcaagacagcagtccttgaagtatttccagcggcaaaaaacgcttgcgttaaaattattcaagtaaacaaacccaagacccaagacaatgaaaaggtatttgtggcgaagatcattaaaaacaagacccaaagccagtcagctgcagttgctccctctgttggacgcaggctcgagcaactgcccagtagggaaggctgcgactggttgcacgaaatatccatcagtgtgcgtgctgtgaagtctcacagtagaatcagcaatggacggatgcagcgcatagccatgttggagagcaacgtgttgctggtgcaactgctacgcatcgctagtgatccggcctccagctcgttggccaagaacctatcacttgatatactcaattggatttgcttcatccggctgaaccgttttcgttcacccaaatcggagcggctcaaggaccagattaataaacagacagccgctaacatccaagatttgcttgctcagcagttcgagtgcatttccctggctgagaagcatatcgagcaattgctgcggaactgcgttatctacagcgaacgtagtacggcccacaaatgtgtgaaactgctgatcatgttgacagagggtgcaaccaatctgccggcagaggtgcaggatcacacgacgctggattatagcttcaaagcggcgattgccaacacctttccagagctaccgcgcgctcagtgtggtagcgttgtgcgctggtatatgatgctgacctgcgccacatccaccgccgagtcccacaatagcatctctgagcaggcgatcagtctgttaaaagagattgcagccgaaatcgacaagcgttgggacccccactgtgctctgttatgcacgcgattcgggctctacgggtatccatttgagccggaaatctttgattttgacttccccaacgtcagcagacaaggtcccggttcatcggttgccaatgtgatacgcagcagtcccacaattctgccagtgactggtctggacatcaagcgattaagctcaatagatggcgtagacttccgcacatttccatatctgatccgaggaaaaagcatcagtaaccaactgcgtggattgttagaggtggttcagcttcactttaactgcgttcagacttccgaagctactcgtatcgacaatattgatagtgtgggagggaacactggtgccaacgtgataatcgaggatgttatgatgatgccaaaacaagtggttgcaaaggagaaaggagaggaaatgctcaatgatttggtcaatgatgttgagtgtctggtagaggaaatgaaggtagatgaaaatgaaaagcaggaaaaggtcgattacgatgcttttggtctggtcaatggcttcaaagataaaacattgtcttcgttaaactccgttaaacagaccttaaaggaggaggttaaaaaagaaaaagcagacataatggacaaattaactattgcaaagtttttaccgaagttgtcgctacttgaaagctacatgcaaaagaagatcaatgagcacatttcgttcgatgactttggaaaactggacaactgggacggtaacacaacgccgccatttaatttggaggtggaagctcccatcgtatgctctgaggctacgtccgaatcaaacatgtcacaacaagccacgtcagcaggtggtaacatacttgacgatgccgcggatagcgaaaagatcactgagagtctaaacgccaatccgtgccagccgattgcctggcacaaattaatcacgccgccgcccaaacagatgatcgtcatcgatcgcatgcattcgggtgcacggcgatttgtggttttagactttggacagcatattcttctaacagatttggtgattccctcttgcgatgagttgacctcccttaatatcgacatctggtgttttgacgaagagaccgattgcacgcggttggtgcaggtgaatgacattcaaaccaaaacgcttgtgctcagcgacattcagccggccccaatatgccgttacctaaagttgaccattattggtcgtatcggcatgtcggccaccaagtgcaaagtgccgttgggacgtttctttggccacccagtagtgctggagcacgacggatatggtgaccagcttatgaagtacatcaagcatcccacacatagccttcaatcgcaaataaagtcgctaaatgcactgtacgaggatgtccactgccgttatagcttggctagctccaagttgatggatctactggctcccatgagaaatagtgaactgtccaatgtggctcatctacaggcctttatcaacaagcaacgtgaagaggagctaagtgggctggaaaacaacaataaggtggtttcactgtatgatgagtgcatgcttctgcaatatcagatcaatgttatacgtaacgtggtgctccgtttggaacgagctctttcccctaattctccgacgacaacgcttcttccgggacaatctattcctctaacggaggatatcctgcgcgctgcctcgagggacaagttgcgagtgcttagtctgagtctggtggaggtgctcttgcacttctccattgagtatggaatcaagaacatcctgcccgttcatcagagattcaatgccgccacggcgaaggcgcttttcaacgccctggttgtgtacggcgatgcccagctacagttggcaacatgctccttgcttgtgcgtatgtgctgcttccaaccgtggtgggtaatcgatgccgtgcttaagacgctcgtcaagctgctggcccccatctcaccgcactacaaattccagtcggagcagcccagcacgtcggcaaacgctgctgaccgcaatgcagcaatgggcaccacatctgatctgcagctgattacctggctacttctgtttctctcagtgtgtctggatgacaacgagcgcaaggataaatcagcagctcgctgggacttcatgagctgcgagggcgattttactaaggccagacctagtgcaactcccaacatcaaacagctacgatgctttaaaaaacgcatcattcagcaaaacaagtacttggcgcagccttacgctgactggggaaagaagatttatatgatacagaatgagcatccaggcattttcatggagctgtcaacgaaatcaaagggcgctggaccaaccaagtcgacctctacaggtggcaagattaatatgggatcctctggcctgtgcgtgggtggtccttcaagttccagtggcaatacatcaaagagtgcggcttcctcatcctctcctaagaatcaggctgtgccgggtaccgatggcgaacgagacagcaactttgacaagggattaaaatcacttcgaatggataacattaaggtggttattcgcggtctctttgcactgttgcttgaaatggacttcgattgcaatatggaccagtttttgctcacttgcaaagtcattgcccgtttggtggctgcatgcagaccgtcggtacagctgtgtaagattgtgaccatcgcccaactgcagcaacttgtacgtctatccgtgtggaatgatcagcagcatccctgggctgttcatgccattacgtgtttactgcaagatcttttggatgcggacaagcagttccgggacaatgatgtcacacctacaaatgacacgccgcgtacaatggaagctgcgatccaggaaacacgggatcttttcagcgactatacttccgtcaaatataattacctaccttcattaattgaatgcgatgacacggaattcgatgaaatgctaaacgacattgacatgattgaacgaacgaagccagttaccaaaaaggaaagtaatgccctgtctaagaatacattcaatttcttctgcaagtctatctcgattgctctggattcacgattggacgtgggtctggaattgcacgtagaaactcagctgagaaggctaacaaatcgcacatccctggatctctattcatcgcttcctcaggtgttgaccaatgagtttgtctctccaccacctgaggctgctccttggccagaatatttgactcaactttggtcaggcacggaatacaacggtgacaatacttatgtgatgtttaaaagggtctttgactccatcctggcggaattgcaccttgaagacacgtgggtgcacttggagcaggtgctgcagatgtggctgacgctaaattgcgagctctcggacaagccatacaccagtggcatcactcactcggatgttccaaaaattccgtttggagcaaatgcggtgcagggattgctcctggctttggcttggcacagtgatataaaactgcggacctggtgtcttggctttcagtgcctgtttctcgcttgcaactcattgcctatcggagatgatgcggattgtacgcgtatcaacgaggctatcgtgaatgatgaaaactttgaaaaagtgctgctacgattcttttccggttatggcatgagctcatctatcatcaccaaccgatgcgctggacctactatttgcaagcacttgcatgagttattgctctggctgcacagcaaaagcgagacgagtggcattccgtgcaagcgtcgacttaaggacattttgttgcatgttgtgcttcagttggtgcagcctggtggctctattagcaaccagcagggtccaattgatgctcaaaaccagctggttcgtgatttgcttatgatgcccaatgataagggggacctcaacattgcgcttaaaatcacagaaagtgtttctttcctggtgtacaacaacatatccaatggcgagaggctacaatgtcagcgtggaaatgaaaacagcccagttggcaacaattttagcaatttgtttgccaacgttctgggatcagaaaatcccaacaagcagaatgccgcaatttgcgacaactcacttattataaatctgctgaaactatcgtcacacatggaggttaccattcccgaggaggaggaactttccaatcagagtcaaacggatgagactaaagcggagcagttaaacacggaaggacatcgcagcaaagtgccttgcattgcagattgggtactccgccatttccccacaatgaagcgactttttggaacgctttcccagtgctcgacaaacaccttcaccatgatgtcctctggctgtttcttttcaccgaagtccaatatgattttagatgacccgcagacaattgcagacgccgtctttagtttgatgattactctcaacgacaaggcttcgcatccccgacttgttgtggtgcccatttgccgataccttgaagaaaccactattccgagaaatgcaacgctgccgcgtctgccgcattctgaacctttcctgtggtacatctcgaaggtattggaagtaccagcggcagtgcaaacgttcacccaattgggcggaattcagattatatgtcatagcctggtgcgacttaataaaactatcatcaacatgcaaccaggattgatttctttgattatgcaacacttgacgcgcaatacgcgctttaagcgtaataatcatgtggcggcaagtagtgcttgcaaaaagacaacgactggtacgggaaccacatgtcccacgtcagcacagccgccgagaagtgctgctcagtacgatggtctgatcaactttgcacccttctcgcatattgtctccgaaaatgatgcgacacaaagtgcagaggtactaatatcaaatccaaataattcacatcgaagaccgcgatcgccagcctggacctatatgttctatccaaatgagacgcatgtggatctgactataacgttgcccacagcaattttgttgaaagaggtgcagctggtgccgcacacaactagtttggcatcctgtccatctgcggtggctctagagctgtctagagattacggccttggttcgatcccagtgggtgctcccatggccaccactggtctgacctgcattagactaaagctggccaaggcagaggtggctaccagcattgttctgaggctgtacaaacccaaggactgtggaaatgtgggtctcgtacaaatcgctgtgcttggtcagacaatcttcggaaatcgcatgcatggccttcgctcaccgagtccgttcattgactccctagcaacgtgctcctcgccagtgcaaacggcagttttagccgcaatggatgcggattccatgcttgaagatgatgcttttgcgaagactagcattggctgggttcgcattctgtcgcgctgtttccatgtggccgctttacaaccagacagtaagctggctgatcttatcgccgcctatccggctgcatatcccggctttttagaggcctgctgctcattgctaaacataatgccaatgattcctagtcttgcacagcaacacttggagaccattttgttaaaattaagtgcatacaaccacgagatcagtttgcaacttcttaggacgctcctgtggcacaccactccgcaagtttttaaactctccagcgattcggtgtgtgatcttatttatgaagtagttaccggatcgacggagcacctactggacaaactacgcgtgcttatcgactgggtaatgcaattgcacgacaactacagcaagcaggcgcgctgtaataacccacaaagtggatttgttaaggtgattgcttcgattctgtggaaagtgcatacccagcaacaattgcctgagttaccgcttctcatttcatcttcgctgttcgagacctgttttgaatgggtctcttcgctggagcacgatgagccactgaagagcagttttgactccttgttgtgtgcattgtgcttcattaagccagaactgtttaaccagctgttggtcaagctgggagttaagctggaacctccagctcgaggtcaaactgatgacagcaaagtgcaaagtggtagtgcttggttccgccgtgagggtagcgaaaaccttagtgttttgctacagcgtcccacattcctaaagactctagccttggcctgccagtcccctgcagcagtttaccagatgctagactccggacttccaaagctattggcccacgccatttacgagtattgcatgcatctcatgccgggatcggagccagtagcttctgcatctacagtgccggaagacgaaccgttagccaacaatcaggcagccgctgcagcagatgacgaggactcgtctcttacggactttgacaaggccgaggcaaatgtggtttataatactccactgctaagtagctcgaatgtacccaaagtgctagatttctttgccgaatgttgtgccgaaggtccaatgcgtgattggttaggtactatgcagggctccgtattttggaagcctctgctgcagttgctctgtaacacacatgccgcccagttcagcaagacgttgcctaaggaacaatcgtttatccgcctggagagggccacaatcaacttctttacgcgagttagcgcctgccatcccggaaaccaggaaaatcttacatcgttgctcattggagccataatttgcaaaccattaagattttcgcatggagttcgaccaactatatctggatttactagacagatggtgctgcagctcctcctcgagaatgaacacatcacagtctctgttagaagtcagcagcccttgcaacggagggataccctctccgccgttctaggcgggatttcgagtggtgcaagtactagcttacccgtagcagcagtcaacaatcatccggccaggaggagcagcgcccaccacatgctattcacggtgaccactagcaccacgtgccaagagattatgcagaattgcgttagtgatcagcgagctggcgagacctctgcctcgagcagcggcgtatcgagtgcaactgccaaatccagtgagagcaaaatggaaaagagcagcttcctgaactttaacaacgtagaagcgggtagcatggagttccttaccgttggtgctgctgtggcagccaaggacaagcgcataaaagatgctaagaaccaagcagccatgaacaaggacaaggagactcagaccagctcaacgaacttggcttccaatatattcaatgtggatgagttcttgttgcaatcggcgaatgccgttaatggtaaccagttggtcattccagagtattctgatattgttctagctggagatgccaccatctcgcaggttttggcctcgcttcagaatgcaggacattctctttcgacgccctgtatatcgtttgatctggtacttcaacagcgctctgatgacacaagcgaggcaaagaagaccaaagctgcctgcactgagccgttgccatcaccactgcaacgattttccagcagtggtggtctatctttactcgctcactacctgcccaccgtatatccggaacactcaggtcgcaagaccaccttggtgtttagcgagaaggagaaaagtcccccgctctctgactgggtgaaattggaaccgaacgacgagatctatgaggatttggaggacactctctgtgagccagcagctaagctggcaacggtcagttcggtgccgcagcactcgctggccgcatttggattattcctgcgcctgcccgcctactctgatgtcttgctgcgagacaagatgcgggcgcagtgtcttctccgcttagtgctcggagtcacgggagatggggatggcagtacgttaaaagagtggtccattaattcattaactaacccgctctctgttccagatgatatatacagtctgtcgctggcaccctccttgcctacattacccttcgaggtcttccgtcagcttcttgatagtgtgccgttatccaccgacgacggtgttttgctacgacgcgtggtaatcgaagtgggggccatgcacctagtgcttaattgcctcggcattttctcgcatcagtcgcacaacaacaggattggagcaccgattagcgaaccatcgccaagtggaaccagtagtggtagcggcaccattggcaatggaagtggaaacggaagtgtaagcggtaccaaaactaatgcaccagaagaggccacacctagtgccacgtcggacgacaaaagccacatgtactgggccaagggcactggtttcggtaccggttctactactcagtcgtggaatgtggagcaggcgcttcttcggcaaaagagcgaggaggagcatgtcacagtgttgctgcttgttctagccagttacataaatccgggtgactgtatcccaagtgaaatgtgcggagaggacatcctagcttatcatgatgtccgagatgttaccggcgagttgccgcccatcttccaaaccctactgcagcagtcttgcttaatccccgccctcagctcctatctgcgcaacgattcagtgcttgatatcacgcgccacattccgctataccgtgccatactcaaacttctgcgtgccctatcgctgtctaagatgcttgtctcgttgctccaaccatctgccagtggcagtggggacagcacgccacccatagtggagttgctcacaagcatgaagacctgtgtggatacctacgccaaacggttaaaagttaacaagaagtcaaacataaagggacagacacatcagttgacctttaacatcgatgatggcgacgatgagggattagctttgcttattccggatatccatgaaaccagtgtgctggtgcaaaaaaccacagatgctgatgcgctaatcaacatgttgcataccaacgaagacggcagcgcacagctagagccccagagcaaatcaattgaacagcgctacttagagctaatgaagaagcgccagttcgatacgtttgacatgattgtggagtcggataacaacagtttccgctttgtggtctcgcatcacttcgaaaaaatggttcggctcgctggcgatcgttaccatccgtcgcgggtcaagcgacttgcccaggaggcagttacactgtccaccagcctacccctcagctttagtagttctgtatttgtacgctgtgatactgatagattggacatcatgaaggtactcataactggtccggcggacacgccttacgccaacgggtgctttgagtttgatgtcttctttccgccggactaccctaaccagcccatgctcatcaatctggagacgacgggtcgccattcggtgcgctttaacccaaacctctataatgacggcaaagtttgcctgtcagttctcaacacctggcatggtcggcctgaggagaaatggaatgcacagacttcaagcttcctgcaggtactcgtttccatccagtccctgatcctcgttcccgagccctatttcaatgaaccgggctttgaaagaagtcgtggcagtccaagtggtaccaattcatcgcgagaatataatagcaatatatatcaggcctgtgtgcggtgggctatgttggagcaaatacggagtccaagtcagtgctttaaagatgtcatacacaagcacttctggttgaagagagaggagatttgcgcccagatagagggctggatcgaggaactcggtaagccgcagtacaccgagagggccagtcgcactatatcgttcaactcaatggtcctgcgccgccactatcgccacctgcgtgaggagttgtcgaaactgaagccgccacgtggcctcgaggacttggatgcgccctttaatcctgtggccacgctaccaccgatggatgtgtccgccgtggctccttcactagcagccacaaataccgtccaagcgcaaccggatgatgccatagtgaccgatattaccctgctcggcgagaatgcggatgaatgcgaagctgatggcgatgccgaaggcgatggagaagtggacgatggctttaagggtttcccgcaagaagagggtttgctgacgggcgaggaagaggtcgtggaaattttaagtgatacggagaacgagagcagtatgtggcaatag

SEQ ID NO: 13539 - protein, 4904 aa, DROSOPHILA
MATEQHHQQRVLKQDGYLDLGDCNSAPSRPFEMRNVVYHPQLNVLLLFDNGSTVKVLDANSGVILQTYHLSSNGDSIVHGRYMPLQDKILFWDGHNLGLRGDYNGVLLLDTILQAPIGQNDDYIKLEIILSEAIIFQNCITELESEGLECPCDISNELTQKINQAQLKAKKGIKAQRWNTICLEVPYSSLKLVSNNMVILLKRLERHIPVLAIASAINERLTDMMMGSRVPDFGWNFSNFQRVLMHSEAVRRQTFEKWPHMDYKWALPDQMAQAGFYHQPSSSGEDRAMCFTCSVCLVCWEKTDEPWSEHERHSPLCPFVKGEYTQNVPLSITYATNPALPAPGLGFDIISNSDYANVLCTSCSQTGELSVWSIERHLKLMHTFHVPTLLNYIFEESFEWARVTAICVLPNARARTKVNYVYSAANYGGSGSSNGAGCNSGLNAVSGGKFGSVNAQHITSTSTLRAGVVGSKIVLGVSVRQSSGELALRMVVLNIVEVDRNSESSTSVSNDSGSVSSGGGQLMKSSSPMVNVSAENNATVTQVNLESKDDDNKAMTPYEKFADGFDSNGFVSALMTYNKNNGVSQNTDDASALYDFDLCTLSQILDHNLEEPLSLMVGSSNTVNVSNIGMGNEINKLVVDVEISHQNNNNNNNNNNEASSLGGNSSNNNNNIMINGGTNSSIDKMTAIEEIDCVVESWTSVKRMNALDGASSGVNGVNHMDQEVIEIAEILPTTPKCNQLLVKLLRTKAPEAEGSKIIMATVAKEEEEEDEEQRTDESMETDNNAEGNVAAQLLVFDYDDTEISNDYTLAMTFSRAKFPKQLCILPHFNSSPEHKDAGSICVVCADGTVEIYSLADFQGTMVIEEEGEHFESVVYCRNLDRLCCCSRQGGLLFYSLSDGENDSGDELLEMDDDCSTTLTQAADVSVTDGGRQLARTDLLGKTLLANESICMDAGSEAAAIPNSSSAAQGAHVQTSPSASSAPSTNANLLAYKTADLTLEDLKVFYALTQFDDKLTVYSAEVPSCWNDIGQVQNQRKQSQNMRHGGDERDFTRTWRLHNDATTWDEHIIELNLAQPVSLGHIDLKFTVYQQCSNPAAIQVTLLKQNNNGFGYRMKGPHSSYKPNVIDDNIDLSYIANENPVLSEEYLLAHNAEVLAGPIELSSCIDLCDQGGTATLTSPKLFKTRTRNFLLHIKTVSDPSKDGQNKTRDSPTRHKRPHHVEGFVERNKVSRNPFNVAANIISVVKTAVLEVFPAAKNACVKIIQVNKPKTQDNEKVFVAKIIKNKTQSQSAAVAPSVGRRLEQLPSREGCDWLHEISISVRAVKSHSRISNGRMQRIAMLESNVLLVQLLRIASDPASSSLAKNLSLDILNWICFIRLNRFRSPKSERLKDQINKQTAANIQDLLAQQFECISLAEKHIEQLLRNCVIYSERSTAHKCVKLLIMLTEGATNLPAEVQDHTTLDYSFKAAIANTFPELPRAQCGSVVRWYMMLTCATSTAESHNSISEQAISLLKEIAAEIDKRWDPHCALLCTRFGLYGYPFEPEIFDFDFPNVSRQGPGSSVANVIRSSPTILPVTGLDIKRLSSIDGVDFRTFPYLIRGKSISNQLRGLLEVVQLHFNCVQTSEATRIDNIDSVGGNTGANVIIEDVMMMPKQVVAKEKGEEMLNDLVNDVECLVEEMKVDENEKQEKVDYDAFGLVNGFKDKTLSSLNSVKQTLKEEVKKEKADIMDKLTIAKFLPKLSLLESYMQKKINEHISFDDFGKLDNWDGNTTPPFNLEVEAPIVCSEATSESNMSQQATSAGGNILDDAADSEKITESLNANPCQPIAWHKLITPPPKQMIVIDRMHSGARRFVVLDFGQHILLTDLVIPSCDELTSLNIDIWCFDEETDCTRLVQVNDIQTKTLVLSDIQPAPICRYLKLTIIGRIGMSATKCKVPLGRFFGHPVVLEHDGYGDQLMKYIKHPTHSLQSQIKSLNALYEDVHCRYSLASSKLMDLLAPMRNSELSNVAHLQAFINKQREEELSGLENNNKVVSLYDECMLLQYQINVIRNVVLRLERALSPNSPTTTLLPGQSIPLTEDILRAASRDKLRVLSLSLVEVLLHFSIEYGIKNILPVHQRFNAATAKALFNALVVYGDAQLQLATCSLLVRMCCFQPWWVIDAVLKTLVKLLAPISPHYKFQSEQPSTSANAADRNAAMGTTSDLQLITWLLLFLSVCLDDNERKDKSAARWDFMSCEGDFTKARPSATPNIKQLRCFKKRIIQQNKYLAQPYADWGKKIYMIQNEHPGIFMELSTKSKGAGPTKSTSTGGKINMGSSGLCVGGPSSSSGNTSKSAASSSSPKNQAVPGTDGERDSNFDKGLKSLRMDNIKVVIRGLFALLLEMDFDCNMDQFLLTCKVIARLVAACRPSVQLCKIVTIAQLQQLVRLSVWNDQQHPWAVHAITCLLQDLLDADKQFRDNDVTPTNDTPRTMEAAIQETRDLFSDYTSVKYNYLPSLIECDDTEFDEMLNDIDMIERTKPVTKKESNALSKNTFNFFCKSISIALDSRLDVGLELHVETQLRRLTNRTSLDLYSSLPQVLTNEFVSPPPEAAPWPEYLTQLWSGTEYNGDNTYVMFKRVFDSILAELHLEDTWVHLEQVLQMWLTLNCELSDKPYTSGITHSDVPKIPFGANAVQGLLLALAWHSDIKLRTWCLGFQCLFLACNSLPIGDDADCTRINEAIVNDENFEKVLLRFFSGYGMSSSIITNRCAGPTICKHLHELLLWLHSKSETSGIPCKRRLKDILLHVVLQLVQPGGSISNQQGPIDAQNQLVRDLLMMPNDKGDLNIALKITESVSFLVYNNISNGERLQCQRGNENSPVGNNFSNLFANVLGSENPNKQNAAICDNSLIINLLKLSSHMEVTIPEEEELSNQSQTDETKAEQLNTEGHRSKVPCIADWVLRHFPTMKRLFGTLSQCSTNTFTMMSSGCFFSPKSNMILDDPQTIADAVFSLMITLNDKASHPRLVVVPICRYLEETTIPRNATLPRLPHSEPFLWYISKVLEVPAAVQTFTQLGGIQIICHSLVRLNKTIINMQPGLISLIMQHLTRNTRFKRNNHVAASSACKKTTTGTGTTCPTSAQPPRSAAQYDGLINFAPFSHIVSENDATQSAEVLISNPNNSHRRPRSPAWTYMFYPNETHVDLTITLPTAILLKEVQLVPHTTSLASCPSAVALELSRDYGLGSIPVGAPMATTGLTCIRLKLAKAEVATSIVLRLYKPKDCGNVGLVQIAVLGQTIFGNRMHGLRSPSPFIDSLATCSSPVQTAVLAAMDADSMLEDDAFAKTSIGWVRILSRCFHVAALQPDSKLADLIAAYPAAYPGFLEACCSLLNIMPMIPSLAQQHLETILLKLSAYNHEISLQLLRTLLWHTTPQVFKLSSDSVCDLIYEVVTGSTEHLLDKLRVLIDWVMQLHDNYSKQARCNNPQSGFVKVIASILWKVHTQQQLPELPLLISSSLFETCFEWVSSLEHDEPLKSSFDSLLCALCFIKPELFNQLLVKLGVKLEPPARGQTDDSKVQSGSAWFRREGSENLSVLLQRPTFLKTLALACQSPAAVYQMLDSGLPKLLAHAIYEYCMHLMPGSEPVASASTVPEDEPLANNQAAAAADDEDSSLTDFDKAEANVVYNTPLLSSSNVPKVLDFFAECCAEGPMRDWLGTMQGSVFWKPLLQLLCNTHAAQFSKTLPKEQSFIRLERATINFFTRVSACHPGNQENLTSLLIGAIICKPLRFSHGVRPTISGFTRQMVLQLLLENEHITVSVRSQQPLQRRDTLSAVLGGISSGASTSLPVAAVNNHPARRSSAHHMLFTVTTSTTCQEIMQNCVSDQRAGETSASSSGVSSATAKSSESKMEKSSFLNFNNVEAGSMEFLTVGAAVAAKDKRIKDAKNQAAMNKDKETQTSSTNLASNIFNVDEFLLQSANAVNGNQLVIPEYSDIVLAGDATISQVLASLQNAGHSLSTPCISFDLVLQQRSDDTSEAKKTKAACTEPLPSPLQRFSSSGGLSLLAHYLPTVYPEHSGRKTTLVFSEKEKSPPLSDWVKLEPNDEIYEDLEDTLCEPAAKLATVSSVPQHSLAAFGLFLRLPAYSDVLLRDKMRAQCLLRLVLGVTGDGDGSTLKEWSINSLTNPLSVPDDIYSLSLAPSLPTLPFEVFRQLLDSVPLSTDDGVLLRRVVIEVGAMHLVLNCLGIFSHQSHNNRIGAPISEPSPSGTSSGSGTIGNGSGNGSVSGTKTNAPEEATPSATSDDKSHMYWAKGTGFGTGSTTQSWNVEQALLRQKSEEEHVTVLLLVLASYINPGDCIPSEMCGEDILAYHDVRDVTGELPPIFQTLLQQSCLIPALSSYLRNDSVLDITRHIPLYRAILKLLRALSLSKMLVSLLQPSASGSGDSTPPIVELLTSMKTCVDTYAKRLKVNKKSNIKGQTHQLTFNIDDGDDEGLALLIPDIHETSVLVQKTTDADALINMLHTNEDGSAQLEPQSKSIEQRYLELMKKRQFDTFDMIVESDNNSFRFVVSHHFEKMVRLAGDRYHPSRVKRLAQEAVTLSTSLPLSFSSSVFVRCDTDRLDIMKVLITGPADTPYANGCFEFDVFFPPDYPNQPMLINLETTGRHSVRFNPNLYNDGKVCLSVLNTWHGRPEEKWNAQTSSFLQVLVSIQSLILVPEPYFNEPGFERSRGSPSGTNSSREYNSNIYQACVRWAMLEQIRSPSQCFKDVIHKHFWLKREEICAQIEGWIEELGKPQYTERASRTISFNSMVLRRHYRHLREELSKLKPPRGLEDLDAPFNPVATLPPMDVSAVAPSLAATNTVQAQPDDAIVTDITLLGENADECEADGDAEGDGEVDDGFKGFPQEEGLLTGEEEVVEILSDTENESSMWQ

SEQ ID NO: 13540 - DNA, 4176 bp, DROSOPHILA
tgctgctgtgattatccagtagtgtgagatcaaggtgccgccgcaccaagtgctccagttcccgaaggagacgttcagaccggcctggtagggaaactgacccacctccgccggttctccattcgtaatatagggttccacatcggtaaggaggggaacagccgtacaggatcctaccagcaggacgcaaaccaaaagtttcatcattttctaggttcaaaataactgaggcagcgagactgcttcatggttatataggaacgggttaagcctgcagcttgttatctcatgataaggacctcttaaatttcgagcaccctagaccaatgggattattataccatgatcacacaacaaacaattcacttgacttgggatccacccaatgaatcactgcaaattgaaaacctacggcacgtgagatggctaatcaggtattttcaatttaagtagtgcactaaatttaaaatctagttgaacttcgattagcaaatgaggtcacgtaattacttacttattcccagtccttagttgatttgatatcagtacttacaatatacgattgatagcttcacttatatcgcctgtcaacgcgacatccatttttaagttagcaaagaaattgtaacatacttttaattgccggccacttaaaacaagctttcatttcaagttaagagtaagaacctcttcaaaaatacgctcaggtgttttgactattctttgaataaatgctgctatcggaaacccgcgattaatgaaaacatatgtactttaaattgtttcggtaatcaagtggcgttcagatgagtccaaagtgataatgcataatcaggcattacttcttatagattaaccaatttaggggccataaatccgcattcatgtggatggactgcgtcagtggtgcgaatagttgactctgaaaagcatgcaaatcagtacgattttagttttcctgcttatcttggttcagggaaggtcgatctcttgcctggatatgggtcatgggattggagggcgaatcgctggcggggagttggcccgagccaatcagtttccctatcaagtgggtctgagcatcgaggagcccaacgatatgtattgctggtgtggcgctagtttgatctccgaccgatatctgctaacggctgcacactgcgttgaaaagtgagtatttagtgaagcatttagttaatatagtactaaactgataactttatcaattcagagcggtagctatcacctactacttggggggagtgctgcgacttgcccctcggcagcttattcgatcgactaatcccgaagtgcatctgcaccctgactggaattgccaaagcttggaaaacgacattgcccttgtacgattgccagaggatgccctgctgtgtgattccatacgacccatccggttgccaggactctcatcgagccggaacagctacgattatgttccggctatcgcttccggttggggccgcatgaatgacggtaagaactgaatgataaatcaaaccgaaagtcgtacgaattaaccataatttatactaatttctttttatttaaccccacacacagaatccactgcaatatcggataacctgcgttatgtttaccgctttgtggaatccaatgaggactgtgaatactcctacgctaacataaaacctactaacatctgcatggacacaacgggagggaaatccacctgtaccggagattctggaggacctttggtctacagtgatcctgtgcagaacgcggacattctgatcggcgtcacttcctatggcaaaaagtcgggctgcaccaagggatatccatcggtttttacacgcatcaccgcctatttggactggataggtgaggtgagcggagttcactatccgtagaagtggagggggccctcgatggctaatcaaacagtgctgggcactgcaattaaattaaatgttgagcattttagttgcgactattggtttcctttcgaagtggtgggcgtaccgagaagagcacttcagaaagtggcgcagttccactccatagagtgcaaaagataacgaagctgcttcttttgcctatgataagaaagacttgcatgtggtgtagcatattttttggtgtaacttaaaaatcaaagtagattggtcaacaaaataggtcaaataagaaagaaacaatatctgaatttaatcaaaaagttgttttccactcggaaatttactattgcatacgtattgtatttccttagttgagtataaaatcattcgtcacgaagttagaatcagaactattgtatattgaaattcgagcgtcacgaaatttttcctggcgaagaggattaattagaggatatttaaagttcttagtttcttaatttagttcattatggtaatattttcgaacggagcacgggttattagcatcgatgcgtatttgctaaaatgctctttttgatgttaacccataccagaaccaatattaaaaatatttgctttcgaggcttggtttgcttcgtcactacgtggactagcatccagaatgatcttaagataccactaccgtaactgctccccatttattttatattttattaacactaaaagatctcacgtaggcttatcttctgtttttgccaatggattataaaagccccaaaaagccccaaggtcaagcaccatgttaccaaggacgacatcatcctgcacgccgactggaacagccgtacccttaggaacgacatctccttgatccgcattcctcacgtggactacagcagcgccattcataacgtcgagctgcccaagcacgagtaccactacgcctcctatgatggtgatgaggttatcgcctccggatggggacgcacttccgactcttccagcgccgtcgccgcccacctccagtacgcccacatgaaggtcatttccaacagcgaatgcaagcgcacctactactccaccatccgtgactcgaacatctgtgtctccactcctgctggcgtgtctacctgcaacggtgactccggtggtcctctggtcctggcctccgacaaggtccaggtcggtcttacctctttcggatcctctgctggctgcgagaagaactaccccgccgtcttcacccgcgtcaccagctatctggactggatcaaggagcacaccggcatctaaatttaagtttctgatttttgcattattaaaataggtgtaacggcgaacatataaatcttgtgttgttggcttatttaaaggtcttatgcaatatttggtaaattctgattagctggtaggggtgtttataaatacaacactttttttttagcaaatataaaccaaacgtatagcctctttttcagtaatttaaaaacaactagatctgaattacttaacgttaaccatttttattggtatttctttttctttgtgtggctcctggcttcatagcagaagttccagtccttgctttctataccataatttgaatttaaaatttaattttgatagacttccgatcggtcaataatcatattatcatataggcctccttttgcagagttactcttttgcaaaaacatttggaatgtgtctgtatataattaacatttatacaatatacattaattgtatttttaagggtttaagtttttagaatttttatatatattatgttgtctttttatttaatagtaaagagcgattttacgaactaacattatcattattacgaatacacatacagttatacagaatagaaaatttaatttgtttaaaaatattcatccatcagattacaaatattaacttttttattttattttaattttttcgcctttagttctttgctgtgggcacgtatagaggaatagcgcataaaaataacaattataaaaagttttctctgcatatacatacaagatatacttttgactctatagatttaatagttagtttggattcttctctcttagtttgtaaaacgttctcaactttttacaattgtcggcaatgtaataaatatatttatatataatttggactcgtttgttaggttcgtgtggttcaccatgcgcagctttattgggatccttttttctctgcttgtataaggtgtatgtgtagtgtgtgagttttggcgcctagttaaaatacatacgaaataacactaaactag

SEQ ID NO: 13541 - DNA, 1239 bp, DROSOPHILA
atgggtcatgggattggagggcgaatcgctggcggggagttggcccgagccaatcagtttccctatcaagtgggtctgagcatcgaggagcccaacgatatgtattgctggtgtggcgctagtttgatctccgaccgatatctgctaacggctgcacactgcgttgaaaaagcggtagctatcacctactacttggggggagtgctgcgacttgcccctcggcagcttattcgatcgactaatcccgaagtgcatctgcaccctgactggaattgccaaagcttggaaaacgacattgcccttgtacgattgccagaggatgccctgctgtgtgattccatacgacccatccggttgccaggactctcatcgagccggaacagctacgattatgttccggctatcgcttccggttggggccgcatgaatgacgaatccactgcaatatcggataacctgcgttatgtttaccgctttgtggaatccaatgaggactgtgaatactcctacgctaacataaaacctactaacatctgcatggacacaacgggagggaaatccacctgtaccggagattctggaggacctttggtctacagtgatcctgtgcagaacgcggacattctgatcggcgtcacttcctatggcaaaaagtcgggctgcaccaagggatatccatcggtttttacacgcatcaccgcctatttggactggatagccccaaaaagccccaaggtcaagcaccatgttaccaaggacgacatcatcctgcacgccgactggaacagccgtacccttaggaacgacatctccttgatccgcattcctcacgtggactacagcagcgccattcataacgtcgagctgcccaagcacgagtaccactacgcctcctatgatggtgatgaggttatcgcctccggatggggacgcacttccgactcttccagcgccgtcgccgcccacctccagtacgcccacatgaaggtcatttccaacagcgaatgcaagcgcacctactactccaccatccgtgactcgaacatctgtgtctccactcctgctggcgtgtctacctgcaacggtgactccggtggtcctctggtcctggcctccgacaaggtccaggtcggtcttacctctttcggatcctctgctggctgcgagaagaactaccccgccgtcttcacccgcgtcaccagctatctggactggatcaaggagcacaccggcatctaa

SEQ ID NO: 13542 - protein, 412 aa, DROSOPHILA
MGHGIGGRIAGGELARANQFPYQVGLSIEEPNDMYCWCGASLISDRYLLTAAHCVEKAVAITYYLGGVLRLAPRQLIRSTNPEVHLHPDWNCQSLENDIALVRLPEDALLCDSIRPIRLPGLSSSRNSYDYVPAIASGWGRMNDESTAISDNLRYVYRFVESNEDCEYSYANIKPTNICMDTTGGKSTCTGDSGGPLVYSDPVQNADILIGVTSYGKKSGCTKGYPSVFTRITAYLDWIAPKSPKVKHHVTKDDIILHADWNSRTLRNDISLIRIPHVDYSSAIHNVELPKHEYHYASYDGDEVIASGWGRTSDSSSAVAAHLQYAHMKVISNSECKRTYYSTIRDSNICVSTPAGVSTCNGDSGGPLVLASDKVQVGLTSFGSSAGCEKNYPAVFTRVTSYLDWIKEHTGI

SEQ ID NO: 13543 - DNA, 3519 bp, DROSOPHILA
acacttttttcttcaaagagctacatcacttgttatttaccccctacactcatcgaagcttgctatatttccatttttatgcgatttgcacccttgtctggatttgctcagctttaggctatcgaaaacgcaagtggataactccctccgctccttttagccccgccaaacaacctgattatatagccaaccgttcacagctcctgagcagttattacgttttacttattgcatttttcagctctttgcattttcgctcaagcttgcaaaacgatacacgagcgggaatggaaatggaatagaaataggatgggatgggatgggtcgggttgggttggtaacgaggattcaaggagccccagcatgtggctcacatgacatctggccaagggggtgatcactgctgttgccgagagggggtaggtggggggtccaccaaggacgaactcctgcggagctaagctcactgcacttggccattgtttgtttgtttttacaactctgattgaggtgaaattgcatatttctgtgcgcttctttcatttcattttatttctccgtctgcagctcctcctcactatttctgtaatattttcaaacgttttattgaatgtcgcttaccgacagcactgtttgccattcctggcttttccttttgccaggtacccatttttagattcatctccacatttcctcgttccatgcacctattttaccagtgttttccccgcctgcattggctttgtgtttattgtgcgaataaatgtcaacaatggagaaatgtacgtggattgccgaccgatttagaatctccaccttctcgatcggaattcttttggcgagtttataaagattgccaagcactttaatccaaaaaataaatatcaaataatcacatatcattcaatttgtaatagggtgaaacgtctgagaactcagaatccagtgggcctagacaaattgttccaaacactttatgtcgagaaggtctaatcgtactcataaatatacaggtactggtctgaaacatttattacaaaaaattcaaaaaacaaaaatatagcgaagaaggataaagaccatgtacaacaatattaagggcctacacataaatgaataccagagggagaatggagataataccagaaagctggcgtgtgaaggtacagtgaagctaaacgccaatgcccaagaatttgtgccacgttacaagagggaacaaccagcaaaagatgatgctatagttggtaacagtaacatgagcaacaccaataacgacgaccaaaaaccaaaatctaaccttatgttgccgtggaaaggatttccgaataaatctcaaaaacgtaaagttctgcaaatagaggtcgcaagaacattgcttatatattttatctcctgtttcagcttctcgcaatgtggactacatagttctaccgagcaccaaaagatttaaaaagcccattggccaacaactcgtggaaaatgtttccactacgccctcaaaagtccatttaaatgatcctgttccagctggaaatcgcattgatcacgaggaaaggcgccgcgaacacgatagaaaaatcgctgtggaagccttaaagttggccgaacagcgtagaatgagggatcctgtcattgcccccacggagggcaatgaaaactcaaagaacgtgccgccaattataaatatctcacgatctccaataaagttcacgccaaatgaaaggatcagagtggaccgtttaagggcagcgaagagagagcgtatcgagcgtatccttcgcgaaatgacaaacagcaagcagtcgcaagtgaagaaagagcagctcaaggaggagaagatttgttttgataatgcacccaatgaatctaataagcctaatgaacctgctaaacctatgcctcagcatccggagaagacaaatgaagtgcccatagttaccaaaaagaggtacataccaaccaccaaggaatgggacgagcgatgtcgtgccaaacatttggctaagatggaagctgaaaagaaaaatcagatgggtgttcaggatgcgaacccttcgcaatctgctgtgccaccaaaaccattggtgacctccaatgtggtgaacatatctccgtcgggagttattcgtctgtgcgatcgctttagtccacctgctaaacaatgcgatacggagaagcgcaggggaaatctcacacacttccgaccccttcaaaactggacaatccgtcgaaatccgccggtaccattgaacaacctgtgcaataaaaatggaaagatcgtgcagcgctatagcatcgaccaactgctggttttggagcctcaacctgaagaactgaaagtgcctcaattggataaggccctgttaggcttgggatttctgtacgattcatttgagggctctccataaatgtattcgaatttaatctgaacttattgattaaaaaacattttatcattttccaatcacttcccttgaatgtctgaaataaagaaaagactgcaatgcgtatttcaagtttgcaaagctaacttttggtaaaatctgtaagatttctacttttattactgatggctattactgcacaaacgcgttggcatttttcagccttttgcactttgaccgtcgtaattgagaactgaaatttgccatgttattggtgttgctgtcaactgcaacggtcaggtgcaataattttaatgccattattctgcttattattatcttgcctactgtgcgcagctcgctgcctgtgcgcatatattaaatttcactgaaaatttgttttaatttcattaaacgggagagggagcaatttacacatcagtaaagagtccgccggtgcactgaaataaattttccaggacgaatcccctgcgggctcatgtaaccgaggccgaagcgcaaaaatattgacatgtggctatggcaacgattgctgctgggttttcgcggggggggggggaggtcgtaggtcatgggaatggccgcgaaatggggtgatgcgtaaaggagggcgagggggtccagtggcagtatcatataacgcacagacattgcccttgtcatttttgcagttgttgtggctcggccagcactgcgcaaataaagcggaaaattgtgttttttttcccgacttgttttctgcgtgttcgaaataaaaaaacaatgagtaaaacacaaaaagtagaaccaatcaaatgcatttcactggtcgtgcgtgcgtctgtgcatgtgttaaaatgacctttggcttttattgtcgcccgctttttgctgcacttaacttcctccaactcgcaccaattctttgacctttctggttcccccactcacttagtttgtcggcttggattcccttgctctcaatatattgttttattcacagtggatgttagtgacaattccatattggatatatcaaatatttaaaaaaaagctatattttgaaaggttaaccaaatgacagtggattaccataatatatcatggcctcctgaaaagttccgtgtataaa

SEQ ID NO: 13544 - DNA, 1458 bp, DROSOPHILA
cataaatatacaggtactggtctgaaacatttattacaaaaaattcaaaaaacaaaaatatagcgaagaaggataaagaccatgtacaacaatattaagggcctacacataaatgaataccagagggagaatggagataataccagaaagctggcgtgtgaaggtacagtgaagctaaacgccaatgcccaagaatttgtgccacgttacaagagggaacaaccagcaaaagatgatgctatagttggtaacagtaacatgagcaacaccaataacgacgaccaaaaaccaaaatctaaccttatgttgccgtggaaaggatttccgaataaatctcaaaaaccttctcgcaatgtggactacatagttctaccgagcaccaaaagatttaaaaagcccattggccaacaactcgtggaaaatgtttccactacgccctcaaaagtccatttaaatgatcctgttccagctggaaatcgcattgatcacgaggaaaggcgccgcgaacacgatagaaaaatcgctgtggaagccttaaagttggccgaacagcgtagaatgagggatcctgtcattgcccccacggagggcaatgaaaactcaaagaacgtgccgccaattataaatatctcacgatctccaataaagttcacgccaaatgaaaggatcagagtggaccgtttaagggcagcgaagagagagcgtatcgagcgtatccttcgcgaaatgacaaacagcaagcagtcgcaagtgaagaaagagcagctcaaggaggagaagatttgttttgataatgcacccaatgaatctaataagcctaatgaacctgctaaacctatgcctcagcatccggagaagacaaatgaagtgcccatagttaccaaaaagaggtacataccaaccaccaaggaatgggacgagcgatgtcgtgccaaacatttggctaagatggaagctgaaaagaaaaatcagatgggtgttcaggatgcgaacccttcgcaatctgctgtgccaccaaaaccattggtgacctccaatgtggtgaacatatctccgtcgggagttattcgtctgtgcgatcgctttagtccacctgctaaacaatgcgatacggagaagcgcaggggaaatctcacacacttccgaccccttcaaaactggacaatccgtcgaaatccgccggtaccattgaacaacctgtgcaataaaaatggaaagatcgtgcagcgctatagcatcgaccaactgctggttttggagcctcaacctgaagaactgaaagtgcctcaattggataaggccctgttaggcttgggatttctgtacgattcatttgagggctctccataaatgtattcgaatttaatctgaacttattgattaaaaaacattttatcattttccaatcacttcccttgaatgtctgaaataaagaaaagactgcaatgcgtatttcaa

SEQ ID NO: 13545 - protein, 422 aa, DROSOPHILA
MYNNIKGLHINEYQRENGDNTRKLACEGTVKLNANAQEFVPRYKREQPAKDDAIVGNSNMSNTNNDDQKPKSNLMLPWKGFPNKSQKPSRNVDYIVLPSTKRFKKPIGQQLVENVSTTPSKVHLNDPVPAGNRIDHEERRREHDRKIAVEALKLAEQRRMRDPVIAPTEGNENSKNVPPIINISRSPIKFTPNERIRVDRLRAAKRERIERILREMTNSKQSQVKKEQLKEEKICFDNAPNESNKPNEPAKPMPQHPEKTNEVPIVTKKRYIPTTKEWDERCRAKHLAKMEAEKKNQMGVQDANPSQSAVPPKPLVTSNVVNISPSGVIRLCDRFSPPAKQCDTEKRRGNLTHFRPLQNWTIRRNPPVPLNNLCNKNGKIVQRYSIDQLLVLEPQPEELKVPQLDKALLGLGFLYDSFEGSP

SEQ ID NO: 13546 - DNA, 2859 bp, DROSOPHILA
cttcttcttcttcttcttcttccgctgggctctctgccttttttcgcttttcgttttgttatttctcgctttggcgcacataaatttgaacgttaatgatttttgcttgcagtttgcgcgcatgcgaccctaaaacaacaagaacaacaactacaacaacggcagctgaccgtcaagtgttgaaaatgagcttgttgttgttgccgctgcggcggctgcagtagttgttgttgttgttgttgctgcagcagcaggtgtcgccatctcactttttagcacagactcaaaccacgagcaaccaaccaacattggtgacacttttttccccatttttcccactgactgtagtggtgcccccatctcacatacacacatatgcgcatttttattaaacaaacacgaagaagacgaaacgaactccatatttttcatttgtacgcgcctgtcgcgccatcccgctcgcaccgacttcgcgattgtctccacaaaactccacaactcgctggccgtaattttaattcgaatcaatttgtttgtcgccgccgctgcactgagttcagccttttgcccagtgggccgccgatccgctccactgtgcacgctacgccacatttcgcttgctacgttccactgtgcggccaggattgtcgccttttttttcggtgtgtgtgtgttttagtgccttgtgaattgagtcccaacaaaaaaaaaaaaaaatcgaagttaaccaaaagagcctgctgattaaagcgaagttagcgctaacccgaagtaaacactatcctgcagttaacgtaaggctaaccaagagctatgagggaatatcagaaagaaagcaagaaacaatcgagtcagtgttgaattgagttatcgaaatcattgagctagtgaggtgacaatattaaaggaaaatgaactagtttaatttgcagtgtcagcaaaagcattgaattgtgtgtgttcattgcaaacgagttaatcgcataaattgggagctaatcaaaagctaagacgaaaatggatcagctaatacaacagctgcaacaggcagctgctgctcggggacaagtccaacatccccatggttcatccgctttgcaactttacgcggcagcagcggctgtcaacatgcaagtgagcggctggtcatccgttctcaacttgtccatggatgccccaaatccggaaattagtcccaattccgtaaccaattcgtcctccgtgtatatgatccgccaaatggcgctgatacagcaagccagagtggccgccgcagcagtggcaatgcagcagcagcagcaacagcaaagggatctcaatcgggagcttggcatggatccgcacagtgagcagcgtattaagttggactcagtgtcacccacgcacaacatccacgcggagcccagcgcagcaagcggatgaagaaagccatcgatcggcaggcgaagaagctacaggacaagggattggaagtggactatgcccgtctggaggccgagtacctagctgcccaccaggagaacggagtggatgagaataactggctggatgatgatggctacgatgatctgcacatcgatgtggtgggcgttgaaccggagtacgtgaccggcgacagtttggatcactcgttctgctcctccaggacgtaccagacgaagagcaccagcagcgaactggattccaatgatatgggactccagggaagagtggaaactccgccaccaccacagccaccgatgcagaataagaccctctacaattcgcccttcagcatcgaatccctgttgggatcgtaacgaatatcgaatgttgtactataattctactatgatttcgggtggttagctaagcattaagtgcgaatataatctgttaacccaaactttccgcctccatctgtctggcacttttctttggggtcaagagtgtgccagtggtatgatgatgatttgggtacggttaggagtacgcatgccaaaatgcgagtgctttttaatttccagccaacaccccgaaggctctcgtggggtaaaatataaaaaaaaaaaaaaccagggagagaaaagcagcttcaggaggcggaggcagtgcatccatcaagttcacacgcagctcgcacggtggaaacaaatcggtgagctcagcggcaaaaaaaaaaaagttcgatattccgataacaaaaatcgataaagtcattcacgtaacactttaatcgactttcgcttaactttcgggtttaatggcttcgttttgattgaattcgtcatcggtctgggtttatagttactgtttgaattgcaaatggtgattgatcacttagcgctggcattatgtgcccatagtacccatcatcagcatccgttggaatcccagagtcgcagttttcgacctcggggcaatttcagaaatgcaactcgcgaccgctggagcagagacagcgcagaaagagacggctgcaaggacagcgtatgtgtaatacacacatcaggcaaataaattagaaggcaactccttcggcagaagcgtcagccaggccgcgccccccgttcgcactcggatcgtacaaaatggagccgtaacccaaaagccatcccgacgtccaggtccaaaaccctggtgagtggggatgcagagtggcgagtaatgcagacaatccgtcatgcaggtgtgaatgattcattaatttctcgccttcatacgaattttcatttcagttaacatgcaagcggaaccgaaacgagactcaaagagttacgcacactgtgagaaaaacagcaatgtgcattaagcacgaaaatggttattatcacttttgttacaactcaatatgatgatcacaagatttgattttcaata

SEQ ID NO: 13547 - DNA, 1226 bp, DROSOPHILA
caaaagctaagacgaaaatggatcagctaatacaacagctgcaacaggcagctgctgctcggggacaagtccaacatccccatggttcatccgctttgcaactttacgcggcagcagcggctgtcaacatgcaagtgagcggctggtcatccgttctcaacttgtccatggatgccccaaatccggaaattagtcccaattccgtaaccaattcgtcctccgtgtatatgatccgccaaatggcgctgatacagcaagccagagtggccgccgcagcagtggcaatgcagcagcagcagcaacagcaaagggatctcaatcgggagcttggcatggatccgcacagtgagcagcgtattaagttggactcagtgtcacccacgcacaacatccacgcgggctctagtcgcgggatcaaacaagatccgctaagcgatgaaggggccgattccaatctggggcagaatgattgtacagagtcctcgaagaagcgacgcggcaggaccaacttcaactcctggcagctgagggagctggagagagtcttccagggaagtcactatcctgacattttcatgcgtgaggccttggccaccaaactcgatctaatggagggtcgtatagcggtttggttccagaatcgtcgtgccaaatggcgtaagcaggagcataccaagaagggtcctggacgaccagctcataatgcccacccccagagctgcagtggtgaccccattccattgagcgaacttcgggccagagaactagcccagcgcagcaagcggatgaagaaagccatcgatcggcaggcgaagaagctacaggacaagggattggaagtggactatgcccgtctggaggccgagtacctagctgcccaccaggagaacggagtggatgagaataactggctggatgatgatggctacgatgatctgcacatcgatgtggtgggcgttgaaccggagtacgtgaccggcgacagtttggatcactcgttctgctcctccaggacgtaccagacgaagagcaccagcagcgaactggattccaatgatatgggactccagggaagagtggaaactccgccaccaccacagccaccgatgcagaataagaccctctacaattcgcccttcagcatcgaatccctgttgggatcgtaacgaatatcgaatgttgtactataattctactatgatttcgggtggttagctaagcattaa

SEQ ID NO: 13548 - protein, 345 aa, DROSOPHILA
MQVSGWSSVLNLSMDAPNPEISPNSVTNSSSVYMIRQMALIQQARVAAAAVAMQQQQQQQRDLNRELGMDPHSEQRIKLDSVSPTHNIHAGSSRGIKQDPLSDEGADSNLGQNDCTESSKKRRGRTNFNSWQLRELERVFQGSHYPDIFMREALATKLDLMEGRIAVWFQNRRAKWRKQEHTKKGPGRPAHNAHPQSCSGDPIPLSELRARELAQRSKRMKKAIDRQAKKLQDKGLEVDYARLEAEYLAAHQENGVDENNWLDDDGYDDLHIDVVGVEPEYVTGDSLDHSFCSSRTYQTKSTSSELDSNDMGLQGRVETPPPPQPPMQNKTLYNSPFSIESLLGS

SEQ ID NO: 13549 - DNA, 2924 bp, DROSOPHILA
acttgattttttgggacttcttggtcggttccgtctttgtgttggaagaattcgcagttacttcatcttctccatcatcagtgaacttgattttctgaggtttattggcgaagtccgacttttgaccattatgtttatggttgtttttgttgaaaggtttttgatgcactgcttctctatcctctccaaatttgattttctgtggttttggtccatttttatgattttggttgaacgacttggaagctacttgttctccatcatcgccgaactttattctctgtggtttgttggcaaaatccggcttttggtggttcttattaaaggacttagcacctttcgcttttccatcctctccaaacttaattttctgcggctttttcacctgttccttcccttcaaattttggcctttgtgggtgctcctttttgttttgtttaactaccgcctcgccggagtcgtcgaacacgattttcttgtttttgggcggtccaccgaattgcacacctgtggccactgctgccggcatgattttatattttctaaagctatatattagataaaaatcattaaataaaataaacggcgttagaaacaactcgcacgtgtattcaaatatgacattcaccgcgaaacgtaagcaacatatgtatgtcgtctacttagtgacgaatttcattgtctttatgatattaaaattttgtatttaaaatcttaaataagagagtatccaacttagttttaaaatttataaattattcagtaattaccattgaaatgaccgtgacttttgatagcaggtgggtttgaagttatataaagcttgaagttattataatctgattataagtaagaataaaattgaaattcttatatagaattactattaatttataaattattacattaacttatgtttaagtaactgaagttgtgctatattttcttttaccgttacaccatttttccacaatacatttacggtcttactgccttgacgcgcttgggatttgttaggacgtttatcgcatagtcctcgtgttcggtctcgtattttgaaagaaaatcgcagattatcgccaatttgaagcgattatcccggtctagatttcgaaggggtccttttggatagcgaacattgcaatgagcaccgaatcggcgaagccggcactcagccaggaggccattgtggcccagttccaacagctgcgcaatgagcagcgcaatttggtcaacagtttaaatacgctcgaaatggatttgagggaacacaagtgagtcaccgggggcccaaagatggatgacacgtctgtttgtgattttgggcaagtgggagaatccctgcagacacaatgacataactccttatcctccctagaactgtgatagaaactctggaggcggcggatcccgaacggaaatgctttcgtcaaattggtggtgtgctgtgcgaaaggaccgtgaaggaggtgctgccacagctggtggagaacaaggatttcatcgccaagaccatccaaatggtcaccaatgacctgagcaaaaagggcagtgagctgaacaagttcaaggaggagcacaatatcaagattcgcggcgaacacttggttgccgaaggagccaagggcgacgatgcggaggacaaggcggagaaccgtaatgtcctggtgttcaactgagagcgattgattacctcaccacaccgtatttattgtgtctatgttgagagggaactctgccaggatttgcgagcgataatccgcgtttattgaacacttctaatgttgtatgtacttctagctgtaaggcgcagttcgcgaaacgcctccaatcgcaccttcacaccaacactatccatcaattcccctcatttaaacttaacccactctggccacgaattaaagataccttaaacttccgattgaaattagtcatgtgtcttgtgattcattcaagatctgaaaatggatggacctctatccaccgactggaaacaaaaactatataaactatatgattatttatcccttttatgccatttgttctgaaacattttattggtatgttagtcaaattagtttcctataaggaagtgatttcatctacatttttacacttatgtattcttgcttcataagtcttttaatttaatatttgtggctaaatcaagtaagcagtagtttattttccattccccgtatcgtggttaatccggttagtcgggtattcgacttattcgacttctgtaactatcccattttgcggctcctccctctggaagtccctttttccgccggatttgcttagcaggcggacatttgtgatgcagatatcgtgagaaacagccttgcacatgtcgtacacagttaaagcggccactgaaactgcagttagtgcctccatctcgactccagtttggcccgagcagcgaacggttgcctccagccgcacagattgttcggttttcagaagagtggcctgcactttcacggaggacaagctgatgttgtgacacaggggtatcagttcggcggttcgcttagcgcccattatgccagcaatttgggctacggttagaacatctcccttggccacttgattgtcggctataagttgggtaagtttctcacccacctgaacggtggcctctgcacgagctaatcttgtggtcgaaggttttgcgcccacatccaccatttgggccttgccctggccatcgacatgggtgagttggctgtaatttcgggcctgaagctgcagccttgaagtatgatatgcgtggtgatacgaataaggatgaagatgatgatggagtcttggcgcagcatctgcaacgggagaggggagagagtgtggtgtgtctactagccgccaatgagtatcatgggccggttctccatctgcgacaggttcagcatgcctgc

SEQ ID NO: 13550 - DNA, 820 bp, DROSOPHILA
cgcttgggatttgttaggacgtttatcgcatagtcctcgtgttcggtctcgtattttgaaagaaaatcgcagattatcgccaatttgaagcgattatcccggtctagatttcgaaggggtccttttggatagcgaacattgcaatgagcaccgaatcggcgaagccggcactcagccaggaggccattgtggcccagttccaacagctgcgcaatgagcagcgcaatttggtcaacagtttaaatacgctcgaaatggatttgagggaacacaaaactgtgatagaaactctggaggcggcggatcccgaacggaaatgctttcgtcaaattggtggtgtgctgtgcgaaaggaccgtgaaggaggtgctgccacagctggtggagaacaaggatttcatcgccaagaccatccaaatggtcaccaatgacctgagcaaaaagggcagtgagctgaacaagttcaaggaggagcacaatatcaagattcgcggcgaacacttggttgccgaaggagccaagggcgacgatgcggaggacaaggcggagaaccgtaatgtcctggtgttcaactgagagcgattgattacctcaccacaccgtatttattgtgtctatgttgagagggaactctgccaggatttgcgagcgataatccgcgtttattgaacacttctaatgttgtatgtacttctagctgtaaggcgcagttcgcgaaacgcctccaatcgcaccttcacaccaacactatccatcaattcccctcatttaaacttaacccactctggccacgaattaaagataccttaaacttccgattg

SEQ ID NO: 13551 - protein, 143 aa, DROSOPHILA
MSTESAKPALSQEAIVAQFQQLRNEQRNLVNSLNTLEMDLREHKTVIETLEAADPERKCFRQIGGVLCERTVKEVLPQLVENKDFIAKTIQMVTNDLSKKGSELNKFKEEHNIKIRGEHLVAEGAKGDDAEDKAENRNVLVFN

SEQ ID NO: 13552 - DNA, 4146 bp, DROSOPHILA
ctcggcatgacaaaggtgagttcaagatcggaattgtgctagacaataagctcagaatgtgttgtttcattcatgcataccgtgtggattttagcagcaagtaagtaagcccatctggaactgccccaaacctaatgaatatgtgtgctctatatagataaatttgattacaaaacgctccgttgaaaactatgccgccatggaggagggccaagaggctcactgggaagttgtgcaacgcattttgttcatctatgccaaactaaatcccggccagggatatgtccagggcatgaacgaaatcgtgggacccatttactatgttatggcctccgatcctgacctcacatatcgcgcccacgctgaggctgattgtttcttttgttttaccgccctgatgagcgagataagagacttttttattaaaacactagacgacgcagaaggcggcatcaagttcatgatggccaggctatcgaatatgctgaaatcaaaggacctaagcatttacgagctactcaggagccaagagctgcatccgcagtattacagcttcaggtggctcacactgctcctgtcgcaggagtttccactgccagatgtactgcgcatttgggattccgtgtttgcggacgaacagcgatttgattttctgataaaaatatgctgttcaatgatattgtaagtaaacttagctttagtataaagcaagaactaatatgaaattttgcagaatccaaagggaagcaattttggaaaacgactttgcctcgaatgtgaaactcttgcaaaactatccgccaattgacattaatgttgtgattgctcatgccggatcattggcgtagcattcctccagaaatatatccttgtgcccaaatgcttgcaaagccccctagttagtttaacaactgaaagaaccaagcaatcaactatactttagttagccccaatcttggaaacgcacccttacaggaagtccaataagtacacgcattttcacttttttacatgacttataatttgtatgtcattaataaacgaattaattttaacatttcgtggtcccaattagataaacgtcagaacgttaaagaagtcataggttggtcagtcgttaaaagaataccgatgaacgtgtggcatcgtctcattaaacttaaacaccgttcgaaggttcacttgttaagctttggagctgtgtccttgcatatggactgtgcaataaactcgatgagtgtccttgttggacgtccggccatgccctctcgcagatactcgaactcatcaccacgtgtgatcatcacgttggtggcatcctggattaaatcacaaatcaaatcaaagtcctacaactaataaaaacaaaacttacaatatgcatccattggccgcaaggcacaaattcacgaaggaaagcggcagctttgcaaggacgtccaccacgaccgataccgtagttctggacatcactgcgtccaccggcacgcaccgccttgctgtagtagttccacagggggaaacgccacacgcggtctccagtgtgcatgctggcgtgcttgatctgctgccaaaggatctcagagttggtaaacaccccacaggcagcctcatccaacgcttggcgcatatatcccgagcaggtgccaatgtcaatgatgcacttcggacagaagttctgcccgtacagaagggcatccgccagcactagaacatcttcgtggtcggtgcactgcacctcaatggtcttgccattcatggatttcaccatgtctccaggacggaaggaattgcatccaataacgttctcgcacaggggtattagtccacgaatattgacctaacggtaatatatggttatccaaggaataacatcgggtcatccagtcacttaccggtaacctcaggccagcgacagcacgacaagtggccaccactacggccgcaccagtcatatctccgcgcatgtggaaaagttcctgcttctcctttaagcacaaaccacctgcatcgtaagtcactccctgcccaaccaagacgatgggtcgctcctcggcacaggtgccgtagtagctcagctccagaaagattggtggttcgcaagaggcctttcccaccgccaagaaggcgtgcatcgactggctctcagcccaaccctcgactttgacctctacattgacgccggacttacaaagcacttcgacgacattctgggcaaaggcagtgggggtcaaaaggttggagggcatctcctgcaactggcgggtcaggttctgcgcggcagccttttgcaggccgatacgccatccttctatgtcgcaaatctcatccttagtggcatacagatcgatggaaggcactgagattcgccgcttgggatcgcgaagctcctggtagatccagatcccgagagctgctccctccgcggcagattcggcgtgtccacagttctctacttcgatgcggtcggtgtccagttcagcgagtattcggcaggcatccgctaccgaccgtcggatggcctccttctgctcgtcgagcacctcgtatgggttatagcccaggcattccttacccaaaccgataactgccaccgccgaatagtagggcacgcgctccggctccacggcgaacaggaggcgggtctctccccttttgggcatgggtccggacattcgcagcacttctagcaaccgaccgtgcgtcttctgcacattgtacttccagccggttggcgtcaggatgccagcgtcgttcttgtcctcctcgtcggcgtagactccaacgaccaagccacgcgacggaggatccgcgcagatctccatctgctgcagctgcagcatctggttgatcgcctgcgaggcgtacctgcgatgacggatcacctccggccgacgaatggagagactacacgcccgggttatggcattgcgagaaaaccgaaacattttgcttgaagtttaacttaaaactttgatgaatgctgaataatattactactagtattgaaaactttctcttcgattttctgtgccgcttcaaaataattcatgaaattttttcacccagactagctaaaagtgtgtacgtgttcaacctcgaaacgaataaaaataagactgagctagtcctatgtttcagttccgacgtagcactgacattagtctcgataaggttgctagatcatcaggattttaatgtaaaatctctgcctgctaagtgcgaattttttagagaatatgttcttaagatgaaatgctccaaatgtcaattgtgttgcgatttgcaacatgcttttgcacaaaatagcaatcgaaggttaatgttcttgcaactgtctaatgcactcaataaaagtcataaaatcgctagataccattactacgcataccacagattcgattttcattacaatgtacattttcctgtataagttacttcaactacataaattccccaaaggcgatatccatgaaatatctaaatatattgtataggcttattgaaaagccaatatgcataggcttgtatcccaataagtactcatgccatttctaagaaccattatatttgcaaatatcattaagaaccatttacaaaaaaatttcgatttgagtgcatcttaaggttttttttttattaatttgcttaatatgtttatgtttacttaaaacgaacaaacattttttccctgggaacaatgtcgttggaaatttttaggggacgctgacgaactgactaaagacatccatcctgcacagacttcaaaatatttcaccaaaatatggacatagtgatagcgctgtcactgccgttgggatttcgcatcttcggtcagctgctcatggcccgatctctgcacttcgtcctacttgcccatcttgggagcggtgtctttgcagatcgtctgtgcaatgaattcgataagagtacgagtgggtcggccagccattccgcgtcgcaggtactcgaagtcaataccgttggtgaccatcacattggtggcatcctaggcgaataaaagtattagttgaatataatttaagccatgctaagcaaagtgcaacttacaatatgcatccattggccgcaaggcacaaattcacgaaggaaggcggcagccttgcaagggcgtccaccacgacc

SEQ ID NO: 13553 - DNA, 2035 bp, DROSOPHILA
cggaactgaaacataggactagctcagtcttatttttattcgtttcgaggttgaacacgtacacacttttagctagtctgggtgaaaaaatttcatgaattattttgaagcggcacagaaaatcgaagagaaagttttcaatactagtagtaatattattcagcattcatcaaagttttaagttaaacttcaagcaaaatgtttcggttttctcgcaatgccataacccgggcgtgtagtctctccattcgtcggccggaggtgatccgtcatcgcaggtacgcctcgcaggcgatcaaccagatgctgcagctgcagcagatggagatctgcgcggatcctccgtcgcgtggcttggtcgttggagtctacgccgacgaggaggacaagaacgacgctggcatcctgacgccaaccggctggaagtacaatgtgcagaagacgcacggtcggttgctagaagtgctgcgaatgtccggacccatgcccaaaaggggagagacccgcctcctgttcgccgtggagccggagcgcgtgccctactattcggcggtggcagttatcggtttgggtaaggaatgcctgggctataacccatacgaggtgctcgacgagcagaaggaggccatccgacggtcggtagcggatgcctgccgaatactcgctgaactggacaccgaccgcatcgaagtagagaactgtggacacgccgaatctgccgcggagggagcagctctcgggatctggatctaccaggagcttcgcgatcccaagcggcgaatctcagtgccttccatcgatctgtatgccactaaggatgagatttgcgacatagaaggatggcgtatcggcctgcaaaaggctgccgcgcagaacctgacccgccagttgcaggagatgccctccaaccttttgacccccactgcctttgcccagaatgtcgtcgaagtgctttgtaagtccggcgtcaatgtagaggtcaaagtcgagggttgggctgagagccagtcgatgcacgccttcttggcggtgggaaaggcctcttgcgaaccaccaatctttctggagctgagctactacggcacctgtgccgaggagcgacccatcgtcttggttgggcagggagtgacttacgatgcaggtggtttgtgcttaaaggagaagcaggaacttttccacatgcgcggagatatgactggtgcggccgtagtggtggccacttgtcgtgctgtcgctggcctgaggttaccggtcaatattcgtggactaatacccctgtgcgagaacgttattggatgcaattccttccgtcctggagacatggtgaaatccatgaatggcaagaccattgaggtgcagtgcaccgaccacgaagatgttctagtgctggcggatgcccttctgtacgggcagaacttctgtccgaagtgcatcattgacattggcacctgctcgggatatatgcgccaagcgttggatgaggctgcctgtggggtgtttaccaactctgagatcctttggcagcagatcaagcacgccagcatgcacactggagaccgcgtgtggcgtttccccctgtggaactactacagcaaggcggtgcgtgccggtggacgcagtgatgtccagaactacggtatcggtcgtggtggacgtccttgcaaagctgccgctttccttcgtgaatttgtgccttgcggccaatggatgcatattgatgccaccaacgtgatgatcacacgtggtgatgagttcgagtatctgcgagagggcatggccggacgtccaacaaggacactcatcgagtttattgcacagtccatatgcaaggacacagctccaaagcttaacaagtgaaccttcgaacggtgtttaagtttaatgagacgatgccacacgttcatcggtattcttttaacgactgaccaacctatgacttctttaacgttctgacgtttatctaattgggaccacgaaatgttaaaattaattcgtttattaatgacatacaaattataagtcatgtaaaaaagtg

SEQ ID NO: 13554 - protein, 552 aa, DROSOPHILA
MFRFSRNAITRACSLSIRRPEVIRHRRYASQAINQMLQLQQMEICADPPSRGLVVGVYADEEDKNDAGILTPTGWKYNVQKTHGRLLEVLRMSGPMPKRGETRLLFAVEPERVPYYSAVAVIGLGKECLGYNPYEVLDEQKEAIRRSVADACRILAELDTDRIEVENCGHAESAAEGAALGIWIYQELRDPKRRISVPSIDLYATKDEICDIEGWRIGLQKAAAQNLTRQLQEMPSNLLTPTAFAQNVVEVLCKSGVNVEVKVEGWAESQSMHAFLAVGKASCEPPIFLELSYYGTCAEERPIVLVGQGVTYDAGGLCLKEKQELFHMRGDMTGAAVVVATCRAVAGLRLPVNIRGLIPLCENVIGCNSFRPGDMVKSMNGKTIEVQCTDHEDVLVLADALLYGQNFCPKCIIDIGTCSGYMRQALDEAACGVFTNSEILWQQIKHASMHTGDRVWRFPLWNYYSKAVRAGGRSDVQNYGIGRGGRPCKAAAFLREFVPCGQWMHIDATNVMITRGDEFEYLREGMAGRPTRTLIEFIAQSICKDTAPKLNK

SEQ ID NO: 13555 - DNA, 4954 bp, DROSOPHILA
tgtgttgttgttgtttgtttcttttagagaagcttctgcaatgaaagaatgacggaaggagagagggtgaatatgtgcaaagcggaagtgcaaattaagcgataaatgacacgaagaagaagaagaggaggctgccataaggtaacaagagggggaagggtgtacagaagcgaaggaaagaaaagcgaacagacaacaaagacagcaaacaaagtgaacaacggtacttgtgctagatgccatctctgtctgccgccctgcccccgtgcaagcgtgtttctagtgtgtgtgttgtgtgaatgaggtgtgggtgatagagcacaaaagccaaacattttcttgataattagccaggcgcgaagccatgtctttgtagaccatttatggttagcataaagtttcgcccaagttttccacttacgtttacacacgcacaaacacgggccactatattttcgcccgatttatgtatatattttgcggtggtatgcgtgtgggctcgcctttatccactatttgcggaaaatcatcacgtacttctatcacacggcaaattctacactgctcactattcaagcgattatcactttgaccgcttcggcggcgcacatgccttaatcgccgatatcggtcggctataggtgcctgtatatatgtcgcacgcgcagtattaaataaaatttaaacaccggacgggaaaaatgcacaaaacggcgacaaaatcgagaacaaaactgccagagtgaccgtgtacgcgcactgagaacataccacagcacccagaagccttaacagttaagggaagcacttgttaaattcataaaatggctcgcaggcttttattgaaccaaatatttatcaaaataaggtgaagtttccgtaaagcatgaaatttgtagttattataaatatgtatattattataaatttattaagtaaactaatttgccacgcagctagtttgggtattgttcggtattatctgaacaccaacgaacggccacacgcaagcagtgaaaatcccaatgaaacgagaaatccaataagttttagcgtcaatgtgttgcaacggttggtgcatttattgattaaaagagacaaaataccgaaccccttgaccgcagagccaaataattcaaaaacacccgactttaagccacaaaacactagaatcaacggcggtgcagcagcaggaagaagaggaagagaggtgcgtggtgcgtagttagttagtggcgaaattgcgtattagaaacgaaaacaacaagcagctctgcgcgggccagcaaacatttcgaacaaccattagccagggcagaacaagccgatccaacgtgttgtcgcattcgcaaagggagtatcgaaaactgattacatgggtccgacggatcaagactggatcggctgtgcagtgtctatagcctgcgacgaggtcctgggcgtcttccagggcctgatcaagcagatttctgccgaggagatcaccattgtgagggctttccgcaatggcgtgccgctgcgaaagcagaacgccgaggtggtcctcaagtgcacggacattcgcagcatcgatctcatcgagcccgcaaagcaagatctggatgggcacacggcgccgccgccagtggtcaacaagcccacgcccgtcaagctgccccacttctccaacatcctgggcaagcagcagcagctccaactccagcagcagcagcagcagctacaactccagcagcaacagaaacagcagttccaggagcaggaacgagaacaggatctgccatcgacgccgcggtcaagggccaacgacaatggacgggtagcggctggcggagcatcgagttcttcgggcccacgtggcaacttcaattcggcgctaagcgataagatgcatcagctgaagctaatcgagaccaacggctcaaatggcacccttaggtaatatggcccattaaacgattgtgcaatgccaataatttaaattaattgttagctctttataaaaaaaaaaagtatgaagatttttgcagtcagcacgattgtgtttatttcatttcattttgaagccatctttatgtttaaacttaccaaccttgagatacgaaatgagtaaattacctttattactgataaaaagcaacagtcgtttcagataggtcttgtgccaactgagcgtcgtatttaaaataggtttcatctaacttttatatttgtttcgtcatccagaacaccacaaacatcccgtgcgtccagcgctcagcagcagccgcagatatcaacgactcccaacagcgtggccgccttttttggcaacatgataccgccgaaggtcgaggtgaaactgggctcctacgtgagcaacacccgggagagttactgcagcagcagcggagatagcggcgaggcaactggtttgtcgttgggcagcagcaaacccatagatatcgtcagcaacggagatggattttacaagcagacggcagcctcgagctatgggaatacaaatggaaatgtaagaaggaatggcaatgccaataacaatggaaatggcaccggaaatggttcttataccaatggaaatggcaacggcaacgggaagaacaagcggaacagggtgcgaagggagagcagcatgcggcagcaacaggtgcaactgacttttggcagcgaggcggacgatccgctgatccacgaggatttcgattttgagggcaatctagcgctgttcgacaagcaggcaatttgggacgacatcgagtcgacgacccaaaaaccagatgtggtgcggcacattgtgaacaatcatcatcataagccagagcagaagtatcggcacgacgagaacatcctggccagcaaaccactacaattgcgccagatcgaaagcatgttcggcggcagccaggactttgtgacggacgacggtctcattataccgacgattccggcttacgttcggaataaaatcgagataagtgccgataaggcgggcctctctctgcagaggcagatcgacattttggcgcgcggagccagtgatctggccattacactgctgggcggcgccaggcgattgacgccggccaacaaccatcagtggccgaagattgccatcatctgcgatggcggcaaaaatatgaggtgatttaatcaaacgtatatggacataacttcaaggcagtgactaacataattcctttcagaacaattaacattggagcagccacaggtcgccagctggcttcgcatgggcttactgtcctgctgtacgtggagcaggccaaactgctggagcagaacagcagcagcccagagatttcattgttcaaggcaaccgacaatgtcatagttcactcagtagacggtaggttactaatataataaaaaatataaataatcgattactgagctatttacatttttcagccttacccacgccagatcttgtgatattatcaactaacaccgctaatttatcggatgcgatcaggaaatggctcagtgtaaatcggttagtgaaccccatttaatgtcgaaagtaaattactgttatacgtattttttagcgcttcggtgcttgccatagacccgccgccgtgtggcattaatgaggttgctatcaagtactcaatactacccatactaccattaaatggcatatcaacagcaacaacatcatcatcctcttcggctgccgccacaccaactcccattgctagcacttcggcagcagcatcggctaccaaatcagcagcatcaacgaacaattgtggcaaattgtatttatgtaatctaggtataccggataaattctatcgtgattgtggcattaagtacaaaagtccgtatggacataaatatgtgataccgattcactcaaaggactgaaacaacgacaacacaaacaccaacatttacaacagcaatcaaactgcagcatcagcaacaactgcaatccattaaaacaagaataagcacatacaacaaaaaacaataacaatgacacacccgcacacttgtgatgatcatcaagtccagtttcctgtgaatctagctcttagtactcttctctcatatattactcaagttaaacattttgttctacggcgcgtacacatatagtttttaggttacttcacgcatcatccctttagatacgcctagttattataatctatattttctaaattaattcaaagctgccggccaagtgccaaactatgattagtttccaactgtaccctatagatttttttttcattttaagcaacgacacttcttgttcagccctctgttttgaaagctagtccagcatttacaagtttataaagctttagtttaggcgcacgctctaaggaatttttccaacattcaatccaaaatttcctaaggttttaatttaatttacaattcactgtccttcctgcaagtggtcttcataatcgtaaacaacaaatcaggcgagaaattgtttgtaaataactatacaattctatggggaaagataagatcatgttaattactatcaagtatgcgcaataaatgccaaattcaatgtctaattttaagcattaaatcaacagcaaaagcaacaactattgtacgatgtaatatggaatacaaatccaagtataaatcaaatcagattagttaagtaagtttcgtaagaatacagtgtttaaaagtttaacagaccataacaaacaaaacaaaacaaaacttataaaatgagaaacactttatattatgtatagaaataattaagatgtgtctttaagggaaactaaacaaagtcgagagcataattttttacccatcgaatactaaaaagaaaccacaacacaatacttataatataaactgtagagcgattaattttatataagattaaatccaatctaatagtgcaaaattttagaaggttgcgactcagcaaggcaaccaaaaactcaaaaca

SEQ ID NO: 13556 - DNA, 2487 bp, DROSOPHILA
ccacacgcaagcagtgaaaatcccaatgaaacgagaaatccaataagttttagcgtcaatgtgttgcaacggttggtgcatttattgattaaaagagacaaaataccgaaccccttgaccgcagagccaaataattcaaaaacacccgactttaagccacaaaacactagaatcaacggcggtgcagcagcaggaagaagaggaagagaggtgcgtggtgcgtagttagttagtggcgaaattgcgtattagaaacgaaaacaacaagcagctctgcgcgggccagcaaacatttcgaacaaccattagccagggcagaacaagccgatccaacgtgttgtcgcattcgcaaagggagtatcgaaaactgattacatgggtccgacggatcaagactggatcggctgtgcagtgtctatagcctgcgacgaggtcctgggcgtcttccagggcctgatcaagcagatttctgccgaggagatcaccattgtgagggctttccgcaatggcgtgccgctgcgaaagcagaacgccgaggtggtcctcaagtgcacggacattcgcagcatcgatctcatcgagcccgcaaagcaagatctggatgggcacacggcgccgccgccagtggtcaacaagcccacgcccgtcaagctgccccacttctccaacatcctgggcaagcagcagcagctccaactccagcagcagcagcagcagctacaactccagcagcaacagaaacagcagttccaggagcaggaacgagaacaggatctgccatcgacgccgcggtcaagggccaacgacaatggacgggtagcggctggcggagcatcgagttcttcgggcccacgtggcaacttcaattcggcgctaagcgataagatgcatcagctgaagctaatcgagaccaacggctcaaatggcacccttagaacaccacaaacatcccgtgcgtccagcgctcagcagcagccgcagatatcaacgactcccaacagcgtggccgccttttttggcaacatgataccgccgaaggtcgaggtgaaactgggctcctacgtgagcaacacccgggagagttactgcagcagcagcggagatagcggcgaggcaactggtttgtcgttgggcagcagcaaacccatagatatcgtcagcaacggagatggattttacaagcagacggcagcctcgagctatgggaatacaaatggaaatgtaagaaggaatggcaatgccaataacaatggaaatggcaccggaaatggttcttataccaatggaaatggcaacggcaacgggaagaacaagcggaacagggtgcgaagggagagcagcatgcggcagcaacaggtgcaactgacttttggcagcgaggcggacgatccgctgatccacgaggatttcgattttgagggcaatctagcgctgttcgacaagcaggcaatttgggacgacatcgagtcgacgacccaaaaaccagatgtggtgcggcacattgtgaacaatcatcatcataagccagagcagaagtatcggcacgacgagaacatcctggccagcaaaccactacaattgcgccagatcgaaagcatgttcggcggcagccaggactttgtgacggacgacggtctcattataccgacgattccggcttacgttcggaataaaatcgagataagtgccgataaggcgggcctctctctgcagaggcagatcgacattttggcgcgcggagccagtgatctggccattacactgctgggcggcgccaggcgattgacgccggccaacaaccatcagtggccgaagattgccatcatctgcgatggcggcaaaaatatgagaacaattaacattggagcagccacaggtcgccagctggcttcgcatgggcttactgtcctgctgtacgtggagcaggccaaactgctggagcagaacagcagcagcccagagatttcattgttcaaggcaaccgacaatgtcatagttcactcagtagacgccttacccacgccagatcttgtgatattatcaactaacaccgctaatttatcggatgcgatcaggaaatggctcagtgtaaatcgcgcttcggtgcttgccatagacccgccgccgtgtggcattaatgaggttgctatcaagtactcaatactacccatactaccattaaatggcatatcaacagcaacaacatcatcatcctcttcggctgccgccacaccaactcccattgctagcacttcggcagcagcatcggctaccaaatcagcagcatcaacgaacaattgtggcaaattgtatttatgtaatctaggtataccggataaattctatcgtgattgtggcattaagtacaaaagtccgtatggacataaatatgtgataccgattcactcaaaggactgaaacaacgacaacacaaacaccaacatttacaacagcaatcaaactgcagcatcagcaacaactgcaatc

SEQ ID NO: 13557 - protein, 680 aa, DROSOPHILA
MGPTDQDWIGCAVSIACDEVLGVFQGLIKQISAEEITIVRAFRNGVPLRKQNAEVVLKCTDIRSIDLIEPAKQDLDGHTAPPPVVNKPTPVKLPHFSNILGKQQQLQLQQQQQQLQLQQQQKQQFQEQEREQDLPSTPRSRANDNGRVAAGGASSSSGPRGNFNSALSDKMHQLKLIETNGSNGTLRTPQTSRASSAQQQPQISTTPNSVAAFFGNMIPPKVEVKLGSYVSNTRESYCSSSGDSGEATGLSLGSSKPIDIVSNGDGFYKQTAASSYGNTNGNVRRNGNANNNGNGTGNGSYTNGNGNGNGKNKRNRVRRESSMRQQQVQLTFGSEADDPLIHEDFDFEGNLALFDKQAIWDDIESTTQKPDVVRHIVNNHHHKPEQKYRHDENILASKPLQLRQIESMFGGSQDFVTDDGLIIPTIPAYVRNKIEISADKAGLSLQRQIDILARGASDLAITLLGGARRLTPANNHQWPKIAIICDGGKNMRTINIGAATGRQLASHGLTVLLYVEQAKLLEQNSSSPEISLFKATDNVIVHSVDALPTPDLVILSTNTANLSDAIRKWLSVNRASVLAIDPPPCGINEVAIKYSILPILPLNGISTATTSSSSSAAATPTPIASTSAAASATKSAASTNNCGKLYLCNLGIPDKFYRDCGIKYKSPYGHKYVIPIHSKD

SEQ ID NO: 13558 - DNA, 6153 bp, DROSOPHILA
cattgtggtgccctccatcgttatcttctcggtgatgagtttgtgcagtgtaatctacacaatcctgaccaatggccaccttaagcacctctgtggccaactgagggagaatctcacagatcccactgccatcacctgcggcgatgccatcgccctgttgcgtcccatcattcacgaccacaacgtatcccatgatacttatctggagctcttccgcttcagctacttgatcggaatggtactgtggatagtggctctgctggtcatggtgctgcgttatgtattcgccgtggacttccagctggtggacattgatgatatgttcgatagcggacgaaatggctctgcacaagttcagattcaaccggtatacactgaggtagtgcagcagagcagtccacagcaccagacgcagatgcgtccgagatcggaagatgactatcagagtgccaggtcgcacttgagcgatcttgcagttccacttctggaggtgcaaagccagtcccagattccgccaactagcttggcctaatcctgcgggtagccaacagatcagcaatctcaggtttatttttatacgttgtgttagtgtttagtatatctaacgactaaggaatattttatcaactaacacaatttaggttaagttttaggggaccctctagtcgagagtcttcgatcaatcgatatttcattgatagttttcactatcctagcttagtgaactcgtgcctcgatatcaaatatctaaaatgtggtttaatcaaggctatagaaaatactacaataccattattgttgcatactcttgggcttataagttcaatctgagcttgaaatatgcctggttaggccacattgtccagtcgattcctttgactataacctctggtaacttaaatccatgagttttatttaaaatgcaacataaaaccgaaaacaagtgcgaataaaatacaaatattgtgtatacgagacaggaaacacttcaagttccagcttaaagaagtttcatggtgatggtcttggtttccagatagttatccaggccatccttgcccaattccctgccaatgccagagtgcttgtatccaccgaacggggtggagggcagcacggcatcatagcagttgatccacacggagccggcatccacattgttggcgaatttcagtgccttgttgatgtcattggtaataacgccggcggccaggccatattgcacattgttggcccgatcgatcatctcctccagggagctgaacttgaagatcgactgaacggggccaaagatctcctcctgggcaatccgcatatcatccttcacgtccgagaagacagtgggctcaacgaagaaaccgacattgccgatcctcttgccaccagcctgcaacttggcaccctccttcttgccactctcgatgtagcccaacaccttggtcagcatgtcatcgtcgatctggggaccctgctgcacattctgctcgaaaggattgcccaccttgcgggcctttgccttggcagctgccttggccacgaactcgtcgtagatcttttcgtgaacgtaggtgcgactgccggcacagcagctctggccgtgattggagaacagagcctcgtgggtggtttccacggcgaagtcaactaatgggggaaagcaggaattagtaggtttatgcttaagttttaaagagataagtaactcactgtccgcatcatcgaagaccacaacggggctcttgccgcccaattccagggagaccctcttcaagttcgacgtggctgcagcctgcatgacaatccgaccgatttccacggagccggtgaaagccaccttggcaatatcaggatgagcactgatagcagcaccggcagtgggaccaaatccgttgaccacattgatcacaccggctgggaagcctgcctccttcgccaaagcagccatgtgaagggcagtcagaggagtttgctccgcgggtttcatgatgatggtgcatccgacggccagagcggggccccacttccaggccagcatcagcaggggatagttccagggtatgatctggcccaccacgcccaccggttccttgcgggtcatggagacaaagcctccagcgggaatggtgtcgccgaagaacttgtcggtccagccggcgtagtactgcagcgtcaggatcgagtaggtcacatcgaagagggcctcagcgtagggctttccattgtcctgggtctccaagctggccaggaatgccttgtcccgatccatcagggcacaaagtctgcaggggattatattgttatactttatttacgtgtgatttatgggtaaaactaacttgttcatcaaattggtgcgctgcagaggactcaatttgcgccattccgagtcgcgatggaaggctttcttggccgctttcacagccaggtcgatatcagcctaataaaatattaagaataatcaacaggtacatttcaccatcgtatctctttcgagaatgctggactcaccttatctccctcggagacttggacaatctccttggatgtagccggattgaaggtggcaaaggtcttgcccgacaccgaatcaacgaactcattgttgatgaaaagctataaataaataaatcaagtgagttttgatttagtggaaagtaaatggaaccaatggaatcttttccgccacctgacagtaattgggttcgcactgggcataagtatgatcaaatttcgaccactttcgtgaaacagccaattggtgtgccagtagtttttgcaatttgttcatcattgttagcccagtttgtcagcgattacttatccgctcaaacaagttatcaacccccccgattggcccatttcaatttgccggggacacgcgataatgtaaacactgtaaagtgtaattctagtcacgattccaaattgtcgagcatgtaaaaaatacaaaactgttgacaataaaccaaagcagtttgaggctgttatctagtgttgatttaaattataatgggtcgttgggcgatatgaaatcgtacgaccagcgttcttaaactttcaagataaagtagtccgcttattgtaatcaattggaaacaataatgaatatagagaagtgggcgttaaaaataagggcattataaggagtttttactttacagagaaagaatctttattaaatattcgactaattgattagttttcttttatatataatattttttcataatttcgccattgtaaatgagcgttcaaagtcttattcgtatcagaaaaaagttcatgttggtccccaacgaatgttttcttatcagcatagcaaacatcttaattattattgctctatttctttttttttttttttttcgaatctgtttatttttttcatcccacatctgttgataacaatttaagccctctatctccgaacaaactaattgctgttttttttttaaaataatcgtacatatgcgtaaggaggccaaaattgcaagtatttgtacatatgtacttaaattgcgacacaaacgagtttgatgtgtttcactaggcagcttactttaaatcatttaacttgtaatgcagaaagtggaagttcaatgcacctagcttaagtgcagcgcagtaagagggatttgcattatttaatagacagctgcccacacacaatatttatactcacttttgtgtacttgggcttggcgttgggatcggccatattgagcgatatatacaccttcaagaactggaatagaaaccggctgtctgggagacgtcgcgaaactgaaactgaaatgctgccagatgccgatttatatagagccccgataactggctatcagcgatttgttttgcactgccgttcatcagattctcactttgcttgtggtcctcctctgaattatcatttgccggccggcatatacaagtgccctacaatgtgtacggattgtccatcgattctttaagttatatggcttaaatatggttatatcagaatttttagttaaatatattgtttttaatactacatttatttttactatacttggtgatattgatttatcacaaaaaattattaatgacacttgtttgtaatttgaccactgtaagcttttgggagcggttgatgtcttggctagatatccaagacactgtcttatacggattgtgtctaggatgtggtcttatactttagcttgtataaaatgcccaaacttcaattaatagatcaatgggtaatatagggagttttaaaatttacttcattaaatataaataggttaaatagtcttatttgcttataatttcagacacttgtcgtctggataagctgtttgccattgtaattttttatggggaaactttcgtatttgtaggtgcgttgaaccagtccatgatccagaaatttcagtttactcagcgactgtgcaatgtagttgctgaaacagatcggcagctatgtatagatagatcaatattgtaacagacacacccacctatagtactcgtagtcgtagcgcaggtatgtggagaacggctgcagttccaagccatccgggcagatcggattgccatggaggctcaaatactgcagattgggaaagaactttctgatcagtcgcattgtcgtcggcaggtcactgaactggaatcgataagaaattgcaattttcgacgtttatttctaatatacagcaattgaactgtgattctgtggcttcacctcatttttgttgagcatcagtacttccaattgtggcagcgggcaagtcagtgtcctcaaatgagcctcatgcatgcgattgctgtccagcaccaaatgacgcagctgctcgaagtccgccaaccaagacagatcctttagacaattgtgacttagatccagttgctctacatgatcagcatgcttcttaactaattcctggggcagtgttcgtaaattctgttgcaccaaaatgagctaaaccggtagacaaaataaaagagatacgacttttaatcttggctagataagcttgattttcctacctgactgtcgttattttcaggcctttccattgctctgagataaatcgtatctgtggttagcgagatacctcaccggcgatctcctcgtgagcaactgaaatgagtgctcgattgtgctgcattccgtagccgaatgcttttgtttttggactgtctctttattttttcattttaattttttaaataccctacatacatgatttttctgggcatatgcttttatataagatttttgttgataatcatatgaaaatgaatctataaattatgattaataaagataatcaactattgatcagctatcagctatttggtattaggctatctaaaatgataaggcacttggaatcaaaaagttaaaatatttcggagcctatgaggtattgaaaagttgaaaccctcgactccagtaacctactccatatgctctttgtttgcgtataactttgtttggcttctgtgaagcttttttccacgactgacgatttctttcatcgcctgaacttgttcaaggcgagagaggaagaaaaacgctagtgataagttatcaagagttaactgacatgtagatggcgccagcgggcgactatgattgcacatagagtatacgacaagtggacttaaataggagaccacatttagtaacggccatttaggggctagtccttcgaatggctttaagccacttcaaatcggaactggtcaagtgcaagtggcgcgataagtgctccacaatggcaaagagctggtaaatacatttttaattgccagctgaccggcaaacagagatgacggcccactaaagagccgaaatgaaaaggcaaatggaaagaccaacgcggacggacaaaatcttgtttgttagtggccacactgtgattgactgcaaatggctaacaaattggactggaggctgggcctagtgcccaacaaaaggggatgacagcgtaagtaaacaaagcgcgggatacaaattgcggctcacagcatttagccgggcactcaattcaatgaaacccaaccatacgcaccggcagatgggtagatactcatatacttttgcatatctttgagatacgtgacgagcaaccggcctggctgacagctgttgcagatctcgcg

SEQ ID NO: 13559 - DNA, 1980 bp, DROSOPHILA
atgcagcacaatcgagcactcatttcagttgctcacgaggagatcgccggtgagctcattttggtgcaacagaatttacgaacactgccccaggaattagttaagaagcatgctgatcatgtagagcaactggatctaagtcacaattgtctaaaggatctgtcttggttggcggacttcgagcagctgcgtcatttggtgctggacagcaatcgcatgcatgaggctcatttgaggacactgacttgcccgctgccacaattggaagtactgatgctcaacaaaaatgagttcagtgacctgccgacgacaatgcgactgatcagaaagttctttcccaatctgcagtatttgagcctccatggcaatccgatctgcccggatggcttggaactgcagccgttctccacatacctgcgctacgactacgagtactatagggcacttgtatatgccggccggcaaatgataattcagaggaggaccacaagcaaattcttgaaggtgtatatatcgctcaatatggccgatcccaacgccaagcccaagtacacaaaacttttcatcaacaatgagttcgttgattcggtgtcgggcaagacctttgccaccttcaatccggctacatccaaggagattgtccaagtctccgagggagataaggctgatatcgacctggctgtgaaagcggccaagaaagccttccatcgcgactcggaatggcgcaaattgagtcctctgcagcgcaccaatttgatgaacaaactttgtgccctgatggatcgggacaaggcattcctggccagcttggagacccaggacaatggaaagccctacgctgaggccctcttcgatgtgacctactcgatcctgacgctgcagtactacgccggctggaccgacaagttcttcggcgacaccattcccgctggaggctttgtctccatgacccgcaaggaaccggtgggcgtggtgggccagatcataccctggaactatcccctgctgatgctggcctggaagtggggccccgctctggccgtcggatgcaccatcatcatgaaacccgcggagcaaactcctctgactgcccttcacatggctgctttggcgaaggaggcaggcttcccagccggtgtgatcaatgtggtcaacggatttggtcccactgccggtgctgctatcagtgctcatcctgatattgccaaggtggctttcaccggctccgtggaaatcggtcggattgtcatgcaggctgcagccacgtcgaacttgaagagggtctccctggaattgggcggcaagagccccgttgtggtcttcgatgatgcggacattgacttcgccgtggaaaccacccacgaggctctgttctccaatcacggccagagctgctgtgccggcagtcgcacctacgttcacgaaaagatctacgacgagttcgtggccaaggcagctgccaaggcaaaggcccgcaaggtgggcaatcctttcgagcagaatgtgcagcagggtccccagatcgacgatgacatgctgaccaaggtgttgggctacatcgagagtggcaagaaggagggtgccaagttgcaggctggtggcaagaggatcggcaatgtcggtttcttcgttgagcccactgtcttctcggacgtgaaggatgatatgcggattgcccaggaggagatctttggccccgttcagtcgatcttcaagttcagctccctggaggagatgatcgatcgggccaacaatgtgcaatatggcctggccgccggcgttattaccaatgacatcaacaaggcactgaaattcgccaacaatgtggatgccggctccgtgtggatcaactgctatgatgccgtgctgccctccaccccgttcggtggatacaagcactctggcattggcagggaattgggcaaggatggcctggataactatctggaaaccaagaccatcaccatgaaacttctttaa

SEQ ID NO: 13560 - protein, 659 aa, DROSOPHILA
MQHNRALISVAHEEIAGELILVQQNLRTLPQELVKKHADHVEQLDLSHNCLKDLSWLADFEQLRHLVLDSNRMHEAHLRTLTCPLPQLEVLMLNKNEFSDLPTTMRLIRKFFPNLQYLSLHGNPICPDGLELQPFSTYLRYDYEYYRALVYAGRQMIIQRRTTSKFLKVYISLNMADPNAKPKYTKLFINNEFVDSVSGKTFATFNPATSKEIVQVSEGDKADIDLAVKAAKKAFHRDSEWRKLSPLQRTNLMNKLCALMDRDKAFLASLETQDNGKPYAEALFDVTYSILTLQYYAGWTDKFFGDTIPAGGFVSMTRKEPVGVVGQIIPWNYPLLMLAWKWGPALAVGCTIIMKPAEQTPLTALHMAALAKEAGFPAGVINVVNGFGPTAGAAISAHPDIAKVAFTGSVEIGRIVMQAAATSNLKRVSLELGGKSPVVVFDDADIDFAVETTHEALFSNHGQSCCAGSRTYVHEKIYDEFVAKAAAKAKARKVGNPFEQNVQQGPQIDDDMLTKVLGYIESGKKEGAKLQAGGKRIGNVGFFVEPTVFSDVKDDMRIAQEEIFGPVQSIFKFSSLEEMIDRANNVQYGLAAGVITNDINKALKFANNVDAGSVWINCYDAVLPSTPFGGYKHSGIGRELGKDGLDNYLETKTITMKLL

SEQ ID NO: 13561 - DNA, 12332 bp, DROSOPHILA
tcttttgcccaacataccttagccgaaaagggacaacccttgtctctcgcttttggccatttgccgcactcttctttccacccagtgcgcttgccctgacatttggcgcatctgcgccctgcacttgtttacctcgccgcgagtgctacaggtgtttgtttacctgccaacgcgcctgcgcctccaccagattgacgtgcgtgtccttccagctggccgagcatctgttgcaccagctggcgaatggtgacagttggccgcaggtgaagctttccagctgggaggacatagcacactaggaacccgggctactttgcccaaaagttggattcaaactcacttgccaaagtaaccgccaggtggcgtttaaagaatattcagatttatactaatatacaatataatatgaattactgctgaatgtacatatgtattgtacgacttcggcatatgcttacatttcaagataagaaataaaagttgagattaattcttttttttcacagaccggacggaacaaaagattgtgcttgaaacttttgttttactgcttaggatagagcttaagttaaagctttatcactcctgttccgtttgaatatcgtagaatgcaattcgcgttggtgattttgtttaactttaaatatacacgctgtcgtggttctggaagaatgtgctttctgtattcgtagagtggtcgtagttcacaagttttgactaattatcgataaattcttcttatcatactcaattctcacaaacaatttccgattccagtttttttggctgctggataagcgagtgtaaacgcgccttatacatatgtacctaattggaattccaacaatcgtaaagctccagacttgaccgtagttccggaaatcaaatagcagtggtcgctttagtttatcaatactttttattggtatatcgtaaggcttacacgtttcgcaagatacatatgtgaccccagctgacccagtcgaagcaccacccacgcctagtacttgtacccgccggcaccaccagcaccaccgccgccgccgccacgagctcctggctgtggtccctgcgggtacgtggcctcgccctcgtagctcacgtccgcgtggtagcccgtcttccagtcggcggtgtagcggacgatctgggtccttccgtcgggcatctggacgcggtactcgccggtcaccacgtcaccatcactggacgccttgtgcgcataatcgttggcggtctccggatcctgaacggcgtactcgaagtcgtacggcatgccgggcacgtggacatggtcctgcatttgggataatggataaggcatgatcagtaaaaaaatataaaaaactaaaaatacaattacgaattataattacagaagtcagttctaatttaacaagcacagtttttgttgagaaataaatcaacataatctcaaatcttaattgtatctgtatcttcataacgattatttctggcaatcataataaagatgtatctctgcgatgacaaactgatctttgatcctacactcgttggctgagtgaacattatgttgaacatcaaattggaataaaaatgcatctatggcaaacgcattacaatggttcattaaccactgatctctgatcttttcaatggctgatgattgcggtttatgatgattaagatatactcacatcgcctggctggccaggtatgttgcggggagtgccaggaggtgcgggtggccggggtccaggtgccgctggtcttccaggtgggccgggcttctgtgggagttacagaccatttagcaaatggaaaagtcaaaaatgaaatagctaaaaattccaaatggggtgtaaatactgctcattactcattgtcgaagtgaattacactgtcttagtgatgccaaatatttattgttagcttcggaaaacttgaactgctgaacttcgcgttatggaagttcacctgcattgtgatattttcgcaacgatcggttgtcgttcggttggttcggttggatctcgaaaggttaacttccattcattttcaactgccaaagccaaagcccttcaccgaccgaccaattcgaaatgttgccatcattttgggccgacattcagcagcatgacgtgccgcatttattgagttgagccacagcactccgggtgataaatgcggcgacaaatctcgactggatccaactggaattggctgcctctgccactgcctgtgactgcaactgctcccagaatgatggccgtaattagtccgttgactgggattcaatttgaggcggttggccaggccattcggccagataggcacatgccaccatacacacatatatcgacatacccccacatacttagctagataattcagatgggagcaatactcacgaatggggtcttgggttccgagtagtcgtagccattcttggtgggcgggaggtacgcgttggagccaggggcgatctgggcgtaggcataggcactgatggcagcgagggataagctctgcaagacaatcgaatggaatttaatttagtaagctgaacatagaagaaactatgtctggattaacattaagtttaagttttcgtgtgaagtaattttctattcaatttcatatatctaactttttttcacggtgtaagagccgggcatttggtgcgacattatatcagtgacttaaaggtcaaattaagagggcgaactgaaaagtgaacggttgcaaatggatgtagaagctccgataagatcgcgactgacattcagccgtggcgtagcaggtgcatcagcagcagaagcctcagccaaagaggcggcaaattatttagaacgtgcccgaaaggcgtttgctcatcgcccgtaaaagggcagcaaatggcggaggttagtggcgatctgccgccgattctgcgattccgcgattccgctctttaaacacggctaattgacacatgcacatggtggccaacgatgttggacgttagttggttggtggtgacgggagctcgtcaacccatccacatgtcagattgcagccatccatcagttggccgacagccgccggtcaaccagttgccataaccacttggccaggccaatccgcggggcttttgcctgtcatctaatgtctcgtttgtgtacttttttagctgccaacttttcaatttacatatgtacatacatacatgcatgcatgctgcaacggattgcggaaatgccgcactggcactaaattatccacagccagcggaacatacatacatacatacatacatacatatgtatagtaaatattctatgcggccaagcttggggcattgatcattattatcagtatcattagcgatacaggtgggaactgctttacattgtttgctgattagttgtgtgtgcatattgctaaattgcgcatacgacgtgttggccgaacgtgtaactccagccacatgggagcatatttggtcaaggaaagtgggattccgcttcgcacgaggctttcccatggataaactcaatcgaatctataatcgcgatggggaatcaaatatcataaaattataaataaacttaattaatttcccatgtagcgattttcttttagtcatgtgtttatatttatattaatacacattactcaaaacatttccagttcaccttctaaagtatttaacgaactaataaaagtttatgctttgcatctcatctattataaatttatgtaataaatacttaaaaaaaattgccttggaatttagttttaagttttaaggcatgctacatatatcccaacgaattcatctatatataaggtaatgtactcctaattaatccgtgtaatattcattaaattttcccatatatttaatgaggcatatcgggcaatttccaccggcgttttacacattttgctcacccatcaaatgagtttaaatttaaattaattagcttcactaaagtttccgcaattaccgcgctgggtggtcctaaccttcaggttcttcaagtccaaaactcgaagtggtaacagacacaaaaacctggccaataagcatgtcaacggcaattgtccgtgtaaaacaaatgtaattatctcaagtcggcctagcaaatagaagaaaaaaaaaccaccgtcgacttcaataaaataacggcaaataatttgcgtgttaattaaataaaagaggcaaaagaggcgcaaaataaattgcggcaacttgtcgacagccgaaattgaatgggcaagagggagggcgagagatggagtggccaaaaattgcagatagccaagttgcaacaaatggtatagccaaagttggcagaaggggcggcatcagtcgaggcaacagtctggctgaaagattgagacaatcaggcaacgaatctgctggttatttaagatcacaacgttgggcttagtagataaaaatacagtcaaacattttcaatgatttaaagttaaataaattattagaaaaatgttttaagattaagtggaactctaaaatatttactatattcgatttaattattctcaaaatctttactttcctatgcgaaactatcaagtgtcttcttttgccttgactactcgtttggtctcatttggtcttggcagccgtgactattgcatttcaagcttaatgtggtccaagttctgttctcattgctggagaatgctcattagatgcgaaggttttcctgcgttgccatggtctgtggcttttcccatttgccatggttggtggccagcagcaccttgactccgtgtggaggcaggcattgatcttgccccgctggtggcgctaccaaaaacggcgctctatgattaagatttttgttggccaagtgcccgcacttttgctttattgctcatcgcacgcaggtgcgtatcttgcccatccccatcgcaacaaatgaaaaaaaatccaaaggcacgagccggctcgcattgaagcatcattaatcgtgcacaatccaataaattaacaattgtttgctttgtccggcttattattaaatggctattatgctgccgttggccgggccgagttgttaattacagcaatgagctctttgctagctctattgagtttgttttattaaatcaacaagttttgttcgagctcttccataattaatcatagcatacactgctatgtacggaagtccgtggaaaagcacaaatgtgtagatgtacctcacttctagacaaattgttgtgtccgcccactggtcactcatcgagttgatggccacccaggaacatcaagtgaatattgtttaaattaattataggtgagcacagagctgggtagtaaatgaaactccaaagaagttgtagattttgcgccagaaagattataggtcatgccaagtctggctgagtttggtgtaccataaagaagtaataattgtgcaaatcttcacatttgtccgactcacatttgatcacgacccagtttacagagtcggatgccgaattacagcgatccgcttagatgtgtctatgtatttatgacaatcgccttttgaacgcggcttaaatggcaaactcgagtgtctggagctgagctcagttgatttatgggcggttagcatttaatatgcttaagccgatcgcatcggatcggatcgcaatagtttatggtgggcaataaaaacgtttacgccaaaatgtcttcataaaaatccagatggtcggatgtgtcgctgcagttgcatttgtttaattaatttaattggtccccctgtctgggaaaagagtttagatgttgctttcagatcttgctgcaatggcattttgtttgttgtttgtttttttcgggctgttattaagacgtcatcggggaatggaagcacatatatgtatagatacatagatggattttacaagagttgcatcattttggagcggcggcacccctagaaaactccagcagcattctgcaacgcccactcgtgggtcgatgatgaggtttggctggcttcctacttatggatgccatgttgtcttaatttatggaatttttgcacattttttttgttgtgccgtatctcaccgcagctgcttcccagcaattaccagagcagcacaaccgaaaaaagtcccctacatagatgttagattaacatgcacttgcaacacacgacacgacttcgcgtcgcgactcgttcagtagaacaacaaacatttggttgaccttttcatcgccatctacatctgcatcgcttttgctgctctgttgcatgttgcatgttgctgtgcggtttttgcttttttttttgtgtttccaagctgctctccccctcgtttgggggcattgaaatgcaaatttggcaaaataaaagttaatgggccaagtgaatggcaggcggcggcgggagaagagagcttgcaatgggaaatgacttttattgcagtttttcagttcgccgcttgagtcttttgttgcaacttgcaactagcaactggcaacttgcaacttgctggcaactcagattcgatttcaatcagctctttgcgctttccttgtgcaatttgcacccaatgtttccagctgtttgtcacagagtcacgtgcccgctggatacaaggacaatgccaaagatcaaaggttggccagcttgtctcacgacttgggcctccttggggattcacctgtgataagtcaatttcttttcgcctgtttatcggcagatcttcagctagtatgttcctcttctacactacattaaccctatttaacccgaattaaataacacacttcaatgcacaaaagccgccggctgtccataaagatattaacctttcaaatacccaaaaaacgggtgagaaaaaacttataaattatatgctacgatcgaatacttcaagtagttgtttatgaccaactatgcatttgcaagctgttcatgtgcaattacttaaaatgttataaaaactatgtgggagcttttttgtctcataaaaaccgattattaggtaaatgtggtattatggttgaattatggatttaattagtttttagtttctatgcttatagttttggtataaccatttgatgtataacaaaaaatccaaatcgaatgaaaattatgagctttttttaagccaaaattgttgtgcagaaaccacaactaccgaaattgttgcacactaaaaaccaagtacaactttttccagaactatttctctgccatttaaatgctagaatttcggttaaaaaccccagtgaactaattttccaattgccagctgttgtggacccacaaaagcgccgacgaaataacacttgcagccagaatagtgcaattaaaaattccttgcctaagggaaacggaggagaaatgcctcttattcacattgcgcatacgccacgttggacgctctggttttggttgggcaattagcgaattcagaggcggaggctgggcttttgtaatcagctgaaatttcgatttaattagattaccacacaaacacacacacacacacacaaaggcgcagatgcttggctggttaccatttccccgcagaagcccctcatccaactcatactacatatatgctgctgcacttgccgcttgctcaagcgtcattaattttttgccatttgggttttcttcgcttggattttttttcccccccgcattcgagccattgccaaagacaataaaaccgcacaaagctacagcaaatatcggtgaagccgcaaaattgcatacttccaaggcagaagaatgggtctgagcgcccattcgacgacccccgggctcaattacctaagcacggatcagctttgaggcaatgccaatcggcatcaagcgaaatctggcaaatctgccaaattatttcaattaaaattgaatttgtaatgcaagggtagagcctgtgcgaaatgacgaatgggggaatacgctgctataaattggaagtttataaaaataataatgggcttgttgtttgaaatatttggattcacggatgtgcaacttctattgataatttgataatttgtagaattttagcaggagcccaacgaaatgcaaatatccctttgaaataccctccacacatccaacattcattgggcaatcgcttacactcgaatcgccagcagtgcagcgatgagccaatgaaagacttttggccagacatgcgatatattggccataatcaggcggctctaatcagaatcggaggcagcattgcattgacccatgccggcattcacaattgcccattcgctgcggccggcgaatgcaacaattcagcatttgtagaatgcagagtgcggaatgcagaatgcagaatgcagaattagcagcttcgactttcggcttttgccagctcatcatcatcatcagcagcagcagcagcagcagcaccatcatcggacggactcaaatatcaaactgtgaatattttaggtttgtcatttgaaattcaaaagcgtgcccgaatgaatgccagtcaatgctaccaatcgtttctcgaattctttgccaccagttctgcaattttcgcgtgcgaaaatgagcagctggaatcatgggcattaatatgcagcagcagttgggcattactagctggtgtgggtgctcgacgtattcgtactctgtaccctatagttggctagctgggtagttggccagttgagtctcccccgggctgaaattaacatgtaaaacatgctcgccccgatgttctcaaaagcccgtgcactcgactggccagcggccatttgtctatcgagtgtctgccttttggtgggcggatgtggcagtgggtggttgggctcctggtttttatttttggcttggtacgcttccgtgcctgctgttattcgcccagttcgggccaaaacaagaatggtaaaaaaaaaggagaagaaaataaggggaatatagcggcattggggaaatggagaatcgctggtgaaaagtcaaaaagttacaagcggcaaattacacgcgtctggctggagttctacactctgctctcaaactctattcctttgctatcgtctggtgtaccttttggaagttatctgcttggcagaccagacgcatcagagatggaggagtgcactgcgagaaaaaccgctgaaaaaaaacatggctaatagaagaacatttaagatctaacactttggcctcaaacattgcatatatattgcgtttattttaactactagttatgctcgtccattaatcacgattacgttaatcgtaaaaattcattcgagtaattacatgatgtatgaccaattaaattttaattagatattgattatgtcttctttgaaaatcttcatacatttgaatggctttcattgagtacctattaatataattttatatctcaatctttttagacacttttggtttttgaagaaatctaatttttctcctgtgtgctcacgtaacgcggaatgggcggaggtacattggatggattccagacagtgtggtctgccgtctggacctgcattgcatccaagtgtcgcaccaacaatttaacacgccccagttacaaaaaataaaaggacatcaaggagcagccagcgaaactcgcgtctgttttattttgttgcctgcttaagggcgtcgtcccaaaacgcgattcaaaatgctttaacaatggcgaacaagtgaaagtatttcgcagtttacaagtgtgctcttgattgcgggttaacttctggacttccaggaaaagtattcaatactgtaatttcacaataaaattgtgagaatatggagaatttccaaagcgaaatgtgtaaattaataggtaacagaaaggattttggatcacctagaaatttcttagttgcacaactctttctgtgtcaatttacagcaatttgaaacaaattatataaatatttttacgaaactatattagtaaagtataaagtatatttttcaacaatttgatgaaaaaaaacttgtgtcaatttagcaccagctaagaaaagtttgcctacaaaataaagtcaagttggagccttatatatttgcaattgttcaaggggagcaaaaaggtttgcaattttcctcagatgatgcctaaatacgaaaggggaaatatattaccaacatgtgtcctccgccttacaaccttttagccttctccgaaactcaagtgtttagttaggaacaatcagggagtattgcttagatttggggcgtattttacgtggcacttggcaaacgcagatgttgccaaatattgaatgcgtatccatggaggagtacgtacaagtacatatgtatatatatatatatatattaaccagagcggagtggagcacttaagtgtctttgattatttgcaatttgttcgattcggcggggttactttggccccttcgccacttgactttcgtgtgtgtgtgtgtgtggacttgggttttgattatgatgatgatgatgagaggctctgtggcagacgtgtggcaagttatgcaatcattttcgttgccattgacggcaagtgttaccaaaaaaaaacgaaaaaaaaggaaggcaaacagtttgccaggcacttgaaacaaccagtttgatgggtagttgccttcagttctcctagcaaatctcatttaaactttccccaaaagccgcagcagaaaaatgacattgtagacgaaaaaggacactgagtgaccacgggtcatttttccctgccagcgataaacaaatttgacatataacaagcttagcttgctggcctttccacacacatacacatacatgcaaacatacatacatatatagtttcgctttagccaaaggacacgcctgcgaaatctcatatgatttgtttggccaactgatttatgtaggcttagctatgttttttttttccaggcccagaaatacatgtccttgttttatgtacgtatgtataaatactcacaagcaggacgaacgacttgaaggacatcattttgttagttgagtttcgattttacgttcacagacgatggcaaaaagtagtgtatccacaaacgccgctggctgaagttgaaattgaattgaattaaattaaattcattagagttgtcaattatttcatttatattgtttcgagttaatcgagtgtcttttgtgttatttttatgattattgcacactatttaatttgtagtccttcgcttgccacaatagttgtattaactcttactttcaccgggcgggggagggttttatttttttatcaccggttggatttctcaactaggagggggcctcagttaaagaggaggtggttttatctttttaggttcggctagattgatttcctagacaaccgcacgaagtacacgaacgttttgaattaggttagacaatggagatgcgcttgctttttataataaacgctcaaagacgctggcagcgacgtcggcggcgacggcgactgcggcagcggcggtagcagcggcgttcgcgttgccaactgcacctaaaagtaacgaaaaagcggtttgaacaattgaggcaagtctagcgcctaacttctagatcatctgcctccgtggagctggagccaagagcatccacatccacgagtctctcagaatggcccaaagagagcgcagcgttgctctcaccgttttggccaagtcttggtgttgaggtggtgaaaaatgttgcagatcatcgccgtggcacgatcattacgatgatgggtaacgagatgataaatgaatggctggcacgatgatgatgaagctcgggcggatgtataacaagatgagttcgagtggagagcctgcaacgccccgaatgacttcattaaatactcggccaaatttgatatttaagccaagcttttatgaagtctgggccctcgggcgatgcagttgccatcgagacgatacgaaaatgtcactgggaatgtcagatgataggtttcgttttagcctccaaagatacagtcgccctttttcgaaatatctatatatttatttttgtttgttttttcttcttttttttttttttgccatttggcctttgggaaagcatcagaacatagaataagtttggtgagaagtacgtgatgcggttgcccggggaaaattgcacaagctgcacaaacgtgttcatgtggcgtcccaatttcccgcagcacctctgccaaaatgcaatctatgacgtgaggctcatgccaaagatccgtagccgaggccccgaaactcatccattggccattgcacaaggctggcagacgtgtcgagtgcctttgggccaacttcctccttccaaccaacatcaaccgcatggctccttttcttccgtcaggcctcaaatcccatccca

SEQ ID NO: 13562 - DNA, 744 bp, DROSOPHILA
cttcgtgcggttgtctaggaaatcaatctagccgaacctaaaaagataaaaccacctcctctttaactgaggccccctcctagttgagaaatccaaccggtgataaaaaaataaaaccctcccccgcccggtgaaaccagcggcgtttgtggatacactactttttgccatcgtctgtgaacgtaaaatcgaaactcaactaacaaaatgatgtccttcaagtcgttcgtcctgcttagcttatccctcgctgccatcagtgcctatgcctacgcccagatcgcccctggctccaacgcgtacctcccgcccaccaagaatggctacgactactcggaacccaagaccccattcaagcccggcccacctggaagaccagcggcacctggaccccggccacccgcacctcctggcactccccgcaacatacctggccagccaggcgatgaccatgtccacgtgcccggcatgccgtacgacttcgagtacgccgttcaggatccggagaccgccaacgattatgcgcacaaggcgtccagtgatggtgacgtggtgaccggcgagtaccgcgtccagatgcccgacggaaggacccagatcgtccgctacaccgccgactggaagacgggctaccacgcggacgtgagctacgagggcgaggccacgtacccgcagggaccacagccaggagctcgtggcggcggcggcggtggtgctggtggtgccggcgggtacaagtactag

SEQ ID NO: 13563 - protein, 178 aa, DROSOPHILA
MMSFKSFVLLSLSLAAISAYAYAQIAPGSNAYLPPTKNGYDYSEPKTPFKPGPPGRPAAPGPRPPAPPGTPRNIPGQPGDDHVHVPGMPYDFEYAVQDPETANDYAHKASSDGDVVTGEYRVQMPDGRTQIVRYTADWKTGYHADVSYEGEATYPQGPQPGARGGGGGGAGGAGGYKY

SEQ ID NO: 13564 - DNA, 2714 bp, DROSOPHILA
tcgaatcgcgtgtctggccaatagccgcatgtttttttgttatttgtattttgattgatgttctctcagctaaaacgaatacaattggcttacgtaagccggcaatttgcggggggtggcacgagttgttgggggatctgttgtcgctggagcgatttcggacagtcagactgtgataagcaattacatatgctgacggcggtcctatgtcctacgaattgatatcgccgattacgcgctctccgtttccaactgcagccggcgagcgttgtttataaactaaattgagagtgacgatcatatggacgagctgccagcgcagctttcgccaaagcttttgttctagtgccagtgttaggcagcatttgaaattttttgccggttgattgattgtatgggggggggggagccaccagggggttgacgcttcagagctttgacctgcaaaaaacctagcagaaatgaagatgcagtgacagcagtttacttataagtgaatggagtttaatttcatttattttagtacagtatacaataaatgattaatatttgctatacagatgtaatgccttgcaaagagttacaagtgttataaacattcaagcatctaaattttgacattcttagtttgctttttaaaatttttttttttaaattttacccaaacttaaacataagaaatgatcaaatacgagatataaagaccatataaatacaggcccttcttataatttttaagtttaaggctataccagttcattataaactgttattcaaaggaaagtcttaaccccatagtgtacaaaacaaaagcaacaaaactccccacgaaagaagaaagatatatgtatacccttttccagccgccactgtacttataagaagcctttttgtttatcaaaatctttgtggtgaattctgtggcacatgttcatttgaaattcgaatagtcagtccaccatatatacacacaataatcgccagtcgacgtcggttatccatgatgcacacaccccgcctgtcgaatattaagcgggcatcggtgctcctcgtcaccgccctgctcctctatgtcttcgttttctccagtggctatcagaagtaccagatcgagggcattatcaagcagagtcaaccggaaaaggtctgggagtatgtggcggattttaataagatgcgtctgctcaatcccaccatgtaaggaaaactctttcttcaaacttaaatcagtttatacgataatcagatattttccccatcacacacagtttaaacttcaagatcctagctgatcatggccacgcccacgactggcgttacacggtgcagtacacagagcgactatcccattggccatactggctgaatacggctacggccaagtacgtggtcaccaagtcattacccggagtatcgcccgtggcctatgccattaagtccacgcatcagacttgcttctttgccggattctattgccgtaagataagacggaagtgatatgaatgccctcgctaatcgtaaatgaatctctattgcagtacaatcactgagtgaattcacgttcagaaactccaatggtgatacctttgcccaggagaacatccagtatcagtgtccaccactcttgggcggcatgtgtaggcgggaactggagttccagcgccaggcggtgatgcacaacttaacgataatattcggaaaacagagaggatagcataccaggatctagttcaaatttaaatcatatgtgcaaacaactaattgacttacctaccaataatcttaattcctaataaaaaaaaaacacacacaatactttgtttttaaatgtaaaccctgtgtttatttaacgatgatacaaaattacacggtacttgcttctaaaaacgatatctttcgttactttaaaattgttgaatacactttgaatgcgtattgaaataatttaaaaaaaaaaaaacacgtctaaatcaggtggcacattttggaaaatgaattgagaaactagataaacttgtgaactaataatttaccaattatatctacttacaagatacgcatacaatattatgcagtgtcttttcaattttatggtaaccttactcttcaaaatgcgcacacaaagtataattttaactaaattagctagacggtcctgtgcaatttgattttacaacctcatatttggatgctgttaacttttgatttcgtactatatgttatatattccttcattcattatatattcaataattggatttgatttgatttggtttttgtcattttcattgattgctgttcatcacttgaacagttccaatcgctttcttttggtcggtcctgatgctccaccacttctcgccgatcgcgtttgacaagctgctgcacttgtggatgaattcaccggcgtacttggtgcactaaccgattccacggagctggtctgtgaggctccaccgccgaagacggagccaaaccagcgtgttagtttcgtggcctgagtggatttagcaccctgtttgggagatttgggtgacttgcgcagcgatgcaagaatggaattgcgattaccattcgaaggttgcgttcgctcctgcgtaattccagaacctatcaaataattggtgattttattggcctgcgacggcctgacggactgttgatccggttgcacgggcgatacttcgccagaggagttcaatcgcatgcgactg

SEQ ID NO: 13565 - DNA, 582 bp, DROSOPHILA
atgatgcacacaccccgcctgtcgaatattaagcgggcatcggtgctcctcgtcaccgccctgctcctctatgtcttcgttttctccagtggctatcagaagtaccagatcgagggcattatcaagcagagtcaaccggaaaaggtctgggagtatgtggcggattttaataagatgcgtctgctcaatcccaccattttaaacttcaagatcctagctgatcatggccacgcccacgactggcgttacacggtgcagtacacagagcgactatcccattggccatactggctgaatacggctacggccaagtacgtggtcaccaagtcattacccggagtatcgcccgtggcctatgccattaagtccacgcatcagacttgcttctttgccggattctattgcctacaatcactgagtgaattcacgttcagaaactccaatggtgatacctttgcccaggagaacatccagtatcagtgtccaccactcttgggcggcatgtgtaggcgggaactggagttccagcgccaggcggtgatgcacaacttaacgataatattcggaaaacagagaggatag

SEQ ID NO: 13566 - protein, 192 aa, DROSOPHILA
MHTPRLSNIKRASVLLVTALLLYVFVFSSGYQKYQIEGIIKQSQPEKVWEYVADFNKMRLLNPTILNFKILADHGHAHDWRYTVQYTERLSHWPYWLNTATAKYVVTKSLPGVSPVAYAIKSTHQTCFFAGFYCLQSLSEFTFRNSNGDTFAQENIQYQCPPLLGGMCRRELEFQRQAVMHNLTIIFGKQRG

SEQ ID NO: 13567 - DNA, 2576 bp, DROSOPHILA
gcagtccgactcctccgaccagtccttttggaaagaaggtaaaggtattagtatgctgcaaatgattttatggaaagaacaggctacatatgtgtagcagatgacatatgtttggggttctctagatgctcacacttaagctgtccgagctgtcatcctctggcggatccagaaaatcctcggacagcagcgctgcccagtccacctccgtttcggaggtattcttggctgcctccagtttcgcctgttcctctatctgtgcctgtcgctcggcttcctccatgctattaattatggacagacggcgctgttccatgaactcgcggttcagccggatcttttgcaccggcctatcggctatgcgaaacagcaattcgagcatttgccatccggggttaggattgaattgctgttgattttcgtccatagccaaatacctgatggccaagtccttgatgctctcaccaaaagacgccatgccctccgcccgaaaacgctctgccagatcgtccaggttgcgtttcacctccatgtccgtcgttgtaggagcccatgtcctgcgttggttggcgattatcttcaatgccgtatcctccatctggcgcaactttttctggctcgtctgcgttttaagttggttaaattggaatagggataacatctgttttaaaacatacccccggttccgacaggctcctgaccagttttcgcacgttctcgtttatggcggagttgactgccgtcgaggtcttgccggagcgcttccgtaggttacccttctgggcgggaggagccatttcgctccgctttctgattgagatccaataaattctataaatggcgccctcagcaatgacaacaacgtaaatggtacaccggcataattatcggttcagttatcgatagcaatggaaacagctgttcgtggatgatcgacaatcgacttgaaacgtaaacaattgtaaatgttgtcatttaaattgagttttcgaagggcaatatgacgaccagctcgcctcaccccacctacgtaatactgggctctggcggccacacggcggagatgtgccggctgacccaggcgctgctgcaacagacagacatcgaacagacggagaagtaccagccaattagactgatcctggccaacagtgactctacctccgagcgccagttcaggcaggtcctgccgcaggctgcccagagggcggaattcgtgaaggtgccgcgcagccgcgacgtgggccaatcctggctaagcagcatcttcaccagcctgtgggcgcttctctggagctgctatctggtctggcgtgatcgcccccaactgatcctctgcaatggacccggcacctgtgtgcccttctgctatgccgcctatctgtggcgcctcctcggacgcctgccctcgcactccagaatagtgttcgtggagagcttctgccgcgtggagacgctgtcgctgagcggacgcctgctccttccgctggcggacctctttgtggtccactggccggcgttggccacgcgctatttggataaaaagaatgtgcgatattttgggcgaatcctgtaacatgtttttaataacattaaagttaacattagtttctatttaacgaattatgttttgtatgagatgttttttgtcctagcgcttcttgcgaccagcgcagacggatccatggaccttcaggtgtagaggcatgatctccaggccacatctggggcagcctacggtctctttgaagaggttgcgctggcggcgctgacgcggagtaagttcgtcctcgctagacggcagagtagacgagtcggtagaggagctcaggttgagcttgtcgatctccccttctgtgtaaccggagctgcgaagaattccttttgatgactttgctttcgatttagcgcggcgtgatgtggaagctcccgacgagtcctttgaggttaaggaagcagttgttcggcggtttttaggcttaaacgatggcggttccaagcgcaccataatggcgcagccatcgaagtgattggacaactcagtgcgcctcattttctcaaagcaaatgggacaagatacgatgtcgttctcaattcttttggcgtagcttgagcaactgggctgcacgtcgttctcacgctggaactccttcagcagggtgtcctctccaaaaatatcatctataatggattggtcagctagctccgtggcggctgttaaagattcatttgcggccacctcatcgtcgtattcatcatcaattaagaggatatcgtcctcacacaaggtcaactcatcctccattacctggcgcttgatgatctgcgtgcgctcctgactggtcatggtttttctgccagctggcatcttcatctcctcttcatcactagagctttcgaccaagttgacgatgggcgtatgaacatccctgaccattacgtcatcatcgtaggactcccagttgattatctcgctgtcgctggaaacacgacgcctctttttcttattctgtcgcttgttggaagcatcttcgctaaaacgctgaagtcgaatttgacgaagtttagcggaatcg

SEQ ID NO: 13568 - DNA, 576 bp, DROSOPHILA
atgacgaccagctcgcctcaccccacctacgtaatactgggctctggcggccacacggcggagatgtgccggctgacccaggcgctgctgcaacagacagacatcgaacagacggagaagtaccagccaattagactgatcctggccaacagtgactctacctccgagcgccagttcaggcaggtcctgccgcaggctgcccagagggcggaattcgtgaaggtgccgcgcagccgcgacgtgggccaatcctggctaagcagcatcttcaccagcctgtgggcgcttctctggagctgctatctggtctggcgtgatcgcccccaactgatcctctgcaatggacccggcacctgtgtgcccttctgctatgccgcctatctgtggcgcctcctcggacgcctgccctcgcactccagaatagtgttcgtggagagcttctgccgcgtggagacgctgtcgctgagcggacgcctgctccttccgctggcggacctctttgtggtccactggccggcgttggccacgcgctatttggataaaaagaatgtgcgatattttgggcgaatcctgtaa

SEQ ID NO: 13569 - protein, 191 aa, DROSOPHILA
MTTSSPHPTYVILGSGGHTAEMCRLTQALLQQTDIEQTEKYQPIRLILANSDSTSERQFRQVLPQAAQRAEFVKVPRSRDVGQSWLSSIFTSLWALLWSCYLVWRDRPQLILCNGPGTCVPFCYAAYLWRLLGRLPSHSRIVFVESFCRVETLSLSGRLLLPLADLFVVHWPALATRYLDKKNVRYFGRIL

SEQ ID NO: 13570 - DNA, 8283 bp, DROSOPHILA
atttgacgcatacaattttacagatcaagcatagtccccgttaagttttttttttaattcggtgtgtattttttacgacttgtaatacagccacacataaaatactgtttttaaccaaacaaacatgtcgcttataaagaatttggtaaaagagcccgaacagaaggcaaagaaaaagaaaaagaatgcgggatctggagaaagcgattccgatgagaaggacaagcctctgcggccgttcatcaaaaccgcgacagatctacagaggctgaagctggagaagctcatgaagaatccggtatgtgtttgcattggaaagctgggtggacattcatattaataaaccttttattgccaggataagcccgtggtcataccggagcagcgtcgcgaacgggacttcatgtcctcggtgcccacgttcgtgcggaatgtgatgggaagcagtgctggagcgggttccggcgagttccatgtgtaccgccacttgcgacgcaaggagtacgcccgccagaagaacatccagaaccagagtgcccgcgaagcagcagatgaagcttaccagcagaagttggacgacaacagacgcgcggccgaagaaaagactgctaagaaacgagccaaacggttgaagagaaaacagagggcgaaaaagccgagagaggacaagaagccactggctaaggaagcctcagaggatagtaacacagattccgaggaagagcccacagaagaaaaggcagaaagtagccctgaggaaggacaacaggtggcatccaaggaatccgacgacaataacacccaagaaacttcgaatgaagaggcagtgaattcaaatacagaagcgaaaagcgcagaggacacaaatgcagtggaattagatagcaccgaagctacaaaggaatcccaaaatgtggatcaagaacaagacaagcctgtgccttagtacctcctgttctattcctatcaataaaccgtttagagtaataaaacacagtgcggttttatttatagtacttttgtaatatatatatattaagcgatttctatacatcgccagtatctaggggttttcatctgaggccatctttctaaagcagcttggttgagaagaaagcgttttgcgaattatgcattgagttgtcgtggctttagtgcgcattttgttttttgttgtcttacatttataaggtgcatcaaatgttgcatttttgagtataataaatgctttcaaaatttgacatcgcaggcaatacattaattatacccttgacagaaatccaccatttttagttctgggtataaacatatttttttctggtttcttgaagaagcaagtttttattgttttcaataattagatttctttgaatccgaaaaatcgtttcttctaattgttggatttttctgcgttttgtttttgttttctcagatacatctatatgatttctcggttttgcacaaataattatttatagtatatttatatataggtatattttttgccgttgctcttaaataaacaattacaaataaatttgcagcatttttctactatgtaaaccgtaaaagtaaattatattttgaacttaaagccaacttaaatttgtaagcattttgaaaggtatttgtttttgttgaagatcctttcgcgaaaaagaacacaaaacaggaattgtgtaaagtgaatatggttaaaagaagcaaactgttatcgttaaaactacctcaattatgataaaaagcatgttgcactcctctccaagtaattctcattaacaaacttctctttgtgagtacaagttttcttagatgttgaaatacttccttgcttatataaattttccagtgaatttagctattattatgcatacattttgcaaacactaaaacacatcaacgtcattgaatttttttcaagtgagtgcgagtgctcgggtacatttgtggatggaaaaacatttctgcgccacatggtacacatggtattagccgtcgaatgaaatacagtttaccattgtaaatacgttccattctcatcgaattctacgacaaattcaagttaggatgcccgtttgcttagcgagccaatgctggtttataaaggagggcggcattaactttaaacgataatcgtatgtatgtattttttgggcattttgtttatgtactttgtatagtaggtaggtagttagtttagttagaaggtcgtacaattaaataaataattcgttttcgccagtttcattcagttttaaaatacaatatgttcattttacgctgacacagaaagcgtctggaaaataaacttccgcggaggtggccgagactgctcgtgtatgggcgtgttgtgtgggtatgtgatttaatatattagctttatttatgtttaaattgagaagtaagcagaacccttgccgattcttccttaatttaacgacattcccagacctttactgtttgatctacgctaccgctaattacgtacggatgcgctttgtgaaaatctgcaagaaaacggatgacaattaaaatatatagttcatacacacaatgccttgtgtggacccacctatggaggtgcagaaatgctgatgcgcgtatagcgtcttcatgcatcgcttgttgcgcaagtcccacacccgaatggtcttgtcatcgctggccgacaccaagtatttgccaccaggatggaatgccaggccacgcacccaattgtcatggccactcagggtaagcaggcacaggccgacgctcacgtcccaaatgcgaatggttttgtcgcgagagccggaggccaggaacgggccctggtgatggcccttcttgttgtctgctccggctgcctcgtttatcgcagaggctgcggcttccggcgcccaggcaatgcactccacagtatgctcatgatcgcgtaattcaacctgcagaagaatcaaaccgtcgttagactcttcattgccagcagaagctgcacatggcaatgctcaccttgcagtcttttgaattcgtcaaccaaacacgtattgtctgatcatttgagcatgtggcaaagatgctgccttcgatgtgcactcgcaccattcgcacccactctcgatggcctgtgtaggttttcacacagtagctgaggatgagaagtcacatgttggtcatattatcccttaaacgaaatgtcctttttctttaactcaccctgtggccacctcccacattttaatagtgcggtcccgggatgcagagagtacataatctccggccggcacaaaggccaccgacgagacattgtgatcgtgaccatgcatagttttgatacactcgtagctctgctggaaatcccacaatttgatggataagtccgcgctgcaggaggctgttgcaattaaagcaaaattaaattggttttactatatattcaactatggcaagatcttacccaaaagcttgccctgggcatcaaatgcgacatcctgcacagagtccgtgtgtcccttcaggctgcgttcgtactcgccagtttcgaagtcccaaatcctaatggtggcgtcttcggatgcggaaaccataagagcaaagatggggtggaaaattacctgcaattataaaatgtaaatgtaaaatgtttattaatttgttaacttctcaacttaccctcgttatgctggcacgatgaccggtcagggagaacttctctggcggccgaggtatccactcgccaggcgtccgtttgttctttgtgggcgccccctcgatgacctccttctcagcttcagtgagcttagcctctagttccatcactttcttctgcagccgaatcacggacgtccacttcttttccaacagtccgccaaatttcttttccacttctgtgctgagatcggcctccttgcggaaggtctccaatgagtcggcgtagccatttgagcccagataatcggcaatcgcttggttactgatggcgatacaattaaaaggattagttcatggggtaatagttatataagacgactgggacttacagctcctcgcgctgccgctgcgacaacaccattttcatactgttttccgatttggcttgttttgcttctctcgttcgcaattcggttatccgccttcaactcttgcaattctgcaatggaaaaggtagacattcaatatgtgtacagcagttcttaccacagtcagatacaagatatatttcctatatacatatcttgcaaaccatttcgttagacagagttatgtataatttttggttcatctatcgaacttctactgtataatcatatgatgatttgatgtacctgggacaggaaattggtttcgcaaaacctaaatgccaaaaatgccagcaagtttcgtttgagttctcatggagggcaggcgagtcacccacattttcttgaatttttttggcagcagtatttctgtttcctatgctcacctttcgtctagtcattatattgtttcattctcccaaagcggagcatcatcattatcatcgtgtctttggtttctggcacacatttttgtgttgcccgtgcctcgaataagtgggcaaaaaaaaaataataatcgaaactttggcaatgcttgaagcgaagcagcagcagcatttggtaacccctgcaatcgaactgcactcgtcatcggtgagttcaagggtcgatttcacatggaattaggcagaaatcatatgggtgcgctatttgtttgtttagtgcccatgtttttttgactgcaaaacctttttaatcaactcaaggtggccaaatcatgggtatagcacgcaatataacaacagcaatcggaaacaaatagctaacgcatatctcgcgtacttgataacgatggacaactgacgcgttgccaacgaatatactagcgaaggaaaatccacgacaaggcaaagccaattagccagacttaacggtagttcaagcaacttcttataggtaaataaggctgcgaaagagcgtgcgagcgaagaagcagaacaaacacgggcaccagaggtgcaattgatagcataaaaactaattcagctgtttcttttatttgtgctaaatagttattggctatatgatcattaaattaataggtgttatgaaaacataaacaagacctaaatatctcgaattcattactaatttcatggccccacctgtgagagacacgctcacacatcacggtctaggaaatgacgtttccaaattatttttggccaaatgatatttaacgatttttttgaactagcaaatatggcaaaaaaaaaagacaagcaaaaactgaccaaacgggttcacagccgaatccgattcgaaacggccactcaatatagccgtgagtcattcggctggacgcgacttgaactactcctatagggcttatcagctgtattcgagcacttggcgctcatcatttgaatattgtgggtggatgtttggctgcgctctaactgcgcatctaaatatatcccaggaaaatcgatgaaaagcgttgcgagcgtcacgggtattaatggaaaagtggagcgtgggcagcaaagtggggttaagatagtggggggtcccttaaaccatcgaacgaagtcaacactgtttgtgttgtggcaaccaggcattccgaaacacaaagccatgcgcattgtaaccgtaaagctgtgggtgtgtgccatatgggggaatgaaaacaatgggaagggggcgtttgggtcgcacgccacaccagaaatgttactaaatcagtaaaaatcatatgggattctcattgttgcacttgctcaagttaatttaatatttgaattttaaatggttttgggtgggcgtgagagcgagatagttggcaaggggcatagaccagggctgcaacgaacacacacacacacacagtaaggtcttgaattttaaggatctttctcttcctctcactccccctttcgtttgaattcgcttgcttattctctctctcccgctctggcaaacagaccttgcacttgcctttgcttgtttatttgcgtgtttcattgattagcacacactcacacacgcgccggcgagcaaatgcaattgcaatttcaagtgcaaaaagagagaggaaaaaggaaaacaatagccaaaaaagctttgaactccagctttaaccccacgacgggcatcgaatgcagggactaaccgttaagtgccgagactttttgctttgcctttctttaacccactgctggaaacgtgcaaaaagctcgtcactagataatagaaacaatttgcagtgtcaggagcgctttccacacattctgggaaatcgcaacgggtcttgaatatctaaaagaatgccgcagcaaaaaagcccaaaacggaaaactgtaaaaaaaaaacaaaaacaactacacaagcacaacgaagaaaataaaacgagatttcttgtgcattggcagaactggtttgcccagtaataggtgttgttggcctatgggggaacgggaagtacatatatgcaaggaatcggccagttcggggactcgacttggctaaaaatcgatcaattctacttttggcgagggggaggactccaaacatgcgcgaaaatccacagacatcgtcactcgcacacacacacacactcgcgcacgcacaccaacgcactcgatgtgtcatcgctttctggtggttgtaaataaaatgtaatcatagttcgtttctccacttatttactgatcgtctttttgttcaacacactactttttttgtgcataatttgcataactctttcgcttgttttttcattctcttttcaataacaaacacaataacaacaacagtttgaacgaaaatactgttacgacggccatcttggatagagagagggggccaagagaaagaaatgtcccaaaggcaatatgcataatggggaaaaaggacaaatatccaagcgcacatatagtatattatattttccgactccaaccgacatgcttggtacataatgcgcgaactaacactttgccattggcagttttgtacatatgacgtttttttttcttcatttctcccaatagcccattacacgggttggttgcgaaaaatccattttgcttgggtgttctatttacaacgcggcgactcggtgtttgttcttattatgcagcgaacgttacttacaacaatttagtatttcatatatttataattacgcttatttatttatgtttaatcgaaatatacgaaaagaattacgcagaaaagtgacgagcggacgaaaatgcttcgattagtgtgaccgcagtggaagcagctcaaaaaacatcacgggactatcgatgacagcgattagctatcgatgtgactaggaatgtagaaaaatgttaataaaaatatgtataataacttctaaatactttttatatcttatataagacctaaggactgaaaccattgagtaaagaacgagttgccataacttaagccctacttccatgcaagcgcagtgtgaacagcttaaaaaattggcgcgctatttaaaatgctgataaggaaatggaccttcgtcagctttttttttgcggaaccacaacgcctatccgtgagtgaacaaaatgggtttccaattatttatgccatataagtattgctatttatttataacacatcccaattcgatagtcaacactgcagtttgctaattgtaaaccgactttgttgttatcttacacacacattcgcgatgggagtaaactttccttatcaccgctcacacagcgccagaacacaacacaaccgatttatggagtgctccctttggcgctcagtattcgagaatcgctcagcggaaacggttattagtttactgattttcgggcgacacacacacattcgttattcatagttggtgcgcccaaatattcgcgaaacagcaacaacaattagcaaccatctgtcacctgtgagtgcagcgtatcgtacacaatctcaatcgctcattgggaaaattgccgaataatgtaaatcatttgccaaatttgggcactcgttgtgtgttatcagtgtttgagatttaatcagccattttgtacgcattacattatatcgatatagccgctatatcagccaattctatggctctatagatatatgttaaatatgattcagtttagcaatgcttgctaatcctgcggtagccgatcctcttggccacattagcgtttaactggcgaaatcgaaagccatttatgagccagcaccgtatggctgttatcagaccgacaactctgatgattatatgccgatg

SEQ ID NO: 13571 - DNA, 2867 bp, DROSOPHILA
cactgcggtcacactaatcgaagcattttcgtccgctcgtcacttttctgcgtaattcttttcgtatatttcgattaaacataaataaataagcgtaattataaatatatgaaatactaaattgttaattgcaagagttgaaggcggataaccgaattgcgaacgagagaagcaaaacaagccaaatcggaaaacagtatgaaaatggtgttgtcgcagcggcagcgcgaggagcttaaccaagcgattgccgattatctgggctcaaatggctacgccgactcattggagaccttccgcaaggaggccgatctcagcacagaagtggaaaagaaatttggcggactgttggaaaagaagtggacgtccgtgattcggctgcagaagaaagtgatggaactagaggctaagctcactgaagctgagaaggaggtcatcgagggggcgcccacaaagaacaaacggacgcctggcgagtggatacctcggccgccagagaagttctccctgaccggtcatcgtgccagcataacgagggtaattttccaccccatctttgctcttatggtttccgcatccgaagacgccaccattaggatttgggacttcgaaactggcgagtacgaacgcagcctgaagggacacacggactctgtgcaggatgtcgcatttgatgcccagggcaagcttttggcctcctgcagcgcggacttatccatcaaattgtgggatttccagcagagctacgagtgtatcaaaactatgcatggtcacgatcacaatgtctcgtcggtggcctttgtgccggccggagattatgtactctctgcatcccgggaccgcactattaaaatgtgggaggtggccacaggctactgtgtgaaaacctacacaggccatcgagagtgggtgcgaatggtgcgagtgcacatcgaaggcagcatctttgccacatgctcaaatgatcagacaatacgtgtttggttgacgaattcaaaagactgcaaggttgaattacgcgatcatgagcatactgtggagtgcattgcctgggcgccggaagccgcagcctctgcgataaacgaggcagccggagcagacaacaagaagggccatcaccagggcccgttcctggcctccggctctcgcgacaaaaccattcgcatttgggacgtgagcgtcggcctgtgcctgcttaccctgagtggccatgacaattgggtgcgtggcctggcattccatcctggtggcaaatacttggtgtcggccagcgatgacaagaccattcgggtgtgggacttgcgcaacaagcgatgcatgaagacgctatacgcgcatcagcatttctgcacctccatagattttcacaaagcgcatccgtacgtaattagcggtagcgtagatcaaacagtaaaggtctgggaatgtcgttaaattaaggaagaatcggcaagggttctgcttacttctcaatttaaacataaataaagctaatatattaaatcacatacccacacaacacgcccatacacgagcagtctcggccacctccgcggaagtttattttccagacgctttctgtgtcagcgtaaaatgaacatattgtattttaaaactgaatgaaactggcgaaaacgaattatttatttaattgtacgaccttctaactaaactaactacctacctactatacaaagtacataaacaaaatgcccaaaaaatacatacatacgattatcgtttaaagttaatgccgccctcctttataaaccagcattggctcgctaagcaaacgggcatcctaacttgaatttgtcgtagaattcgatgagaatggaacgtatttacaatggtaaactgtatttcattcgacggctaataccatgtgtaccatgtggcgcagaaatgtttttccatccacaaatgtacccgagcactcgcactcacttgaaaaaaattcaatgacgttgatgtgttttagtgtttgcaaaatgtatgcataataatagctaaattcactggaaaatttatataagcaaggaagtatttcaacatctaagaaaacttgtactcacaaagagaagtttgttaatgagaattacttggagaggagtgcaacatgctttttatcataattgaggtagttttaacgataacagtttgcttcttttaaccatattcactttacacaattcctgttttgtgttctttttcgcgaaaggatcttcaacaaaaacaaatacctttcaaaatgcttacaaatttaagttggctttaagttcaaaatataatttacttttacggtttacatagtagaaaaatgctgcaaatttatttgtaattgtttatttaagagcaacggcaaaaaatatacctatatataaatatactataaataattatttgtgcaaaaccgagaaatcatatagatgtatctgagaaaacaaaaacaaaacgcagaaaaatccaacaattagaagaaacgatttttcggattcaaagaaatctaattattgaaaacaataaaaacttgcttcttcaagaaaccagaaaaaaatatgtttatacccagaactaaaaatggtggatttctgtcaagggtataattaatgtattgcctgcgatgtcaaattttgaaagcatttattatactcaaaaatgcaacatttgatgcaccttataaatgtaagacaacaaaaaacaaaatgcgcactaaagccacgacaactcaatgcataattcgcaaaacgctttcttctcaaccaagctgctttagaaagatggcctcagatgaaaacccctagatactggcgatgtatagaaatcgcttaatatatatatattacaaaagtactataaataaaacc

SEQ ID NO: 13572 - protein, 411 aa, DROSOPHILA [sequence omitted]

SEQ ID NO: 13573 - DNA, 12697 bp, DROSOPHILA
tgtatttaatcattaagtgaagctctgtaaatctttaagctaagaaaaacaatttttgtatagagttgttagaaaatcaattgacaaaaacaaattgaaaccaaaaaaaaaataaatataataaaattacaccaaatgttgtattattaccatgtactttcgaaacaaaacacaggtatgtaactaatttttaaagctattgagatttttgatgttcgagaataaaaaagactgttttattatttcattgaccatttttatttcacatacataaatagttttgacattttaaaatttcagttttcaaattacttttatttttcaacaaccaatagaacttagatgctagctaagcatttcgcaatttgagcaaaaccagttcccacaaaggaaatgctggtaattatcgtcggtttcttgggccgtacagagcatataattcagatgtgtgctttctaggactagactgttggataccgatgcagttcgtgtcctgcgtatctcataccccttagttgacttaaaaaaacagtttcgctagctgctcgtactcttatccaaaatggcataaaatactctgataagcgcctctgttaaaatacatgtttcgtaataaaatgattccttgtagttaaaatatacatacacgtacgcttatgaatctttatgtataattaatatataggtatggtaaattgtattgtttcaaaattgagtgttcatctttgcacatttaaggcctgttgtttacttagcttaggtttgtgttttgcgttttgagttttgagctgggtgttcctctagaacttgaacttcaacttgagcaagctgttcgatgtgagctgtgttccttcgctataatctatatccttcctgactaattcctctgagtgcgcgtgtgggtgctaagactatgtgtgtggtgtgcgccgtgcgctatgatatacaagatcgtttgttgaaaccagacaaaactgatgccacctccaaacccatcgttatcgtagacagttgattacaattattaatgcacatgtacttaaactaaaacgtatcctacgaatacagatcaggccagacaagaccagacgatgctgtcgcactggctttcaacttgcttgctctctggacggctcttcacttcgatgcgggggcagtccaacactcgacaaatcccagttaaagctcccttgggcggtcaacaagctaagacccatatcataaaacaatggcttagttactaaaccaaaagtaatatactctgaaaacgtacattcagtgaacagtttgcctaatctccaacagaaatggttaaaagtgaacaatatcatgacatttctattttcgcaagtgcccgtccaaaagatcttttcctgcatatgagtgaggatcctgcctaaaactaacgactaaaattttgactgactacgctggttgtgagggaactaagggctataaactagcacacagatacgatacgattacggatatacaacacggttccattattaaatgcagagctgaatgactggtgacgacaggggctgggggtgcacactgatggggtcaacggttactggttacataaacactacgaatatgccgctccatgccagccactgcatccacatggacatccaaatctcggggcctcattcctgcttcagtcgcttggcctcgttgcccacgtcgcctccactgctggccgagctcggagtcgtctggtgctccgtgtcgctggtaatgtaggcgaactggcactcgaactcaaagtccatgtcctttttctgcaatttgcgaatagtaaccgtgttttagtaaacatatatagaaagtagtgttatcagcttactaaccattctttcgcaaatgaccgcaatggctgttttgtcttgtgcctcggcgattttgtgctccaccaggtagaacatgtactcatcgaacagcaagcgaattaggtggaagctcccgaagctggaggcggatctcagcgtcaggtcacgaatgatcatagagctgtagaagctccactttagcagaaactggcgggcggctctggcataagtcggcttcccgttgtactcctccatggccgattccaccaccagttgcagccagctggcccactgttccagggagctctgctgctgcagagcggccttgaaatcgctctccaagcgctggaccacggcgggcgcacattgactcacccaggcagcttgctcctgcgggatataatgctcaattagttgggtatctattactataaggtatatcttttgaaaactgctgacaggttttcatatcactcatacgtcctgttgccatacaaagttctacgagtcagctgactataaatctttttgatttttaaatagtatacctaagaaacgtgttctttcacctttggttgcttgtaatatcaaaggtctcacctgaacattgtggaaatcgacacgattgagatcgcttagcatctgggagatctgtgcaccattctggagcactgctcgagccgcctgcgccaggtgattcagcgaggtgtagcgcctcagcgtttggcagaatgccgagacggcactggtcttgatctgggcaagctgctccggcacgcccagcatgctctcacatagccagatctccaggttcttggcgaagtttctgatggcctgggtcagggcgtttggtatggagcggagcacatccggtatgatgacatcgacggtgttctggtagaattggtagtccacctggggggcagagaaacaatgtatttaagtttaataataacagacacggtgcaattcattaagtgcaaaattagtgttcaaactaaattaataaattccacaatagtttacgattctgattgaagcctatgaaagattgtgaatcgcggaacatgcccggcactcgggacccgattgccggctatctattggctaccattggtggccgctccacccacctctcgcacgaacttctgcacttctgcgcagtggcacaacagatacagtttcgtcttgctcaagtacttctcctcctcgcactcgtccagattattgttgtcgctggcccgccagaagtcgcgcagcaggaactccacggtgttgaactccagattgagcacggcgtccaggaaggactcgcaatgctcccgatacaggccccggaaggtgtccacgtcctccagggtcagttcgctgttgaagctgtggttcagctcgatgggcggaaacgagggcagggcactggttccatcgccgatgtactggagacgaatggaaggaataaattcaatcaataaatggatttgattcaaaaatagttttttcaaatatagcacaactaatttagatggttttaatctattttagtttgaatgacacgattcagagttatttctgaatttaaatatctcaaaaaatatgtcaaaagcacaagaataatccctacctgaatgcacgcctcgtaggtctccggcttgaaggtgtgcttcttggtgccgttgctgtgccgctggccatggccaccgcccaatccattggatccggtcagctgtccggcggtgctgctggtgacgctgaccatcggtccgctgcctggtccgccggttccgtccgaggatggtccgtagccggcggccagcatctgcttgtcgtccatcgcctggctgttcagcaacgagccgggcttaatgcggataccatagtagtggtacttggagttgccgcgcgtgcccaggcgacgtgtgcgcagtccggagaacacggaacgtatcagcttgccgaaactggccgcattcacgggctctagcttgtgctcgctgcagtgctgcatgtaatggttgtacagcgtgctcctgggcaggctcacaccatccgccgtttcgtagttgcgcgacagccacttgatctgaaagagagttggatgtgcatggtggtatattattaggggatgctgtccgtgggggcgtagccatggatgcactcaccgttgccgaggcaatcttgttgctgctgccgagcgcactctggtcggaatccggggaggcgcctccaccgcccgttcccaggctgccgccgctagccgaatgggtcgtggtcgtcgaggtgggcgtctggggcgtgctctgcgcctcctggatgtacgcgacctcctgcacccagtggcgattagttccgttcacccggtccgcatcccgctcccaatccctgctactcaccgtcaggctgtgcggcgaatcgcgtccatgcgattgtgactgcgactgcgacagcgagtgtgcggaaccattgaggaggatgccctcctccacgggcaccaggtacggcagcgtcgtggagtgagctccgttcgaggagcctccggccgacgaggtggttccgtactgacccgtggtcgagtagtacgccgtctggccgttgccctggtagtcccccactgggcagaacggatacgtcctgaaattggcaagggcaaagacaaggggtttaaataaaggtcgaacttatcgatctccccccggatccactcacatttgcgtctggcttgagttgctgtggtacagctcagagtccacatattgcacttggtagttctgctcctggcccgaaactgaaagaaaccaggataataaagtttttatttccacgaacttggtttttatagagcctctttttaaaaatattttgcaatatacgttacagctcgactttggatcattaataacttatatagagctatgtttcttaggttcgcctatgatcgattgcttaaactaactagcttaaaagaaatgtaaataaacaataatataatgcggtttaaactgatgtttttccgacggtaactgttggtgctaaaatcacttaaatcatcattaataatattaatattattaaagccacaggaattacttccataacgtttatttaacattgaactaaatactttgtgcacaaagcttccttctcgaatgctattgattaagtcaacagcctgaagtcctttgtgtattcagtccattcactacattcaattggcatcacggaggaaaacacttgacacccacaaactgaagacgaacacatttaacccgacgacaggtggtccagattcactattcaaagttcgaactgaaagcgattggatgaagagtaggatatttaccaccgcagtaggacaaattattgtgtcgtcgatggtggtggtggtacatggttgcgttggaggatccccccgaaatgtttgttgcggcggcacaagacgagtttgccaacgaggaagtggatggagtggatccggttccacttcccgatcccgatcccgatcccgttctcgaacccaatccaagcgcggagcagttgctgtagctggttgcactggcgctggcaacgaaggtctggtggtgatggtgatgatgatggtggtgcaactgtagttgaagctgggcgggtggtgctggaacgggattggcggccacggattgcttgcagcggcacttctccaggagattcgagtaggccacggcagcagcggcgctggggctgatcactggcggcgttggtggcgactccaatggaatgctacacggtggatttgggtggtggtggtggtggtgctggtggtgcgtctgctggtgttgttggtaatggcgcgtctggcagtcaaagccgtaccgcgaatgcattcgtttggccggaagtggagcgtaggctgctggaattgttggcccctagtccgggtgggtgtcttattgtacttcagatgattccggtaacgacgatgtacaccacttcaaactggttaggctttgaaaagatctcgctttcctttgaaaacccaaacatattcgccttttaagctttcgacttatttcgaatagtttttgaacgtttaaagaagatttttttttcaattcgaactcgagaagtttcaacaattagacacaactactttctaataataaaatataaaattcaagttcataggttcgaagtccagagatgtaagtttcaagatttgtaatccaaagttaagaaatccatctcatattgaaagtatccgagtattaaagtttgtgagaatccaacattatgaaattcaatccaaagttggaaatatgattataagagttctagaactactatccacatagaaggttttcaacgattctgtaacatcgtgtgaaaacggcgacgaacagttgcaagttcaaatatgcaaatcgaagacgccaaagcttagtttcgtaagtggagaagtcacccggttgcttctggcaactggccagcaactcagttcggaaagcgaaagtgaaatccttgaccaggcaatcgctccattcaaaattgtcctgctccagtgggtggtattttgtatttgtaaccgactaacaggtttgggttgcgatggctgtggccggaatcgaatcgaaggacggatgctggatgctggatggcgtggaaacggagcaaccagtgcctgcgaacggtagaattacaactgaatccaaaatcaaatgttatcctagcaatatgcctccgaaaataatgatgatggcgaactcacgacgacggcggcgcagcaacgaattaaattacaacaacggcggctgctgcctcggcggttgggtggttgccgggtgggtggttgctattatgatccgtatgcccgtagcgagtaatccaacccagaccctcgagtagcttttttttttttgctaccccgtccttgccgcccattcccatcctgccgtccccgtttcaatcggtgtgctggctaattccgggctcaaagtcgcattttctggtatctgcacaagtggtggtcgacatgggtggactcgggggacgacagtgtggcgtcaagctgggatgctggatacgcaagcgggatggcaacaggacgacggtgtcaaggcaacgccgcctggccaatcccactcctcaccggttgctaggcagcctcgccgtctcgcttccccatgttgccctctcgctcgcacgctcgctcttcaacccccgggatcaggatgctgaaggatgtatcctggccaaccaaatcgcttgctgccatcccttcgtcgccgggctgccgttgtgggtgtctccatggccgatgataaggtgcgagcaggtggctgggtggcttgtatatgggtggttcttttggagccctttggtttggatggagcaccacgagagaaagcagccggaatggcatgcgatgcgtggaatttttccatattctcccgtggtcaggccagtatttcccttccttttttttttttttttttttttgttttggcagtttcctcttggtcaccgcttttcatgacatatttcagatattaattcctcgtcgaggagcacatgtcctggtgtatgtgtgtggatcctgaagttgttgcggtcagacctgcgggctgtaaaccccctgacccccaaaccctgaattttccctttgacacgctgctgcaaactgtaaatattaacaggtgccccttggggcatttggggatgagaagtgatgagtggcgtgaatatggaagcatggatatggaagcatggaggcgttggcaggctgcactggcaaatgtcctttaaagttgtcagggcataggacaattccacttcgacatatacgaaatcttttgaggttctttcaagtggaccgcattctcgcccaaaacattttggcttttcaatgactttggtttcagtgccaaagcagttttgctttggtaattgcctttggaatggactcagattgaatctttagcagattgcagatgaagtatgatgaaggataacagctcagctggatcttgaggcaaacgaagttagcttggacagctttttatagaacatgttatcttgaagactaaatgagcgacataaagattttaaataaaacattaaacatgcatgaaattagctatgtgtctttggtattagtcaggataagatcaagtaaataacgaataagggtgccattttataccctctaaacggaataaataaattatcataatacgagctaataaaacaatttaaagcccctgatgatcttatcaaaacgagaagaaaggaacaaatatttcgagagacttcattgttgagctaaaagatagatcaagcacaaaatgtataatgaaaagttgaacaagctcgattgatcagagcgatgaatgttctttcggatgttttgagagttcaaaaggtttattgcaatatccactttggtgcgccacttgtgcaaattcccagctccactccacatgggcaacatgggagccgggttgtgcacaaattgccaggataacgataacagacaagtgcaggataaggcggtgagagggggagcgcagctggcttatcctgcatctactacaacgtcaacaaacaattaacctttttgtgagccggacacactggcaggggatgtgagcttcactgggattggccccggctaccgttgggtcagaggtcagaggtgagtcctttgtagagcttcacttgctctgattgccacagcgagatagcattctccgagaattatgaactgcgactcgcttttgacaaataaatttgcgcttatctcgatgggcagcgggaacaaataagtttttgttggcacaattaaaagaagcccggcatatgccacagttctctaactagcttggaacttgcaagccagaaacttggcaacatggcaaccaccacccacaatccagttgtccacctggccatcctggcaatcacagactaaccacttcaactggtacggattcccgcgttttgtatgtttctatttttattcgctggcattattaaaggttaagctcgtcgtcttctgcctcgtcgattcgatgagcacccagcaaatccgtatcaattgaaaagtacaatgcaacatattcgagaaaggtacgagtaagttatgacatgggcatcctcccatccacgaacacccacccacccaactgataaacacccacaacaggaacggagcttgcaacgccctaacgcacgaaatatgaaagggattccgcatcaatttttattggcaatcagtgcactgagagaaagttgttggtagaaaacttaacaagtacgccatgaaaattaaaattgaaattataaaattaaaatgagacacaagctatgatgattcatgggaagatatgatgtattttacaagcagatgtgtgaaatatcgtatagtttagaaagatttcttgcagtgatgcagttgagggtccttttaaaaaggacgaaggtattagttgacagcgggcggttattagcgagtcgtcgactcatccccacccactgtgcacccctcccttagcttcggatcaggatgaggcaccgtgtgaagccctctcaatttgttgtgattacccgatgttgccattcggatacggatgtttgccctcctgcgtgtcctggtggtggtaatttgtgctaataaaatcaagtacgatggcaaacaatcaggcgatccgacccttttcccgttgtccgattttgttgtagatatctatagtttcgcggcgaagtgtaatctcgattaattcattgtgcggcgctcgagtggatgataataattatgtgtgcgccgggtgtatactcgtatcagaacccagtgtgtcgtcctcatccttgtattcatcatccatcgtctcgatgtcccagctgcactttgcctctttgttgctttttgttttgcacgtggctcgtacggatccgtgtcgtgtgtccgtggacaggtagtatctcaatccgcagcggggtgtgtgtgtctgccagccattcatgtgcctaaccaaccaacccaccaacccaccaacccacccaactcatcacctatccatccatccattcatccgcgtttcagttttcaaattaagtcgctttaattgtgatatcaggcaaacgtttaaaatactccggattttaagctggtccttgtttctggctcactccccaaccctccttctcctcctgcccctcttgggacatgttgatcctgtcattatgtttgtttacaaagccgcgacttttgccgtccgttgtttcccgtttgctggtcgccgctttgatttccgcccactgcaagtgccgcccatggaatcaggagtttccctttcggctcaggacctggccaaagtgggtttttccgctctcaactggaataaatcgccaacgcgaatcgcacgtaactgcgatttttttgcggcctcgcagtttttgcgcttattagcaaagtggcatcgtgattgatatttatccatcagattttgtggcatatttcattaggggaatttcggcggcactaatgatttaggcgttttcgaatgcgatgttctcttaaaataataattggatttatgcctcctaacttttgattaattcctgactgggtttcttatgataaggggtctagttttcttgccaaatgttccttactcatttacaatgtaaatctttttaataaaatataatttaaatgagtatcatagttaagtaaatctatatcactatattatatattttgttcatttatcaatccaaatatcgttttacattctggatttgaatagattctatcctatattcctagactcacccgtcacggtaatgaagggcgttccatcgtcgtcctcggtggtctgcaccacggtcacctggccattggccacctgctgggccagatccacgccatccttgatcgcggccagatcggccatactgtgaatgggtatcgagtgggtgacggtggtcccattcggttccgtggtggtaatggtacccatggtgtcgctgctgctgttcaccacatgcccgtgtagatgggcatcgctggtcgagtcctcggcatccatgggcagtacaacgctaatcacctccagctgatcggcatccgttgctcctactcccgtcgaatcgtcgtcctcgtcgactagtttcttctgcaagagctggcagttctgcaagagggggaaaagttttacctatttatccaggtaggatggttattttattaaattattttatcttttgttcatggagcaccaatttctatttcataaatttaatctaaattttaacgacggaaatctttgctttatacttatagctaaaaataactaaacaaatccttaaatatgcattctttatccctgatgagattctaccaagttactcgggaatgcacccacctgtgtcatgacatcctccagtgtggcggacacaacgactccatcctccgtgcagaactcgaactgctcggcatgcggcggtggcgatgtggtgctattggtaatgactccgttggtggcgctctccacctcgacagtcagctgctgctgctcctccgctgagtcctcaggtggcgaggtggcatccacgatggcagagcgcgtcgagaggatgaactggcgctgtggagccaggcgtgtggtcattggggtttgatgttttgcgctcgctactccacaaagttatttgctccgatgatggtagtggctgcacctgggttgctaaattcgttgactaagtaggtaagctcgtattctattctagatccctctagtactagttattcactcgtcttcgaggtctaaggcaatggcggtgtttaggttcaatgtttcggcttctttaagtggcccctggtggagatgctgtaaggaaaaagtgaaattttgcaaacttaacaaggcatgtcgtcaatcaaagagcaggtattcaataaggaatcaacatcatcatccacccgagcgctcaatcccactccattcccctatcccaatggtccccgcctcccaaggatcctttgttgttgctgcggatggtggtgtgggtggtggcggtgctgtggtggtggcttgtgcagcttccgctggggcgttgctatgaaattaaacttttcgcaggtatttcttgatgctttgatttcctcatcgctttgttctccgcgcagcaggagcagcagcagaaaaatatatctctacgtatataagtataaatatgtgcatatatatacggatgtctattgtgtacaacgtcgtattttttccggtcggccattttgatttccctccaattgctggggaatctttgggcaagctccttcgtttcaagtacatcatacatttgggggcaatgttttggggatttctcgttttttgttgttgttgttggggaatcaccagaggcaaaagcgtagtaggttttattttgaggaggggcttcgaaacagcgttcataaaacttttaaggtaaactcttaaattcaaatattttcgaaactttaaaaattactggtaatataaaagcaaactatatcaaatggtttcaatttcgtgtgaatacaactttctcctataaatcctatattatgttacacacatactactaacttaattatccttagtgattgcctcgggttagtgttgcccattgagttcactgtacttacataataccacacccggggtatccatttttggcctacggctctgcctttggccaattaagttgggcaaattgtaattgtcgagaacaaaattacatgcgcgtatcaatcaaaggaaaacacaatttatttaggtaactcacatatatcgttaataaacaacaagttacttttcagtagaatttatgctatggaaagttaaagttca

SEQ ID NO: 13574 - DNA, 3567 bp, DROSOPHILA
agcatctccaccaggggccacttaaagaagccgaaacattgaacctaaacaccgccattgccttagacctcgaagacgagtgaataactagtactagagggatctagaatagaatacgagcttacctacttagtcaacgaatttagcaacccaggtgcagccactaccatcatcggagcaaataactttgtggagtagcgagcgcaaaacatcaaaccccaatgaccacacgcctggctccacagcgccagttcatcctctcgacgcgctctgccatcgtggatgccacctcgccacctgaggactcagcggaggagcagcagcagctgactgtcgaggtggagagcgccaccaacggagtcattaccaatagcaccacatcgccaccgccgcatgccgagcagttcgagttctgcacggaggatggagtcgttgtgtccgccacactggaggatgtcatgacacaggtaaaacttttccccctcttgcagaactgccagctcttgcagaagaaactagtcgacgaggacgacgattcgacgggagtaggagcaacggatgccgatcagctggaggtgattagcgttgtactgcccatggatgccgaggactcgaccagcgatgcccatctacacgggcatgtggtgaacagcagcagcgacaccatgggtaccattaccaccacggaaccgaatgggaccaccgtcacccactcgatacccattcacagtatggccgatctggccgcgatcaaggatggcgtggatctggcccagcaggtggccaatggccaggtgaccgtggtgcagaccaccgaggacgacgatggaacgcccttcattaccgtgacggtttcgggccaggagcagaactaccaagtgcaatatgtggactctgagctgtaccacagcaactcaagccagacgcaaatgacgtatccgttctgcccagtgggggactaccagggcaacggccagacggcgtactactcgaccacgggtcagtacggaaccacctcgtcggccggaggctcctcgaacggagctcactccacgacgctgccgtacctggtgcccgtggaggagggcatcctcctcaatggttccgcacactcgctgtcgcagtcgcagtcacaatcgcatggacgcgattcgccgcacagcctgacggaggtcgcgtacatccaggaggcgcagagcacgccccagacgcccacctcgacgaccacgacccattcggctagcggcggcagcctgggaacgggcggtggaggcgcctccccggattccgaccagagtgcgctcggcagcagcaacaagattgcctcggcaacgatcaagtggctgtcgcgcaactacgaaacggcggatggtgtgagcctgcccaggagcacgctgtacaaccattacatgcagcactgcagcgagcacaagctagagcccgtgaatgcggccagtttcggcaagctgatacgttccgtgttctccggactgcgcacacgtcgcctgggcacgcgcggcaactccaagtaccactactatggtatccgcattaagcccggctcgttgctgaacagccaggcgatggacgacaagcagatgctggccgccggctacggaccatcctcggacggaaccggcggaccaggcagcggaccgatggtcagcgtcaccagcagcaccgccggacagctgaccggatccaatggattgggcggtggccatggccagcggcacagcaacggcaccaagaagcacaccttcaagccggagacctacgaggcgtgcattcagtacatcggcgatggaaccagtgccctgccctcgtttccgcccatcgagctgaaccacagcttcaacagcgaactgaccctggaggacgtggacaccttccggggcctgtatcgggagcattgcgagtccttcctggacgccgtgctcaatctggagttcaacaccgtggagttcctgctgcgcgacttctggcgggccagcgacaacaataatctggacgagtgcgaggaggagaagtacttgagcaagacgaaactgtatctgttgtgccactgcgcagaagtgcagaagttcgtgcgagaggtggactaccaattctaccagaacaccgtcgatgtcatcataccggatgtgctccgctccataccaaacgccctgacccaggccatcagaaacttcgccaagaacctggagatctggctatgtgagagcatgctgggcgtgccggagcagcttgcccagatcaagaccagtgccgtctcggcattctgccaaacgctgaggcgctacacctcgctgaatcacctggcgcaggcggctcgagcagtgctccagaatggtgcacagatctcccagatgctaagcgatctcaatcgtgtcgatttccacaatgttcaggagcaagctgcctgggtgagtcaatgtgcgcccgccgtggtccagcgcttggagagcgatttcaaggccgctctgcagcagcagagctccctggaacagtgggccagctggctgcaactggtggtggaatcggccatggaggagtacaacgggaagccgacttatgccagagccgcccgccagtttctgctaaagtggagcttctacagctctatgatcattcgtgacctgacgctgagatccgcctccagcttcgggagcttccacctaattcgcttgctgttcgatgagtacatgttctacctggtggagcacaaaatcgccgaggcacaagacaaaacagccattgcggtcatttgcgaaagaatgaaaaaggacatggactttgagttcgagtgccagttcgcctacattaccagcgacacggagcaccagacgactccgagctcggccagcagtggaggcgacgtgggcaacgaggccaagcgactgaagcaggaatgaggccccgagatttggatgtccatgtggatgcagtggctggcatggagcggcatattcgtagtgtttatgtaaccagtaaccgttgaccccatcagtgtgcacccccagcccctgtcgtcaccagtcattcagctctgcatttaataatggaaccgtgttgtatatccgtaatcgtatcgtatctgtgtgctagtttatagcccttagttccctcacaaccagcgtagtcagtcaaaattttagtcgttagttttaggcaggatcctcactcatatgcaggaaaagatcttttggacgggcacttgcgaaaatagaaatgtcatgatattgttcacttttaaccatttctgttggagattaggcaaactgttcactgaatgtacgttttcagagtatattacttttggtttagtaactaagccattgttttatgatatgggtcttagcttgttgaccgcccaagggagctttaactgggatttgtcgagtgttggactgcccccgcatcgaagtgaagagccgtccagagagcaagcaagttgaaagccagtgcgacagcatcgtctggtcttgtctggcctgatctgtattcgtaggatacgttttagtttaagtacatgtgcattaataattgtaatcaactgtctacgat

SEQ ID NO: 13575 - protein, 897 aa, DROSOPHILA
MTTRLAPQRQFILSTRSAIVDATSPPEDSAEEQQQLTVEVESATNGVITNSTTSPPPHAEQFEFCTEDGVVVSATLEDVMTQVKLFPLLQNCQLLQKKLVDEDDDSTGVGATDADQLEVISVVLPMDAEDSTSDAHLHGHVVNSSSDTMGTITTTEPNGTTVTHSIPIHSMADLAAIKDGVDLAQQVANGQVTVVQTTEDDDGTPFITVTVSGQEQNYQVQYVDSELYHSNSSQTQMTYPFCPVGDYQGNGQTAYYSTTGQYGTTSSAGGSSNGAHSTTLPYLVPVEEGILLNGSAHSLSQSQSQSHGRDSPHSLTEVAYIQEAQSTPQTPTSTTTTHSASGGSLGTGGGGASPDSDQSALGSSNKIASATIKWLSRNYETADGVSLPRSTLYNHYMQHCSEHKLEPVNAASFGKLIRSVFSGLRTRRLGTRGNSKYHYYGIRIKPGSLLNSQAMDDKQMLAAGYGPSSDGTGGPGSGPMVSVTSSTAGQLTGSNGLGGGHGQRHSNGTKKHTFKPETYEACIQYIGDGTSALPSFPPIELNHSFNSELTLEDVDTFRGLYREHCESFLDAVLNLEFNTVEFLLRDFWRASDNNNLDECEEEKYLSKTKLYLLCHCAEVQKFVREVDYQFYQNTVDVIIPDVLRSIPNALTQAIRNFAKNLEIWLCESMLGVPEQLAQIKTSAVSAFCQTLRRYTSLNHLAQAARAVLQNGAQISQMLSDLNRVDFHNVQEQAAWVSQCAPAVVQRLESDFKAALQQQSSLEQWASWLQLVVESAMEEYNGKPTYARAARQFLLKWSFYSSMIIRDLTLRSASSFGSFHLIRLLFDEYMFYLVEHKIAEAQDKTAIAVICERMKKDMDFEFECQFAYITSDTEHQTTPSSASSGGDVGNEAKRLKQE

SEQ ID NO: 13576 - DNA, 6916 bp, DROSOPHILA
tgtacaacagccctaatattagatatttaatgttgttcatataacaaatatcccgaacatcaacaatatttccttatgatctaatgacccttatgatcagttaagctttcagccctttatgcaattggttatttcggtccagaaggcctgaacttcaggatcctgcattaaactacgtttcttagcgttcaaaactatgttgaggatgtcggcatttttgcagcaatcccgtctggcggatttgccatccggcgcctccggggaaaagccttccgtctcctggtcatccattggatccacttcacccgccggactgcccaattgtccaactgcaaaataacaatgtatttgggggaatctattgcttaatcaacttaaatacctttcttgcacttggtcgcctctgttttcggtttttctgtccgtttttggtagggttttcttggttttgagacatctttcgtcttgctgcgcttggcattcgcatcggtgggcagcaattcgggactctcggcgggattatccgcatcctgctgcaggcgccgcttgacgtgcagattcaggcgctccttgatgttttgctgttccagttttatttgcacaccagtggtttctgccatgtttttgcgttttgaatataaaaacaatatccaaaacagtccaccagtgtgacccctaaataaatcttacaaaaaaataaacagtaacgtaagatacaactttctcacttgtatttgattgttcctaattatttctaactatgtaaatatcgttagtattggatgcaaagctatggcggtagacgtaaggaaggaattatcagtgcaatttagaagttaaataaatttgttatctaataattatttggcaaaatttgtggcagtgtgaacggaactgggttgagtctccgctaccccatatccgagccacgcaccccaggtctgcatttgtgtcgatggcaaatctggtatttttcagcgacgccatgttggattgcgaacaacagttaacagcagcaaacgagaaatcagctcgcagcgcagaaaaattaaaaaatatcgccgtaaaagtgagcccaaccgacccaaaacatatgaaaagtgtgaattaaaggacaataaagatataaatcattaattaagctttgagcaagcgcgaaaagtacgcgaaatcaacgttttgcaaaacgttcgccatacgcgtcgccattggtgtgagcgatagcttgcctgtgtgtgcgtgtggtattggaggaggtgagagcgcctgtgtgtgtgtgtgtttgcgtgcgtgtgtgagagcgagcgagcggcccctatgaaaagcaacagcaacaacgccagcaaaggacccgcaacaacaacaacaacaacagcaagagtaacaagcacagcgttttaatatccaaataatgagtgtcgctgcaatgactatggacgatcaaagaccctgtatgaacagttacgacaaaatgcccccgaccaaatacgagcaaaacctaaatatcctaaacagcagccaaaacagtggggccactggcggccccgcctccccaacgccctccggcttggaggaccaccatcatcatcaccatccgcatccgcaccatcatcaccatcaggagcagcagcagcagcagcagcaacagcaacacttgcagcagcagcaacaacagcagcagcagcaacatgcagcagctgttgcagaggctgttgcagccgccgaacagcgacagcgcttgctcgaaggtattttgcacattttggtacactgctatatgatcagagatctatctgatctatataataccccctatatactacatacatactcgtttcgaataccgacaaaaaaaaaaagaaaaggaaaaaaccacgatccaaagtgttgactctgtgtaaattgtataaataatgcaatatataaacaacaagtaaacgtagtcttttagtttatttctgcccccactccacttgggtttcttgtgtcatttgaatttgtttatgaaaaacactcggtaaagaactcaacgtatatattatgtgaatcgaatcgaagcgaacactctttgcaacgaacattctttcagcggcgttttggttaactttatttatttatttttttcaacaccacctcgagcaaaccgtcgaatgtagtgaaagtgctttcaaaaaggaccatgcatataataatctataatacctaaatatgaactaagttaaaaggcaactgacgcctaaagttatcaagtgattacaaagtgttgtgcaacagaactatctaaaatataaaatatgagttaaataatcataaataatatatgagaatcgtaaccaattataaccagtaagctgagctaagctttaatattgaaagcaatcgtacttaaaataaaaaattataaaatgaatcataagaagataaggttaacgaagtaaagtttaagattttatataatcttaatgagaaaaccgggctgataataacatcaaatgaatagagcatatcaagtaataatagtagagaatcctaatcggagattttcctcgttttccgtcgtttttgcggtgtacagttttcgttttgcgaccacttttcgtttgcctacgtgcccgttgaagaagaagaagaagcacagcagcagagaagtggagaggagaagaagagagccaacgtgtctgcgtcccctgccccaccccctggacccatcttattctctctcttcgcgcccctcacgctcttttcgtcgcgcctaaatataaataataatattaaataatcaattgaaaatgtgacagtgcataaccaaagagaaaataaagttgaaattctttttctgttgaaattgtgttaaagaagtgaacgtcaaatgaaaaaaacattgcctcgtgtgttcaaacaaatacaaatgtttaaataaatggcgccaaaatacggcgaacatgtgtgcgtttgtgtgtgagtgtgtatattcacaattgttaagcttacttaattgatttttaaacgcttaattggccgccaatcaatcaattaacatgcaatgtgggacacacgcacatgcacacatttgtttgccccgatcaaatagtatatataaatataaaataattgcttggctaagtaaatacaaaagcgaagttatatatgtacgtgtttgcacaacaaatccaacaaaaaatgcaaagtcaataaactttttgtatgacaaaagagtgttcgaaaatgccgcaaaaaagagaaggggaaaagcttttgaaatccatgcatacatacatccatgcataggcatacgaaaaagcttccgaaagcccattgtgtgtgcgtcgagttttttgcaagtgtttttcaaaaatattttcagttttgccacaaaaaatatgtataccaatcagtcatcgttgttttccacagtgtatgcaagttcgaaaatgccgcgaagattcaaattcaatcgccaatcaagttcgatgcaaatgcaaatgcataagcaaaagcaagaaatcaaaatgcaaataatggcaggtgttcaagttattcaagtgccaatgataatgccagagataacgaagcaatcgaaatcgaaatccaaaccgcaagcgaattcgataccgaaatcgatatcgtgttgtccaagttcaagtggttcaagttgtgacactcgcatcgaatcaaaatctaaatcaatatcattatcagccagagattgacgacgggatgcggccttttccaccgaccatgtcacgaacttacacgaatgattgcaacgcattggtatgatttcgtattaagttccacctaaaaaaacaaacactttgccttgcccattaagaacttgtaaaatatctatgtatatatagtacgatattgttatatctcgtgtgcgaaccaaaaaaaaaaaaaaaagacagtggctctctcagcttggaacgcccgttatctagaccccattattagctaatccttatccttcgattcgcagatgagatcgagaatctcaagctggaacaggtccgcatggctcagcaatgcgcggacgcccagcgacgcgagaagatcctcatgcgacggctggccaacaaggagcaagaattccaggactatgtggtgggtactcgccttaatatacacaaatttctcaaatactaatgcacccgtaatccccattagagccaaattgccgagtacaaggcccaacaggcgccaactgccctcgcattgcgcactgctctgctcgatcctgcggtcaatctcctgttcgagcggctcaagaaggaacttaaggccaccaaggccaagctggaggagacccagaacgagctgtccgcatggaagttcacgccggactctaataccggcaaacgcctaatggccaagtgccgactgctctatcaggagaacgaggagctgggcaagatgacctccaacggcagactggccaagctggagaccgaactggccatgcagaagagcttcagcgaagaggtcaagaaatcgcagtcgggtaggttaaatctgaactaggattgggatcgaaacttatagatatgtaaactcctttaccatttagagttggacgacttcctgcaggagctggacgaggatgtggagggcatgcagagcaccattctgtttttgcagcaagaactaaagaccacacgcgatcgcatacaaacgcttgagaaggagaacgcccagttgaaacaggccatcaaggatgaggttgtggctccagcggctgccaccaacggtggcaccaacacgacgataaataagctagagaccattcacgaggacgcttgcatggcgaataacccaacgaatccggattgttacaatgggaataccaacaacgaacagatcgcggccgtgccacagataccactgtcggatgatggcagcaatatgaacggaaatgcagcgcgattagcccgcaaacgaaactaccaagaggaggaagcccttccaacggtagtggtggtgccgactcccaccccagtaggaaataacgtccaggaagcgccgcccatcagggaagttaccgccccacgtactctgccgcccaaaaagtccaagctgcgaggcattaccacgcgtcgcaactcccagctggaggaggatcatcagccagtgacaacaccagtggccgtccccatgatcgtggacaacgctgtggccggaatggcgagcgaagaggctgctgccgccgctgcggctgttaataacagcaatacgggaataatcccggaaacgggagtgcaagtgggtgtcccagttgagggcggcgatccaggtgctccggcggcaccgggccgcatcctgacccgtcgtcggtccgtccgcatgcagcagaacggcagcggagcagtcgactactccacctaagcgctggcgaacctttttccaaaaaagggtgcactccatatgagttcgtcaaattgatcgttaattcctgacgtttacttttgtgaattgagatttcaaaacagagagagacttcattttatatttctaacctatcttttagattctttaattttttttacacattgtcttgtaaaatacgtttattatttcgtttgcatgcggcgtagacatacataattcgcaaattatttagaagtcactgctttacatacgaaatgcattatgtagaacagtgtaaaacttcagcacatatatttacaataatacgatcgagctaaatgataatgctaaaaactgatacactatttatgttttttaaccacggcatctactgaaaagctgaaaagaaagcttggtcaaaacaaaacttgtcatttagcaaaattaggttttaattatcaacttaaggcatttttgtaatactatgaaagttgtgtaaaataatataaacttgtgttaaaataaattgttaagcataacaaatatttcaaaaaaccagtgtcctttaatttcaattgccgcccagcaaaacaatcgttttgattttcgaaattatcttgtgtttattatcagtttcttcttttagcacattagacaaatggttttacttgtatttgattgaattcgaaatatgtttatgtatgtagtacaattgtggctgccagcgagtgtgtttgtatcctttgtttcgtttgtgtctgtgagaagagtttaaacttgagatcgggctaaaatgttctggtaaagaggcctgcaagcttggcatagtttgatatttgctttaccctactttcaatcgaaatgtacaaaatgagtagggatgtggtgagacaacctgcaagggggttaaacgtacttccgattccatattaaatagttaataacaaatactaggcagttcgaatggcacaagttgattacactaccatggggaaatgtggggtgtctaaagcttagcgagttctgttccgatcggaggagatatcctttcggctgagagtttgtttgtctagatgtacgatagtttgttatggtaaatttcaactagtcaatggtttaagtgtagtattattaataatttagtcgctagatgctgctgcgtttactcaatcgtctcagttctgtggctcgtatcaagtagttagtaataaaaagtatttctcatatatgtatgtaggtacttgtgggtaatgctaggtatcgtcatcatcagtgtatataaaaacaatgcctttaaatcggatctctttttggttttgcttgttcttgagtggcctacaatgtcctttttaacgaatgtctataaaagtatgtagttttccaaggctccgaggctgaactttcggttagtttttctctgggctaggctaagcaaatatacaaaagctacttaaattagttagcatgtacagtaccgggcgtactcgtaggtatatatcgtattatcgtatgagtgtgtgtatatataattaaatggttccattattcg

SEQ ID NO: 13577 - DNA, 2553 bp, DROSOPHILA
caacagttaacagcagcaaacgagaaatcagctcgcagcgcagaaaaattaaaaaatatcgccgtaaaagtgagcccaaccgacccaaaacatatgaaaagtgtgaattaaaggacaataaagatataaatcattaattaagctttgagcaagcgcgaaaagtacgcgaaatcaacgttttgcaaaacgttcgccatacgcgtcgccattggtgtgagcgatagcttgcctgtgtgtgcgtgtggtattggaggaggtgagagcgcctgtgtgtgtgtgtgtttgcgtgcgtgtgtgagagcgagcgagcggcccctatgaaaagcaacagcaacaacgccagcaaaggacccgcaacaacaacaacaacaacagcaagagtaacaagcacagcgttttaatatccaaataatgagtgtcgctgcaatgactatggacgatcaaagaccctgtatgaacagttacgacaaaatgcccccgaccaaatacgagcaaaacctaaatatcctaaacagcagccaaaacagtggggccactggcggccccgcctccccaacgccctccggcttggaggaccaccatcatcatcaccatccgcatccgcaccatcatcaccatcaggagcagcagcagcagcagcagcaacagcaacacttgcagcagcagcaacaacagcagcagcagcaacatgcagcagctgttgcagaggctgttgcagccgccgaacagcgacagcgcttgctcgaagatgagatcgagaatctcaagctggaacaggtccgcatggctcagcaatgcgcggacgcccagcgacgcgagaagatcctcatgcgacggctggccaacaaggagcaagaattccaggactatgtgagccaaattgccgagtacaaggcccaacaggcgccaactgccctcgcattgcgcactgctctgctcgatcctgcggtcaatctcctgttcgagcggctcaagaaggaacttaaggccaccaaggccaagctggaggagacccagaacgagctgtccgcatggaagttcacgccggactctaataccggcaaacgcctaatggccaagtgccgactgctctatcaggagaacgaggagctgggcaagatgacctccaacggcagactggccaagctggagaccgaactggccatgcagaagagcttcagcgaagaggtcaagaaatcgcagtcggagttggacgacttcctgcaggagctggacgaggatgtggagggcatgcagagcaccattctgtttttgcagcaagaactaaagaccacacgcgatcgcatacaaacgcttgagaaggagaacgcccagttgaaacaggccatcaaggatgaggttgtggctccagcggctgccaccaacggtggcaccaacacgacgataaataagctagagaccattcacgaggacgcttgcatggcgaataacccaacgaatccggattgttacaatgggaataccaacaacgaacagatcgcggccgtgccacagataccactgtcggatgatggcagcaatatgaacggaaatgcagcgcgattagcccgcaaacgaaactaccaagaggaggaagcccttccaacggtagtggtggtgccgactcccaccccagtaggaaataacgtccaggaagcgccgcccatcagggaagttaccgccccacgtactctgccgcccaaaaagtccaagctgcgaggcattaccacgcgtcgcaactcccagctggaggaggatcatcagccagtgacaacaccagtggccgtccccatgatcgtggacaacgctgtggccggaatggcgagcgaagaggctgctgccgccgctgcggctgttaataacagcaatacgggaataatcccggaaacgggagtgcaagtgggtgtcccagttgagggcggcgatccaggtgctccggcggcaccgggccgcatcctgacccgtcgtcggtccgtccgcatgcagcagaacggcagcggagcagtcgactactccacctaagcgctggcgaacctttttccaaaaaagggtgcactccatatgagttcgtcaaattgatcgttaattcctgacgtttacttttgtgaattgagatttcaaaacagagagagacttcattttatatttctaacctatcttttagattctttaattttttttacacattgtcttgtaaaatacgtttattatttcgtttgcatgcggcgtagacatacataattcgcaaattatttagaagtcactgctttacatacgaaatgcattatgtagaacagtgtaaaacttcagcacatatatttacaataatacgatcgagctaaatgataatgctaaaaactgatacactatttatgttttttaaccacggcatctactgaaaagctgaaaagaaagcttggtcaaaacaaaacttgtcatttagcaaaattaggttttaattatcaacttaaggcatttttgtaatactatgaaagttgtgtaaaataatataaacttgtgttaaaataaattgttaagcataacaaatatttc

SEQ ID NO: 13578 - protein, 536 aa, DROSOPHILA
MSVAAMTMDDQRPCMNSYDKMPPTKYEQNLNILNSSQNSGATGGPASPTPSGLEDHHHHHHPHPHHHHHQEQQQQQQQQQHLQQQQQQQQQQHAAAVAEAVAAAEQRQRLLEDEIENLKLEQVRMAQQCADAQRREKILMRRLANKEQEFQDYVSQIAEYKAQQAPTALALRTALLDPAVNLLFERLKKELKATKAKLEETQNELSAWKFTPDSNTGKRLMAKCRLLYQENEELGKMTSNGRLAKLETELAMQKSFSEEVKKSQSELDDFLQELDEDVEGMQSTILFLQQELKTTRDRIQTLEKENAQLKQAIKDEVVAPAAATNGGTNTTINKLETIHEDACMANNPTNPDCYNGNTNNEQIAAVPQIPLSDDGSNMNGNAARLARKRNYQEEEALPTVVVVPTPTPVGNNVQEAPPIREVTAPRTLPPKKSKLRGITTRRNSQLEEDHQPVTTPVAVPMIVDNAVAGMASEEAAAAAAAVNNSNTGIIPETGVQVGVPVEGGDPGAPAAPGRILTRRRSVRMQQNGSGAVDYST

SEQ ID NO: 13579 - DNA, 4725 bp, DROSOPHILA
gagatctccaatgctccgtagttggctccatttcgccaggtaaacgctgtgcggggagtcggtggtatctgtaaaggcagaaagtgaaggtgttgaagtttaatttttaaatggcaataatgtgaaattacgataacattcttatcaacaaatccatttaaatattaggcattaccttgcaccccctgaatgatgtacacctggaggtcagtgagagtgtccaaatggaatcgccaaccggtgagcagttgctcatcgttctggagcaccacaagtgtttttttggcgggtggtagggcacttagaagtgccgccaccgtagcgacctttccaaggccactctcatcattcaggatgcagaattcccgcttagccaaacgatcgtagacgaagcggacggcatccagttgaaagctcttgaggtactgcgtcacgtggctcgtgaccagtgcctcatctgtgagccgcacctccggcgtttgctcggatacaaagtgatacatgatccttcagagaattcgaatcaatggtgtgcgtgatgcagggccagatagatggcaaccaggatgtagaatagttgcaggtacgagaagatcacgaacatcgaaaatgaaccaattatcatctttcgcgccgcagacggcccatcgaattcgatattctccggatgcagtatgtccaccacgttgtagttgttgttgatgataacaggatgttggatctcgtacatgtgttgaaactagttaagcttcaattttttcggaggacaattttcgtcccttttgggaaattgggttaagcgctgttagtcatggcgggggcgcgggaaaaggcttaacaatcgaacaagaagaaaatattatttttggctccaattctatttcaccattcacacagaaccggctgcgtcttgttggcgcgatcagctgttggacgttggtagtgttggcaaacgaagcaatgtctagaaatagccaaaagagatactgctcttgattaatagcaaaatattaaaaaaaacttactgaaccgacaaggattagtaaaatacattaggttggaaacctttggcgagtaaaatgtttttaaattaaattatttattctgccaactcaaaacttgtgtaaggaattcatttttatagctgcatttagctcatcactgttgcaactgttgtgatttcgtttgcggtttgtttcgcatggaatttgtttaaatttattcagaccaaattgccatggctgttgcaaagaaggaaaaatttgaggcaaaaaagaaaagccctgaaaagggaaaacagcagaaagccaaagttgttcctgtcacaccgccaccaaatgtaaaacaacgaactgtggtcactccttggcgagacacgtgcgtagacaaaaagtggaaacaaatccaatccgttgataaaaacattacattttcaggctggaatttaatacaacgtacaaatggttgtttggcaagtccaacacaccagccacatggcgtcaagcgctcagtaaaatccgcatttggtgtctgcgaagaggaagtctctgcccggcagcggttttggccacatcggtgcttgttcaggcgcacttggaggaccaggagggcagcgccaaaatacaggacacctatgccagtgcctttacacgattctacaactttatgtcctccattatccagggacacaacatgtccagcatgtatgaaacggccaaggaactgggcctccagtcgttcatcgttgatctgcgccacttgtgcgcccatggacaggagctgccgcctgtggaggtgctgagaaacacctcgaatcattgtctggagtggctgcgcacctactactggttgccacacatggaaaccatgtccaatttggatgctggcaaactgcatcgcaaggacaagcttaagtttgaaaaggctgtgacagatcttctggagatctacgatctaaccctggagtgccatatcaagggggctgagaaactaaaggccattagcaagctaaaatccagtggtgaattcaataagatacgagtctactcctccagcaagaaggcgaagacatcgaaagaaattctgagtgctgtgttaggtgatctaagtgcgttggtcaaaaaggagtcatcatcgatgaaggatctgctggacatatatacaaaatgcctgcttaaaatgaaatacttccttggcgttggcttggaaatcgacgacaacgaggatgtcatcattgcagccacacagggactcttccgtctattggccgtgcagggatatatcgagaaggtttttttggccctagttcaactgagtgaaaaccaaaacgagtcggagcaaaggcgtctgggagccagctactgggcaaagaaaatgttggaaacatttgggatgctgttccgtatgaagcgcatgtacaaagccgaactggatttggttagtataaatacggagtgtgttaacgatgaaaacactaaaatattctttattttccagaacgataaactaaaaccagcggactttgccaccctaaacacggataaaatttctaagacaatgcgcagtctgttagtacactcaaatgccgatctctcggttacccttatttttggcgacaatcccaaaaagtccaggtctttgatttttgatcgtgattttattatgcagcgtgttgatgcatttagcaattactcagcgcccattctaaaagggtaggtatacatttttttttgggtttacttgcttttggattaataagattgacattttcttagattattaccgctcgcagatcctccatacaccaagacgcaaattgaggatttaactaaactctgcgatgcacagcttgaagaattttatgaagaggaagctatggaagaagatagctcttcagaggagagcaacaatctagaccgtttggaacgatttttggaacaagcagctcaaagcaaagagcatacatcagactggggagtttggaaattagacaagcgtaagttttgatttggctttgcatttatgtgatttgaaaattaatcaattatcgctcttactgtaaatgctatttccagataccgattggcccaaatgtgcattgggtgtgctcccttgggctcaataaatacgcagattaatattaaataaagtaattaataaaaactagtactagatccagatttgaatttttatttggcgcgcatttcttgtccatataatcatttaccattcacaccgagcgccaacatcagctgagtctgcgctcatagtgaatggcagtcggcatcactgacgtcaacaattattggcgattttggtttattttgatgtaaataggaataacttcgcgcaattatgtttactttgtggacactgattgaatcttcactcctgtgcctgaatgcggtgtgcattctgcacgaggaacgctttctggccaagtgtaagttctcatacagtatttttgcttccaatgccacgatgttcaattttttggcacactttttagttggctggggacgacaggcgggccagcaggactttggagcacctacggccaaggatcaggtgctaaacctcattcgttccatacgcacagtggccaaaagtgagtaccatattactatgtttctataaacatgattgcttcaccatatcccattctttcagttcccctgatattccttaacataattgcgattatatttaaactattacttggttgacatagaatctaatataataaatgtgtaccataaagcccttttaatggagaagtcttattgcgccacttgaccgcctccggatttcctttgcagcacgcacttgacgcgattttctagggctatgctgtatgcgtccagtttataggccgccgcctccaatttgtcgacggtgtcggaaatctcatcgatttgctgcatcatcggagctaattgctggaacttgaggctcaattcactggtcgaagtattcagattctcggcaatctgccgcatgtccttgtacttggcaatcgtagccttgttcatctcctccagcagcttgtaatcctccagcggagcgttcagttcgtgtgtgatgtactcctccgttttgttgaacattttcgtggccaaacgactgagattggggtcgtgtcgcgtcagtgcctcgaaactggaggcgctggacaacgttggtccgtgttgtggggagtccggaagaaggttggaatcctgagccgcagcagcagcggcgctagttgtgggtttatccatagtctatccaaggaagttgcaacacgattttcttagttttccaaaaacaaagtaataattgcaatcagctgatgcttgcgtttcgatgggaatggaaattaaaagttgattgcttgacattcgcatcgaaactcgtattatatacttagtcaatagaaactcgaatgttaaataccctatattaaacttttaaaacctaacctagaataggcaagattactattcagggaagaccgtttttataatgactctttatcttaaaacaaatatatgtattagttatgacgttatagattataatcgatagagaagcatattgaaatattggggcaagtgctaacatcctatagcttttcatcaatctggaaaacattgtgccccccatgctacaactaataggtatgaaatgccgagcattaacaagttagatctattcacattttgtaccataaatgcaagtacacat

SEQ ID NO: 13580 - DNA, 1890 bp, DROSOPHILA
tagcaaaatattaaaaaaaacttactgaaccgacaaggattagtaaaatacattaggttggaaacctttggcgagtaaaatgtttttaaattaaattatttattctgccaactcaaaacttgtgtaaggaattcatttttatagctgcatttagctcatcactgttgcaactgttgtgatttcgtttgcggtttgtttcgcatggaatttgtttaaatttattcagaccaaattgccatggctgttgcaaagaaggaaaaatttgaggcaaaaaagaaaagccctgaaaagggaaaacagcagaaagccaaagttgttcctgtcacaccgccaccaaatgtaaaacaacgaactgtggtcactccttggcgagacacgctggaatttaatacaacgtacaaatggttgtttggcaagtccaacacaccagccacatggcgtcaagcgctcagtaaaatccgcatttggtgtctgcgaagaggaagtctctgcccggcagcggttttggccacatcggtgcttgttcaggcgcacttggaggaccaggagggcagcgccaaaatacaggacacctatgccagtgcctttacacgattctacaactttatgtcctccattatccagggacacaacatgtccagcatgtatgaaacggccaaggaactgggcctccagtcgttcatcgttgatctgcgccacttgtgcgcccatggacaggagctgccgcctgtggaggtgctgagaaacacctcgaatcattgtctggagtggctgcgcacctactactggttgccacacatggaaaccatgtccaatttggatgctggcaaactgcatcgcaaggacaagcttaagtttgaaaaggctgtgacagatcttctggagatctacgatctaaccctggagtgccatatcaagggggctgagaaactaaaggccattagcaagctaaaatccagtggtgaattcaataagatacgagtctactcctccagcaagaaggcgaagacatcgaaagaaattctgagtgctgtgttaggtgatctaagtgcgttggtcaaaaaggagtcatcatcgatgaaggatctgctggacatatatacaaaatgcctgcttaaaatgaaatacttccttggcgttggcttggaaatcgacgacaacgaggatgtcatcattgcagccacacagggactcttccgtctattggccgtgcagggatatatcgagaaggtttttttggccctagttcaactgagtgaaaaccaaaacgagtcggagcaaaggcgtctgggagccagctactgggcaaagaaaatgttggaaacatttgggatgctgttccgtatgaagcgcatgtacaaagccgaactggatttgaacgataaactaaaaccagcggactttgccaccctaaacacggataaaatttctaagacaatgcgcagtctgttagtacactcaaatgccgatctctcggttacccttatttttggcgacaatcccaaaaagtccaggtctttgatttttgatcatcctccatacaccaagacgcaaattgaggatttaactaaactctgcgatgcacagcttgaagaattttatgaagaggaagctatggaagaagatagctcttcagaggagagcaacaatctagaccgtttggaacgatttttggaacaagcagctcaaagcaaagagcatacatcagactggggagtttggaaattagacaagcttggctggggacgacaggcgggccagcaggactttggagcacctacggccaaggatcaggtgctaaacctcattcgttccatacgcacagtggccaaaattcccctgatattccttaacataattgcgattatatttaaactattacttggttga

SEQ ID NO: 13581 - protein, 550 aa, DROSOPHILA
MAVAKKEKFEAKKKSPEKGKQQKAKVVPVTPPPNVKQRTVVTPWRDTLEFNTTYKWLFGKSNTPATWRQALSKIRIWCLRRGSLCPAAVLATSVLVQAHLEDQEGSAKIQDTYASAFTRFYNFMSSIIQGHNMSSMYETAKELGLQSFIVDLRHLCAHGQELPPVEVLRNTSNHCLEWLRTYYWLPHMETMSNLDAGKLHRKDKLKFEKAVTDLLEIYDLTLECHIKGAEKLKAISKLKSSGEFNKIRVYSSSKKAKTSKEILSAVLGDLSALVKKESSSMKDLLDIYTKCLLKMKYFLGVGLEIDDNEDVIIAATQGLFRLLAVQGYIEKVFLALVQLSENQNESEQRRLGASYWAKKMLETFGMLFRMKRMYKAELDLNDKLKPADFATLNTDKISKTMRSLLVHSNADLSVTLIFGDNPKKSRSLIFDHPPYTKTQIEDLTKLCDAQLEEFYEEEAMEEDSSSEESNNLDRLERFLEQAAQSKEHTSDWGVWKLDKLGWGRQAGQQDFGAPTAKDQVLNLIRSIRTVAKIPLIFLNIIAIIFKLLLG

SEQ ID NO: 13582 - DNA, 2753 bp, DROSOPHILA
tatagttaacgaacgctgcaattgcaaatttcactggtgttgccaggttaaatgtgaagtttgtacgaaggtactcgaggagcacacatgtaaatagagcgttgattgaattcgaatgtcttaatgtttgtgactaagccatgaaggaaataatcgtatttaaacagataattatttattgaaattacatttaaattaatgattgtatttaataataatttttactaatttaccggcttttaagcactaccaaaatcaatcggcggataacattaaaaagccccccccccccccctcctctccattttaattgccattaccatacaccatcatattgcttcttcttaaaatgctaagaaaacgataaaaaaggaaaacgaaaacgaaaaaaaaaactgctaaacaaaaccaccttacttatgtatagcttttagaaatcattagttttaagtataattctggtagggttggccttcttcaaaaacaaaaaaagaacatagtgaaggtttcaacacaattttaaagaactgttgtattttttttaattaagataatattactgatatataatattaaatatattactgaatggaataagtcataaaagcgaactttccttctagatctatatggactataattttctttgttcgagcgggtaaaactaggaagatatcacggaaattaaagtatatttgagttcgtaactatctagataatgtagaagttataccttttttttaacttaattagttgcacagattactttctcactcataggccttgaaattgtctaataaaggagtaataacaaatataatttctaatccctaaaaggaagatattattaaagttaaattgttaaactatatacaattttcttaacctatcaactctatatacaatttaatcaactctatatactctatatacaatcgtttacttctttcagttcctagcatcattttgtcctaagattaataataataatttaactatgttaactgggctgagtcagcaatgcctcagtaatttccttgctagtatttgtatccaaatgaattccattgctaaacgacagcggcagtccattcaagaggatctggttttgaatcttctgcatcctgacatggtactttatgccagcctcgggcaagttttcgccaaaacgattctccagaaaggcagactccaccgtgtacatgccgcagacgatggcatccttgcagagcttctccaggcgcgcctggagcaatcgatagtggcgatacatggacattctcttggcaatcttaggctcatctagccagtagaattcgctgagtgtgtccatggcaaccaattgtatgccaggatcattgatgatcgcgtagcgggcgtcgattagcgacgtggaaacatcatcgtttgcaaaacagttgaggaatcgcacgcgactcatgcactcgcccgcaatctcggccagctgctcctccgtggggcatttcgcagcaatcacttcgccgacagagtacgccttcagctccatcctaatgctcttggccagagattcacggttgatcttgtgactcagattgatcagcaggacgctccactggcgaccaccgaatttgtagggcaccaggcagtgggccaccaactgttggagcaccaggcttttgccactgttccctgggccggagatctccaccagcgtatcggcttcaaagccgcaggagccaaaaacggcaaagtggagttgatgtgagcccattaggttaaatttacaaatttgcgccctggcataaacaaaggagttatcgattgtggcctttatcgatgacagccacctaaagttgaattgcgcagcgctgaaacatatttaacactaaatggaactagggcatatcgaatagttaaacaacagcagcaagcgtttcgttataactttcagttagcatttagacttatttgcgcacatacataaaaaaaatccattttcaccaccctgtgttatcgcccagccgcctatcgctgctggtgcctaatttagccctaacgcctgggcgatgatagaaaaaacggcataacgcgttcttaccagttgaacatcgttttctaccattttttgtttacgtttgcaccgcgaatattcgtgcacctgcactcgcaatttgctcaaagccagcggcgctttttcgccggcaagttgctccgcaccgagttaaagcatcactcaggcggacgagctggtgtactccagttagcttctcgccccagcacttgtaattgtcattatcggcggggcgcctttgatcattcagcggcatctcgaatccgaaccaaaagtggttcttttgttctctttctgctttgtggccacctttccgcgctccccgcttaccgcttcccgtctcccgcgccgtgctttttctttctggccacctagacacgtcaacagatttggaactttgtaactggaatctggaactgggcatcggaatcggaattagggagagatgcgcgtgagcaccatccgcagcggtcggatctgccggctggcattgtgcctgctggtactgctgccgctgctgtatctgctggccaactggagcgatcaccacaagcgcgtccaggaggcgtatcacacgcgcttcggcggacccaagttcgcccaccagcgattggagggcaggcccagggaggtgcccaagctggtcgatggtaagtggctacaggatcgaggatagcaatatcagcccttgaccaggata

SEQ ID NO: 13583 - DNA, 753 bp, DROSOPHILA
atgggctcacatcaactccactttgccgtttttggctcctgcggctttgaagccgatacgctggtggagatctccggcccagggaacagtggcaaaagcctggtgctccaacagttggtggcccactgcctggtgccctacaaattcggtggtcgccagtggagcgtcctgctgatcaatctgagtcacaagatcaaccgtgaatctctggccaagagcattaggatggagctgaaggcgtactctgtcggcgaagtgattgctgcgaaatgccccacggaggagcagctggccgagattgcgggcgagtgcatgagtcgcgtgcgattcctcaactgttttgcaaacgatgatgtttccacgtcgctaatcgacgcccgctacgcgatcatcaatgatcctggcatacaattggttgccatggacacactcagcgaattctactggctagatgagcctaagattgccaagagaatgtccatgtatcgccactatcgattgctccaggcgcgcctggagaagctctgcaaggatgccatcgtctgcggcatgtacacggtggagtctgcctttctggagaatcgttttggcgaaaacttgcccgaggctggcataaagtaccatgtcaggatgcagaagattcaaaaccagatcctcttgaatggactgccgctgtcgtttagcaatggaattcatttggatacaaatactagcaaggaaattactgaggcattgctgactcagcccagttaa

SEQ ID NO: 13584 - protein, 250 aa, DROSOPHILA
MGSHQLHFAVFGSCGFEADTLVEISGPGNSGKSLVLQQLVAHCLVPYKFGGRQWSVLLINLSHKINRESLAKSIRMELKAYSVGEVIAAKCPTEEQLAEIAGECMSRVRFLNCFANDDVSTSLIDARYAIINDPGIQLVAMDTLSEFYWLDEPKIAKRMSMYRHYRLLQARLEKLCKDAIVCGMYTVESAFLENRFGENLPEAGIKYHVRMQKIQNQILLNGLPLSFSNGIHLDTNTSKEITEALLTQPS

SEQ ID NO: 13585 - DNA, 5076 bp, DROSOPHILA
tgtgattttcgccatttccaaatacaaaacgcaaacaatttttaagaagtagtggtgacaagtgtgtgaatggcgaagctccgagaagacgctctatgcatgtgtgtgaccgaccttcggaacactggcgaacgtttatccgtgttggttcttccttccaaattccacaaaaattgtgaaaagtgtggagaaggcgaagcttcgagaacacgctctatgaatgtgtgtgtgtaagagtttcgaaacactggcgaacatttatccgtgttggttcttccttccatttgcaaattccaaaaaattgtgaaaagtgtggagaaggcgaagctccgagaacacgctctatgtatgtgtgtgtgtgtaagatttttggaacactggcgaaaaagcaaatagtcctatttcgttgtgtatgtgtgtgtttttctccatttccaagtacgaaacgcaaacaatttttaagatgtagttgtgacaagtatgtgaatggcgaagctccgagaagacgctcactttcgcgatttccaaaaacacgagaaatatacatgcatatgtacatacttacgtatgtaagaatttgttttttttaagcttcaaggaagtgtgcgtaggtacaaacatatgtagatgtaacaaatgtcaaaatggtagttaataggtaaaacatgaagtttagagcgccgcgtgttctttgttttccgcctttttggaacacatactaatgtacatatttatatacatgtatacgtatatatgtgaatttttgtccttatatttttgcgtgacttcattttcttatgaaaaaattttatagatgtatatctatggcgaggggtttttttcagaaagttgggctatccaaaatccttagacataaatattcagacatatatatgcatttttactgatctgttaacttcttgcttttcgcgcagataatcggtttgaccaatcgcagagcagtgggggctacaaccgcagtagcgagggcggaaacacgatgactagaatcaacggcagcgataccggcagcgacagcagaagctccaaggatccggagaaggtctacccagcttcgatttaccattaccaaaatgcgcaccccatcaccttgggcagcttcatcgatgatcagtttttcaagaaaggcaaacaaaattctggcaagtctcagaaagtcatggagcagcagccatcgaaaataaagcctatgaaaccatcggagccaatgaatccaatccaacctgtaaatctgaagggccaaataaatccaataggaccagtgaatccaatggaccaaaaaataataaaggactcagtgaacccaatgggtcaaattaaaccaatgaatccgatgtgccaaaggaattcaatggcgtcagtgaatccatatggacaaattcatcctaaggggccagtgaatccgaatccaaatggtcaaatgaaacatatgggcccaatgaatctaatggagccagggaatccaaatggacaaattaattcaatgagccaaatgaatccgatgggccaaataaatataatgagccaaatgaacctgatggaccaaataaatctgatgagccaaatgaatctgatgggggagccagtgaatccaaatgtccaaatgaaaccaatggagacattcccaaatggacaaataaacccaatggagccaatgaatccaaatggacaaatgaattctatgagctcaatgaatccgatgggccaaatgaacccgatggaccaaatgaatctgatcagccaaatgaatctgatgggggggccagtgaatccaaatggccaaatgaatccaatggagccagggaatccaaatggacaaataaattcaatgagtcaaataaatccgatgggccaaataaatcggccagtgaatccaaatggccaaatgaatcgaatggagccggggaatccaaatgggcaaatgaattcaatgagccaaatgaatctgatgcgggggccagtgaatccaaatggccaaatgaacatgaattcgtatggacaaatgaacccaatggagccaaggaatccaaatggacaaatgaatgcaatgagccaaatgaatctgatgcgggggccagtgaatccaaatggccaaatgaacatgaattcgtatggacaaatgaacccaatggagccaaggaatccaaatgggcaaatgaatgcaatgagccaaatgaatccgatgggccaaatgaattcaatgtgcgaaatgaacccgatggaccaaatgaatctgatgagccatataaatttgatgggggttccagtgaatccaaatggtcaaataaattccaaggtgccagtaaatccaatgaagccagtgaattcaatggaggcaatgaatctaacggcgcaaatgaatgcaacggggaaaacaaatccaatggaatccacggagccaatggatgaggagcaccccttacttggttccccaagtgaagctccgccacttgacccgccgctgacgatgcccatcgatctcgacgatgacctacccgatgtgccggtgtattatggtgctcctcgggacttgacaaaaccactcacaccatatgtcgagtcattgatacaggcatccgttagattgcggcgcaacccattgggtctaaactttataaacagtgacagcgattccgatgatgaggatacgtttgctaaccaaacgctgaggcccattggttacgagatgctgatggccaggagacacaacgacaatattgaactcatcagccgccaccatcaggagcaagtggtacttaaggtccgcaccaacacggttgtctgggagacctataggagcgatagcacgctgccgccaaacaagactatttggagttttgagcgccatgatcccaagccaagacatgtgacacccaatccgtcgacccagtcaaatccaaccatttcgatgccctcgaacgtgacggccgatccgacatactggattccgaacaactttcccatgcagcttgccaacttgcataccaataatcagtcggctccggaaagtgaaatccagtacctatatgagaactggtggcacaatgccagctacatgaacttctttgctagtatggaccacatcatggtcaaccttttacagatcgagctgtacgctgcccagatgtacaccgagtacggcgaggcgttcttcgagacggccattggcagatactgcacggaagagtctaccggctcttcggcgccatttggtcagattcagctgcagttcatagagcggatccgccagatccatcatatcaataagattaatcagatcaatcagatccatcggatccaacagaaccaacaggagccgcagcagttccaacagccgcaagagatccaacagcgacagcagttccaacagccgcagcagttccaacagcggcagcagttccaacagccgcagcagttccaacagcgacagcagttccaacagcggcagcagttccaacagccgcagcagcagacgcagcagcgtacgcgcagcttttcatcggagatgcaagagatggcgcgcaaaatgagcaggacattactgggacatcgccaggagcaacacgagaatcaggtaatgataatcacgtttgttggtctgcaaagtatatatgtatatctctaatatatgcacttgcctacctcctcagccgaatatgcgctacttaaagtctggagaggaaggaccacgtccaggacgttttgatggaggcgaagagtcgggcggacgcaagccaaatcgtggtctaaaggttgcaagtaaggaccgccatttttataaatttctaaatttaattaggttgggttattgcacttttagtatcgacagcttgtagtatcaatgccaaaacattatttgcatttcccacagattcatgcattctagaaagctttttttgaattttgtaaacgcttagatcagtagtatttagcatttgagacatttaagacttatgtacacttatattcactttattcgcaacacagagcgtcgctttaataacaaaatggagtcggagcgccaagatagtgactctgatgggcgtttttgctagaggatcggatggaaagaaagatgatctcaaaaaactggaagatctcgccttgaataaaaaaaaacttcccaccgctacccgggacatcgaacaagtacaggaatttggaaatttgaaaaatctcagaggaacaggacaacttgaagcagaaattttgaaaacatctatttgtggcctaaatataagagcctttttttttttgtatacctttggagacatatctattaacagaagacagaattgcatttacacacatatgtatctacatattgttgacagaaaaaataattgcatttgcacagatacgagaattgtttgctaacagaaaaaacaatttcatttacacacaaatctattggtaacagaaaaaaaaaattggtaacacaaatacgagaatctattggtaacagaaaacgaaattgcatttacgcacgtatgcgaatctattgttaacagaaaacagaattacattaaccatttcataaacacacctgataaaaccaccgaacatgcatcaaaatgcttgactcgtgtaaatatcgaatttgtgtgccataaagtaatcagtttcgtgatcaatttcgtgattacaattttgtgatagctagtaattaatccattcccatacaattttagggactaaagcaaaacacaattatatttacattttttatgcaaacaactgatgataataaaatctttactaaaaaaataaaacaactttcaacctttttgaatgtgaacaattgtacgaatctaaaaaaagggaagcataagctgatcttcttaataacgttggtattcaacgctattgcgaggctgcagcaatactttccttctcagtggaagctctggatgagttccatgatccataaacctggcaaaccgaaacaaaagggagcccgcttccaacaggccgatcagctttctcctttcgatctcaaaggtgtttgacagactaattgctgcccagatagtcaggataacggaatcgaaaagg

SEQ ID NO: 13586 - DNA, 2751 bp, DROSOPHILA
atgactagaatcaacggcagcgataccggcagcgacagcagaagctccaaggatccggagaaggtctacccagcttcgatttaccattaccaaaatgcgcaccccatcaccttgggcagcttcatcgatgatcagtttttcaagaaaggcaaacaaaattctggcaagtctcagaaagtcatggagcagcagccatcgaaaataaagcctatgaaaccatcggagccaatgaatccaatccaacctgtaaatctgaagggccaaataaatccaataggaccagtgaatccaatggaccaaaaaataataaaggactcagtgaacccaatgggtcaaattaaaccaatgaatccgatgtgccaaaggaattcaatggcgtcagtgaatccatatggacaaattcatcctaaggggccagtgaatccgaatccaaatggtcaaatgaaacatatgggcccaatgaatctaatggagccagggaatccaaatggacaaattaattcaatgagccaaatgaatccgatgggccaaataaatataatgagccaaatgaacctgatggaccaaataaatctgatgagccaaatgaatctgatgggggagccagtgaatccaaatgtccaaatgaaaccaatggagacattcccaaatggacaaataaacccaatggagccaatgaatccaaatggacaaatgaattctatgagctcaatgaatccgatgggccaaatgaacccgatggaccaaatgaatctgatcagccaaatgaatctgatgggggggccagtgaatccaaatggccaaatgaatccaatggagccagggaatccaaatggacaaataaattcaatgagtcaaataaatccgatgggccaaataaatcggccagtgaatccaaatggccaaatgaatcgaatggagccggggaatccaaatgggcaaatgaattcaatgagccaaatgaatctgatgcgggggccagtgaatccaaatggccaaatgaacatgaattcgtatggacaaatgaacccaatggagccaaggaatccaaatggacaaatgaatgcaatgagccaaatgaatctgatgcgggggccagtgaatccaaatggccaaatgaacatgaattcgtatggacaaatgaacccaatggagccaaggaatccaaatgggcaaatgaatgcaatgagccaaatgaatccgatgggccaaatgaattcaatgtgcgaaatgaacccgatggaccaaatgaatctgatgagccatataaatttgatgggggttccagtgaatccaaatggtcaaataaattccaaggtgccagtaaatccaatgaagccagtgaattcaatggaggcaatgaatctaacggcgcaaatgaatgcaacggggaaaacaaatccaatggaatccacggagccaatggatgaggagcaccccttacttggttccccaagtgaagctccgccacttgacccgccgctgacgatgcccatcgatctcgacgatgacctacccgatgtgccggtgtattatggtgctcctcgggacttgacaaaaccactcacaccatatgtcgagtcattgatacaggcatccgttagattgcggcgcaacccattgggtctaaactttataaacagtgacagcgattccgatgatgaggatacgtttgctaaccaaacgctgaggcccattggttacgagatgctgatggccaggagacacaacgacaatattgaactcatcagccgccaccatcaggagcaagtggtacttaaggtccgcaccaacacggttgtctgggagacctataggagcgatagcacgctgccgccaaacaagactatttggagttttgagcgccatgatcccaagccaagacatgtgacacccaatccgtcgacccagtcaaatccaaccatttcgatgccctcgaacgtgacggccgatccgacatactggattccgaacaactttcccatgcagcttgccaacttgcataccaataatcagtcggctccggaaagtgaaatccagtacctatatgagaactggtggcacaatgccagctacatgaacttctttgctagtatggaccacatcatggtcaaccttttacagatcgagctgtacgctgcccagatgtacaccgagtacggcgaggcgttcttcgagacggccattggcagatactgcacggaagagtctaccggctcttcggcgccatttggtcagattcagctgcagttcatagagcggatccgccagatccatcatatcaataagattaatcagatcaatcagatccatcggatccaacagaaccaacaggagccgcagcagttccaacagccgcaagagatccaacagcgacagcagttccaacagccgcagcagttccaacagcggcagcagttccaacagccgcagcagttccaacagcgacagcagttccaacagcggcagcagttccaacagccgcagcagcagacgcagcagcgtacgcgcagcttttcatcggagatgcaagagatggcgcgcaaaatgagcaggacattactgggacatcgccaggagcaacacgagaatcagtctggagaggaaggaccacgtccaggacgttttgatggaggcgaagagtcgggcggacgcaagccaaatcgtggtctaaaggttgcaaagcgtcgctttaataacaaaatggagtcggagcgccaagatagtgactctgatgggcgtttttgctag

SEQ ID NO: 13587 - protein, 916 aa, DROSOPHILA
MTRINGSDTGSDSRSSKDPEKVYPASIYHYQNAHPITLGSFIDDQFFKKGKQNSGKSQKVMEQQPSKIKPMKPSEPMNPIQPVNLKGQINPIGPVNPMDQKIIKDSVNPMGQIKPMNPMCQRNSMASVNPYGQIHPKGPVNPNPNGQMKHMGPMNLMEPGNPNGQINSMSQMNPMGQINIMSQMNLMDQINLMSQMNLMGEPVNPNVQMKPMETFPNGQINPMEPMNPNGQMNSMSSMNPMGQMNPMDQMNLISQMNLMGGPVNPNGQMNPMEPGNPNGQINSMSQINPMGQINRPVNPNGQMNRMEPGNPNGQMNSMSQMNLMRGPVNPNGQMNMNSYGQMNPMEPRNPNGQMNAMSQMNLMRGPVNPNGQMNMNSYGQMNPMEPRNPNGQMNAMSQMNPMGQMNSMCEMNPMDQMNLMSHINLMGVPVNPNGQINSKVPVNPMKPVNSMEAMNLTAQMNATGKTNPMESTEPMDEEHPLLGSPSEAPPLDPPLTMPIDLDDDLPDVPVYYGAPRDLTKPLTPYVESLIQASVRLRRNPLGLNFINSDSDSDDEDTFANQTLRPIGYEMLMARRHNDNIELISRHHQEQVVLKVRTNTVVWETYRSDSTLPPNKTIWSFERHDPKPRHVTPNPSTQSNPTISMPSNVTADPTYWIPNNFPMQLANLHTNNQSAPESEIQYLYENWWHNASYMNFFASMDHIMVNLLQIELYAAQMYTEYGEAFFETAIGRYCTEESTGSSAPFGQIQLQFIERIRQIHHINKINQINQIHRIQQNQQEPQQFQQPQEIQQRQQFQQPQQFQQRQQFQQPQQFQQRQQFQQRQQFQQPQQQTQQRTRSFSSEMQEMARKMSRTLLGHRQEQHENQSGEEGPRPGRFDGGEESGGRKPNRGLKVAKRRFNNKMESERQDSDSDGRFC

SEQ ID NO: 13588 - DNA, 3765 bp, DROSOPHILA
gccaatctcctcggcgaggccatggacagcattggccttctcagccacctcggcggtcagctcttcctgggtctctttcaacctttgcttggcggagtcggtgcgtcgatcgcagtcggcaataaaggcctgcaggtgttccatggcctcaatgtcgtagtagtagtcgcgcgtcttggcggcactttcgtaatctgcgcggaaagccaggtcatgcactttgggacactcaccgagatccatgcgcgtggacgccaggatgtcgtgcggacagcagtcgagcagaaaggacttgcagaccctggggtccgagaatttcagttggcgctcgtcgccattccgtgtggtacccataagctggtccagcattgctcgcatctgatcggtggccgacattttgttgctcggcgcgctcatatccttctggccaggagcgcgtgaaaaatgctgcagcggtggcagtgacagctatctcactggctttgtgaccaatagcgtgcgacgcgtgtggaaattctcaattttcactcacttttaatcacctaagaaaattctgtgcgtgcgtgcgtgaggatgttctaaaatggggtagtgctgaaaaacagtgctgtgaagcacgagtaggcgatatatcggtgaaaagtcacggtttctgggagtaacggcttttgttcagatccaagtatatagattattgttgattaaatgattaaataaaaaacaaaggcacatcatttaatttccaagaacaaatgtagttctctctaataacggtatatcgcgatcttaatataaaattttattaaacacgtggaataaagtttcagttttaaatagttattgttttaaatataatttagagtttcaaaaaccgttcatttaacaataaacaacaaacaatatcgatctaaaaactattgcttattcgctgcataccgctctaaacatcggtgatggcatcactaaaccacccctctcggcgttgctcaacactaggcagcaaaacgttttctttacggcaatattttttgttgtttcttcgttgtttcggcgaaattttattttaaaattaattattttgcacttgtttgctggccgcaacgatgtccgatgacgacgatatacagtacattaagcggcagcgaacgctgcactatggatcgctcgaggaatcggaacgcaagcggcaaaatgccgcggcgtctggggcagcagcaacaacaacatcgggaacgacggcatcgtctggggcaggaacaacaacaactggaacaggcgggcaactggaagacatcgattccgatgaggattacgaggagtccacgaaaaagacaagcaacgccaagcaggccggagcaccaccacccacagccgctactctggccaacaaaattgacgatgactacttcgatctagagatggaaatggagcgcgacaaggtggcgctccttgaggaatttgagcggaaaaagcgagcacgacagataaatgtgtccacagacgacacggagatcaagagcaatctgcgccagctaaacgaacccatttgctattttggagaaggaccggcggagcgaagaagacgtcttaaggaactcttggctggattgggcgagaacgccatcaacaagaggcagtatgaggatgaggagcgcaagcagcaacagcgggagcaggatcaggccacctggtaccacgagggacccgatagtttgcgtatcgctcgactctggctggcggattattccctgccgcgcgccaaggatcgcttggtacgagcacgtgaggcccttgaagtgcccagcgcagcacgtgccggccgaatggtggagatgcagaagaagctccagtcgctggctccactgtgctcccaggtgggtgacacacggcccgtgagtagtgctgccttcagtgaagactcctcactccttctgacctcctcatggtcgggtctctgcaagctgtggagcgtgcccgattgcgagctgaagcagacgctgcgtggacatgccagctatgtgggcggagtggctctgcggccgggagttaaggcagacgaggagaacgtggtggccatggcttccggtggccacgatggcgccgtcaagctgtggggcttcaacaacgaagagtcgattgccgacatcaccggccacatgccgcatcgcgtctctaaggtagccttccatccttccggccgcttcttggccaccgcctgctacgactctagctggcggctgtgggatctggagcaaaagacagaggtgcttcaccaggaagggcacgcaaagccggttcactgccttagctatcattccgacggcagtgtcctggtcaccggcggtctggatgcctttggacgagtgtgggatctgcgcactgggcggtgcatcatgtttctggagggacacttgggcgccgttttcggcgtggacttttctccaaacggattccacatagcaacagggtcccaggacaacacatgtaaaatctgggacctgaggcgacgccagccggtctataccattcctgcgcacaccaatctgatttcggacgtgaagtaccagcaggagtgcggcagcttcctggtcacctgctcctacgactcgaccaccaagatctggtccaacaagacgtggcagccgttgaagacgctgcagggccacgacaacaaggtcatatcggtggacatcgcgcccaactcgcagtatatagccacgacctcatttgaccgcacatttaagctgtggtcgccggatagctgattttgataccattactttattgtactcacctgtgggcgtacgcagacaatctccacttgcgatctgcccgctgggcacgacttactcatcaactgtttttgttatttcagagacaatagcccaaaacatttcaagttttcgttttgtataacacaatttgttgtttttgttaggcgaaaggcagatgcagcgatgttgcatttcgtaaatttaagacttttttattgaaattgttaataaaaaatacatttttggtagagaattgaattttaaacgggtttaaaattgggaaaggatttactggcccaacaactaatcagcctacaacttgtttctaatttataagtaaggataactagcaacttttcctcttcattttttaattatccttgagcagcccatcctcatatttaaacatctgtttttattacttgtatatagttttccatttaatttcttttcgtatatatttgttgtatgacaaacttagacaattaatttgaattttaactaaaatttaactaccacagataggttgcaattacatacatacatgtaagtgtatgtctaatatattaattatagattacatacatcgcgatataactgttacatatagtttacacataaggattcataaattttcttgcactttgcacaattgtcgatcagtttgtagtattagctcgtcgattaactacgctcatgcatgacgttagataatgtctagaatttcatttcattgtttcgcgttgagatttacaaggattcaaatcgcaatccatgggcttcatgtagaatatggtgctgggatttggagcaggatcgggagcgggagctggacgagcgcgttctaatgtggatttgaatgaggtctcccgacgctcgaagatgccacttaactaaatacataactcttgcactaggctaacaaactagacaaatgataactaattaacaattaaggtaaacgtttattggaaatcctgcagcttgtgca

SEQ ID NO: 13589 - DNA, 1765 bp, DROSOPHILA
caaaacgttttctttacggcaatattttttgttgtttcttcgttgtttcggcgaaattttattttaaaattaattattttgcacttgtttgctggccgcaacgatgtccgatgacgacgatatacagtacattaagcggcagcgaacgctgcactatggatcgctcgaggaatcggaacgcaagcggcaaaatgccgcggcgtctggggcagcagcaacaacaacatcgggaacgacggcatcgtctggggcaggaacaacaacaactggaacaggcgggcaactggaagacatcgattccgatgaggattacgaggagtccacgaaaaagacaagcaacgccaagcaggccggagcaccaccacccacagccgctactctggccaacaaaattgacgatgactacttcgatctagagatggaaatggagcgcgacaaggtggcgctccttgaggaatttgagcggaaaaagcgagcacgacagataaatgtgtccacagacgacacggagatcaagagcaatctgcgccagctaaacgaacccatttgctattttggagaaggaccggcggagcgaagaagacgtcttaaggaactcttggctggattgggcgagaacgccatcaacaagaggcagtatgaggatgaggagcgcaagcagcaacagcgggagcaggatcaggccacctggtaccacgagggacccgatagtttgcgtatcgctcgactctggctggcggattattccctgccgcgcgccaaggatcgcttggtacgagcacgtgaggcccttgaagtgcccagcgcagcacgtgccggccgaatggtggagatgcagaagaagctccagtcgctggctccactgtgctcccaggtgggtgacacacggcccgtgagtagtgctgccttcagtgaagactcctcactccttctgacctcctcatggtcgggtctctgcaagctgtggagcgtgcccgattgcgagctgaagcagacgctgcgtggacatgccagctatgtgggcggagtggctctgcggccgggagttaaggcagacgaggagaacgtggtggccatggcttccggtggccacgatggcgccgtcaagctgtggggcttcaacaacgaagagtcgattgccgacatcaccggccacatgccgcatcgcgtctctaaggtagccttccatccttccggccgcttcttggccaccgcctgctacgactctagctggcggctgtgggatctggagcaaaagacagaggtgcttcaccaggaagggcacgcaaagccggttcactgccttagctatcattccgacggcagtgtcctggtcaccggcggtctggatgcctttggacgagtgtgggatctgcgcactgggcggtgcatcatgtttctggagggacacttgggcgccgttttcggcgtggacttttctccaaacggattccacatagcaacagggtcccaggacaacacatgtaaaatctgggacctgaggcgacgccagccggtctataccattcctgcgcacaccaatctgatttcggacgtgaagtaccagcaggagtgcggcagcttcctggtcacctgctcctacgactcgaccaccaagatctggtccaacaagacgtggcagccgttgaagacgctgcagggccacgacaacaaggtcatatcggtggacatcgcgcccaactcgcagtatatagccacgacctcatttgaccgcacatttaagctgtggtcgccggatagctga

SEQ ID NO: 13590 - protein, 553 aa, DROSOPHILA
MSDDDDIQYIKRQRTLHYGSLEESERKRQNAAASGAAATTTSGTTASSGAGTTTTGTGGQLEDIDSDEDYEESTKKTSNAKQAGAPPPTAATLANKIDDDYFDLEMEMERDKVALLEEFERKKRARQINVSTDDTEIKSNLRQLNEPICYFGEGPAERRRRLKELLAGLGENAINKRQYEDEERKQQQREQDQATWYHEGPDSLRIARLWLADYSLPRAKDRLVRAREALEVPSAARAGRMVEMQKKLQSLAPLCSQVGDTRPVSSAAFSEDSSLLLTSSWSGLCKLWSVPDCELKQTLRGHASYVGGVALRPGVKADEENVVAMASGGHDGAVKLWGFNNEESIADITGHMPHRVSKVAFHPSGRFLATACYDSSWRLWDLEQKTEVLHQEGHAKPVHCLSYHSDGSVLVTGGLDAFGRVWDLRTGRCIMFLEGHLGAVFGVDFSPNGFHIATGSQDNTCKIWDLRRRQPVYTIPAHTNLISDVKYQQECGSFLVTCSYDSTTKIWSNKTWQPLKTLQGHDNKVISVDIAPNSQYIATTSFDRTFKLWSPDS

SEQ ID NO: 13591 - DNA, 3457 bp, DROSOPHILA
cttttaatggagaagtcttattgcgccacttgaccgcctccggatttcctttgcagcacgcacttgacgcgattttctagggctatgctgtatgcgtccagtttataggccgccgcctccaatttgtcgacggtgtcggaaatctcatcgatttgctgcatcatcggagctaattgctggaacttgaggctcaattcactggtcgaagtattcagattctcggcaatctgccgcatgtccttgtacttggcaatcgtagccttgttcatctcctccagcagcttgtaatcctccagcggagcgttcagttcgtgtgtgatgtactcctccgttttgttgaacattttcgtggccaaacgactgagattggggtcgtgtcgcgtcagtgcctcgaaactggaggcgctggacaacgttggtccgtgttgtggggagtccggaagaaggttggaatcctgagccgcagcagcagcggcgctagttgtgggtttatccatagtctatccaaggaagttgcaacacgattttcttagttttccaaaaacaaagtaataattgcaatcagctgatgcttgcgtttcgatgggaatggaaattaaaagttgattgcttgacattcgcatcgaaactcgtattatatacttagtcaatagaaactcgaatgttaaataccctatattaaacttttaaaacctaacctagaataggcaagattactattcagggaagaccgtttttataatgactctttatcttaaaacaaatatatgtattagttatgacgttatagattataatcgatagagaagcatattgaaatattggggcaagtgctaacatcctatagcttttcatcaatctggaaaacattgtgccccccatgctacaactaataggtatgaaatgccgagcattaacaagttagatctattcacattttgtaccataaatgcaagtacacatcgcttagataaggcataagtatgccaagaacagaacgttaaacatgttgaaatccagtcaagatcgcaagctaaagcaccttttcgatggcggtgattggaatgtatacgctccgaacatcctaaatctcggagtgggtgctccaggaccagatatcctgaccgccaactgtgatagcttccggacggccacagatcattgtctggtgggtacgactcttacgcaataccctccttgtaacgaacattgtgggttctctttgcaggaacgcgaaaagcgggaaaaccagtcgctaattttccaatatggaccaacaagtggaacattcgaggtgcgacgcgagatctccacctatttcaccgaaatgttcaaaagtcccgtcaattggtaaccttatacgttttcgcgatcttaatatatatctaattaatattgtggttttggttttcagtgaggatttgataataaccacaggagcatcccatggccttcacatacttttgtccacaatgttggactttgagggtttcgtattcgtcgatgagtacacctatatgattgctttagatagtataaaacactttagcactgtgaccatagttcccgtaaagctcaacgatgatggcgtggatctgaaggatcttgaagagaaggtatcaaaacgacgatttcaatcgaagaagaaagagttctggggaatctactatacgataccaacgtatcataatcccacggggattctattctcgccgggtaggttccagagtttttatacatatgtactattaaactattttcataattttatgtatgatttctatagaggtctgtcgtggaattgtgcaacttgctaggaattatgatttccttgtcgtctgcgatgatgtttataatattctcaactatggcgaaacgcccacacacagccgtctgttgtcctatgatgacagaaatgatgccaacttcgcaggacatgttatctccaatggaagtttctccaagattctgggaccgggagttcgcctgggttggcttgaggttcctccgcgcctgaaaccaattttagatggaagtggttttgccactagtggtggatgcttcaacaactacacatcagggattgtgggcagtctatttgagcttaagctagcccagaagcaaatttctgagtcctatgaagcttataaggagcgcatgctggccaccacgcaagtgcttcgagatgagttgcccgactgctgcaagttggtcagccccacgggcggatacttcatttgggtgcggataccggatcgattggactgccgggagtttctcaagtactgcatggagaatcacaagatctactttatagtaggaacacgcttctctgcggatggtcaaagtggcaaacagttcttccgcctgtccatcgccttctatccgaagtcgaagttggtggatggtgctagaagactttgcaacgcacttaaggattacatagccgagcaatagattccccatggcgtatcttaatatggcaaaatgtgtttattattgtggttatctgctatcgtactttaaatatgacttaaaaggatgtgactgtgcactaaactacttatcaagaagttatctactatataaagagatatatgatatacacacgtttgttgtacagattcttgggcatgacgctaaaaatatcacaaatctgttaaattctatacaaatacacaacaattagttcagagtataactttacacacgtacagcggatctcagctcaactgtaactatatccctagttgtatctgcatctgcatcttgtcatttgtgctgcgctgcgaatgtttacagatttcaatatctttcgattgctcataatactttcgcttgaattggaatgcccgctggcggatttacgtccttgcatatgcaaactactccgaaaaggttagtacgatctccttgagtgaggtatacgtgccgattaccaagcccaggatgcccacaatgatcagcacaaagttgcctgcaaggatttttggttagtaaatagatatctatggctatttaatcagcacactcacttaacaccagccagacttttgcgaaacccttcgtattgtaccaatgtgtgcagatctggatgagtgccgggaatgccaaacccaaagcggaaaggcatagtgctccaaacagggagatgaacagctccaggttgggaatggccactgccaggaggactacggtaaataaagacatgaatattactggctaaagaatatgcatatatagggaatatcagacttacaggtgatcagaacaagaccagttcgcactgcgtactcccaaaacagggcattccgttgggcgcccaggcgcttggccacatagtcattccaggtgatatcaatggccacatagcaggccaatccatgggtgatataaatggcaaaggccagcatgcctttgacgcacatggaaagccttaaaggagacacatttaaaa

SEQ ID NO: 13592 - DNA, 1263 bp, DROSOPHILA
ttaaacatgttgaaatccagtcaagatcgcaagctaaagcaccttttcgatggcggtgattggaatgtatacgctccgaacatcctaaatctcggagtgggtgctccaggaccagatatcctgaccgccaactgtgatagcttccggacggccacagatcattgtctggaacgcgaaaagcgggaaaaccagtcgctaattttccaatatggaccaacaagtggaacattcgaggtgcgacgcgagatctccacctatttcaccgaaatgttcaaaagtcccgtcaattgtgaggatttgataataaccacaggagcatcccatggccttcacatacttttgtccacaatgttggactttgagggtttcgtattcgtcgatgagtacacctatatgattgctttagatagtataaaacactttagcactgtgaccatagttcccgtaaagctcaacgatgatggcgtggatctgaaggatcttgaagagaaggtatcaaaacgacgatttcaatcgaagaagaaagagttctggggaatctactatacgataccaacgtatcataatcccacggggattctattctcgccggaggtctgtcgtggaattgtgcaacttgctaggaattatgatttccttgtcgtctgcgatgatgtttataatattctcaactatggcgaaacgcccacacacagccgtctgttgtcctatgatgacagaaatgatgccaacttcgcaggacatgttatctccaatggaagtttctccaagattctgggaccgggagttcgcctgggttggcttgaggttcctccgcgcctgaaaccaattttagatggaagtggttttgccactagtggtggatgcttcaacaactacacatcagggattgtgggcagtctatttgagcttaagctagcccagaagcaaatttctgagtcctatgaagcttataaggagcgcatgctggccaccacgcaagtgcttcgagatgagttgcccgactgctgcaagttggtcagccccacgggcggatacttcatttgggtgcggataccggatcgattggactgccgggagtttctcaagtactgcatggagaatcacaagatctactttatagtaggaacacgcttctctgcggatggtcaaagtggcaaacagttcttccgcctgtccatcgccttctatccgaagtcgaagttggtggatggtgctagaagactttgcaacgcacttaaggattacatagccgagcaatag

SEQ ID NO: 13593 - protein, 418 aa, DROSOPHILA
MLKSSQDRKLKHLFDGGDWNVYAPNILNLGVGAPGPDILTANCDSFRTATDHCLEREKRENQSLIFQYGPTSGTFEVRREISTYFTEMFKSPVNCEDLIITTGASHGLHILLSTMLDFEGFVFVDEYTYMIALDSIKHFSTVTIVPVKLNDDGVDLKDLEEKVSKRRFQSKKKEFWGIYYTIPTYHNPTGILFSPEVCRGIVQLARNYDFLVVCDDVYNILNYGETPTHSRLLSYDDRNDANFAGHVISNGSFSKILGPGVRLGWLEVPPRLKPILDGSGFATSGGCFNNYTSGIVGSLFELKLAQKQISESYEAYKERMLATTQVLRDELPDCCKLVSPTGGYFIWVRIPDRLDCREFLKYCMENHKIYFIVGTRFSADGQSGKQFFRLSIAFYPKSKLVDGARRLCNALKDYIAEQ

SEQ ID NO: 13594 - DNA, 4446 bp, DROSOPHILA
agtgtcgctcattaatttggtttggggaaaggcgggaaatgaaactcaagactcgctttcgttttgcttatgttgttttaaagatcatatttacttcaatcacagcacagaatacagagaatattatctaatggtttacttgtcgctcgaaaggaaactggaaaggaaactattttcatgtgagtgtgaagtgtgcgtagaggagtagcgtgttgggtgtgatgtgtttcaatctgtttttgacggctggtggcgcttggcgagggcaaaagtcgagaaggataagctgcagagaaagtcgagctagtgcggaaaagaagtgaaaaattcgaagaagcagttttcttatgtgtagggttttatccataaagacttgtataattgttgacatgtatgtatagaggattactctttttttgttattttgtgggcattttttctcgctagtttaaagtttaacacacagctaacatttagagtattgtttatacgccttgagggcaataatgcaattacgtttgtatataggttgatgtatacttattacgttgctagttacaattgttgactggttgttagttctacagtaagatcaggttgttgaaatgtttgtctcgtagtggtacagtagttttgagtggaggtcgagtcacgtcgagtcgttcatgattgttgcgagttgcaaagaaaggcattaagagctaactaaggacttttaaacggttaaacttagattacattattacatctaaacataatctcaatggaggttttgtaattaaataacattgtgcatttatagcatgtagaatggtaaaataaaattatccttaatagcagcagcgttgagcacatgtataactcctccaccatctccttctccttctattaagagtaatcttttgttccagtttggattcgattctggttaggaaacgcgattgtaagaattaaaattcagccttcgtccctttgactaaaatgtttcacttccttgttgtattttcagcctgttcaatataaataatcgtgcggaaagacggcgcgtgcgggcagatagcaaggatcatgttggttgcggtagcgacgcgccaggaaaacagccaggacctgtggaaggaagatcaattaaacagtgttcagcagatattatagaatttaaaagaaaaactaaagccagcatataaacaattctcacccttggtctctagttggttttttgcttagtcaaagagtaggcagtcaggtgttagtacaattttttttcgaaagtgttaaagaaagtgtgttgagagtaaagggaaatatgtttcttaactgattgcttgctttttgggttaaacgctttgctctctccttctatatatatctctctataatatgtatatatgtctaaagttgtatatcaattacgaactaacacattacgtacatagttctgcggcaatgtgatttaatatatatgtatgtatatatgtatatgtagatggtataaatataaaggatgcttgtatatgtatggtatgtcggccccaagggccatgaaatctttcatcgcaacattaaacatttagcagagacagagcagatatacatgcactaaagaattttcgaatgtttctgtatctggaaaatgtttatctctctctcgactagcttctaatttagagaaaagcgctgggcaagccccgcggatccttttgattgcgatagcgaactgttagccagacgccgacgaactaattgcagcatgtagggattgatttgataggaaatttgattacttaaatcagatatgcgtttatttgcgcattacctcagtgaagctgaagaagatgcccagaccgccgcacaacttgaaggcatagtcgatcttgtcctccagtaggggtccacatggttcgcaacggcagtccggctcggacgagtgggcacagcactgttgattgatcagctcgcacgagggctcattggacgggggaaccacggaagttgtgctcggtgcggtggcattgaatccgcagcatttcagactatcctgcacttgtttgcgcaaatccgtgggcaccgtcatccatccttgctcggcgaactgctgctgctgttcggagttgacggccaagcaggaactggcgatggagaactggatcaggaacagcatgaacagaatgatcatgtactgaagccgcggagagtctaaaggttaaggctaaaccgggcagtgcttctacaaaatataacatttgctttcccatatttccactgggggtcacgttgtgataccctccagctgacgtcatggaagcacaaaaagcgaggcggcagctacagccactgaggcccactcataatttcagtcattacgggcccgctttcactgcggaagtgggtacttgtctaagtacgctaattgttccacatgccacgaccttcgtggtgggccgcaatagcggtcagaacaatagcagcgctaggatatgaaaaaggtcctgcaatgaagctaccaactatttagtgttttaagctttaaagaaatgattgcaagcagtatcttagttagatctctgattttaacctatttgatggtgattgatgctttagatcactgctttcatatgcttcatattttgaacgattaactatcatttaaagaccctattgataatttaatgctatattcttgcgctgctatttcattgaccacgactgtagctgcctgctatgtacatatgcatatacatattgtaaattgataggctttgaggaaaaaggatacgaagaagagcatcacttggtggtgcttgacggctccggcgagtcccagcatggatatgcatatgaggatgacaccgcaggccaggatcccgcccacaatcggcaggttggtcactatggaggcggcacgcgcgtacacgcccactccaatcagcaggaatccaatcatctgggggtcgctcgcacacacacacacacaggcaaagcaaaaaaaaggaagaaagaaaggaggcaaatgaaaaaggactcaaggattctcgtcttgagggcagcaacaacaattggcggaaaggtatgtatacgcacacacacacgtgcagattgcacctggcaccgcaaaggaaaatcaatacatatttatgtaccgaaatgatacaaaatcaaattattcattttccaatgtggttcttgttgttgctgctgttgccgtttattcattgttactcttccgtgtttgttgttcctgctcttgcctttgcacaactgttgttgtttttcctttcatgttgtttgtgtttgcgcttaccacatacaaaatgttgagcgcaattagcgcgtttttcgagcaggtgaaaccgccgcacatgatttatgattgtttattattactggattctaaagaaactgcttaaaaacgaatttagctaattgaatttattccgtctacagaagttttcactttcaatatagatatcgatttcgatatcgataagttgtccagtaactgagtcgattgatttatttcagtgttatcggaatatttgaaatcgcattatgactttaaagtatgctcaaaagacacaaaaactaaataattcgttaccaaattaaatttattttcttaaaattacgttctaaaacaaaataattgttttacacaaacatcagtagtaacgcgcatatgagtcttatcgataagatttttttttgactctgtgctaaggcggttttttcaaaaagttgtgcccacatttaaatcgctgtgtttttaaatactttttaatcttgaaaggtcatgcaaaccacattattttagagaaaaccttaatgtcaaatcactttgaatgagaatcagcaggcttccaatagctgacgagaataccttattgaccagcgaggtattcagttccaggaggcccaatggcataagcttgtagttgatggtgacgacctgcagccagaaagcattcaccacttgcttgaaacgggcatcggcgtgctgcagatcgaatcgctgcaatagttctccagttctcctggtctgcaaatagtcgttataagtatttcaaaactttaatcatatgacaatcacctccacgagggtttggttacttatccgagccaccatgacgagttccaggaagggaacagccagaaatacgaccagaacaatggccagaaagagatcgaaaggctcctcgttgatgtagtgatccgcaatggccagatactgattgtagcatcccatggtgataccgagaaggttcattagcatcgatagcaccatggaccagtccgtgaaccgaaggtaattctttgagcggctggcagtgaagccatatttcctagccaactcatccagaagatcggctaactcgcagaagcgacgcatccggtagtagggcttatggagattcatctggacaggtgactgcagcatattggcctcct

SEQ ID NO: 13595 - DNA, 786 bp, DROSOPHILA
ttctgtagacggaataaattcaattagctaaattcgtttttaagcagtttctttagaatccagtaataataaacaatcataaatcatgtgcggcggtttcacctgctcgaaaaacgcgctaattgcgctcaacattttgtatgtgatgattggattcctgctgattggagtgggcgtgtacgcgcgtgccgcctccatagtgaccaacctgccgattgtgggcgggatcctggcctgcggtgtcatcctcatatgcatatccatgctgggactcgccggagccgtcaagcaccaccaagtgatgctcttcttctacatgatcattctgttcatgctgttcctgatccagttctccatcgccagttcctgcttggccgtcaactccgaacagcagcagcagttcgccgagcaaggatggatgacggtgcccacggatttgcgcaaacaagtgcaggatagtctgaaatgctgcggattcaatgccaccgcaccgagcacaacttccgtggttcccccgtccaatgagccctcgtgcgagctgatcaatcaacagtgctgtgcccactcgtccgagccggactgccgttgcgaaccatgtggacccctactggaggacaagatcgactatgccttcaagttgtgcggcggtctgggcatcttcttcagcttcactgaggtcctggctgttttcctggcgcgtcgctaccgcaaccaacatgatccttgctatctgcccgcacgcgccgtctttccgcacgattatttatattgaacaggctgaaaata

SEQ ID NO: 13596 - protein, 228 aa, DROSOPHILA
MCGGFTCSKNALIALNILYVMIGFLLIGVGVYARAASIVTNLPIVGGILACGVILICISMLGLAGAVKHHQVMLFFYMIILFMLFLIQFSIASSCLAVNSEQQQQFAEQGWMTVPTDLRKQVQDSLKCCGFNATAPSTTSVVPPSNEPSCELINQQCCAHSSEPDCRCEPCGPLLEDKIDYAFKLCGGLGIFFSFTEVLAVFLARRYRNQHDPCYLPARAVFPHDYLY

SEQ ID NO: 13597 - DNA, 5946 bp, DROSOPHILA
tttcatttatttactctgtataaatttcaatgctattctcttaattttctcactacgaaaattgattttctgcttccaaatgagttatgaataccaaattattgcaacttctttgccgtaaagattggtgttcatccttagaacttgcactaatcggtttcataaagggtttgcctttgaggatgcccttcctcatttattttattgaattgcaaaaaacagatctcaaattttgagactagttcacagaacaaaagcttataaatcaaatgaaactatggattaccttccaaaaaggttgtagataaaatcccaacatataatatgacaccaaataataaaataatcctggttactgcaaagtatttatcgcaaatagatagatgttcgtctttaaaatttgcacttacaggtttcttgaagggcaagcctttaaagattcacccagttataaactaaaatggaaatactttaaaaaaaaaccaaagaggagaacgcagtttttagtaagaaaccctttttcgcttgatctcgtggaaaaaggcattcctacatcgctgattttgaattattttgggttacgacttatgttgtagatcaaggatctgcatttcttactaaggacttttttttagggtcgacggttgaatttttttttttaggcggagacatttactggcagtttttctgtattttaaaattaatttcgaacaaaggcttaaaaaaggttattattttattactgcccccaagagagtgtgtgttacctttttcgattttatcctgtttgatttatataatgcatgcgaacgcataaggtaagttaatttccgtattattcttattcaatttacgcttacgaacacattaaatgatatattaaagtaaattatgcaactaaatgagcatcaactgcagaactgaatcgaaaaaccattgaaaacaaactcaaaaacgataagtacagttgaacgcaatgaaacgctaattcgagcccaatttacgagctctggaatcgtattgtgtgcctcgagttcagcaggagcgccaatccggcggccacaatgaggggcagcatcatccactggccagcaggcgagttggccccgttgcacagatccttggtgcaggagcagtagatggcggccacgtcgtgggttcccgagcgtctcacgcacttgttgtcggtgttttcgtctgggatgtatccgcatccacgcacaatccgggtcttcccgtaaactatgaagcattagttggcattagttatcgactttttaaagttactattgtggacctactcttttgcacggttttgcggcacagggtgggcttgtatttgtccttcagatgctccagaggctcctgtttgctgcagttcacctcgccaatggagtacggctcgaagggatcgccgcagcggggatcgaactcgctgttgcagtcgtagcacatcagggcagtggtcactgcaaattaagtaaagttgttatttattagtaatattacagcaagtactactaatacgattatagataagatagtaagatagtataaactggaatatcttatactagacagcgtttcagatttatgaacgatttacatagatgaagtcatctcctgtccatcctcacatcgtatctaaataatcctattaaagtatcttttagttagcttaatccacttaatttgcggtttatgattaaaagcttgaatttacatatgtacataaatgcggcttaaattggattagatacgattaaatttagccactttggaattgggtttgatcggcagattgccaatttctatgcataaatattatttcggaaaaataaaatccaaaaaatctattgccaaaataagatgagcatctgttgatcccttgaccttctacatacatacatatacatatgtgcattatatagtattctatagattctacataaaaattcgactttgcaattatggcacagcatatagtgcatttatataaagccaaatgtcagggcttcgaactgcgtcagtgtgtgtgtaaatgtgtgtgtgtgttcatggggctgcatacgcatgtgtatgtgagtgtatgtgagtgtggatgggggactttatgtttttttgcattgcataaactttggggctttggcttaccttgtatgcagcagagcacgcctaacaacaacaacgtcttctccatgaacggcgacattttgtatgtatttggatttatttcaattagttttatttgctttttgagcttatgttttcacttcttctctgcccggcggctggagcaacaatttgtttcggtgacgagttcccttcgttggacaatttgcgtgctgatgctgatacgatgctatatcagcatattagcctaaacaaaattaatttcggtaagttaggcaagtaaattttgtgcgcatttcctaataacccgatgacgttcgccgatttttttttgtacaatataattcgactgcaatgaaaagtgaaaatcgcggtggcgaaaataaacgcaaaaggagagaagacgcaaagcgaaaggggcaaaaacaaaaagtgggacgcagcggaaaaaaagaggaagacaaatgcgttttggaaggaagcgttgaggggcggaaagggacggcaaggcgacggcgcaatgcaacacactcgctcgctcgttctctctctctccttcttgctcaccgatgacgcgcgccctctagcgacccaattagtgagccaatggatcccatgtggaacgcattcgaacgacgagctatttgctcgttgttgctgttttccaattttcacccatgtttcttttttggtatatttcttcttgacttgggatcgaatgtccatttaattggattgcaatgattgctcgaacgcagctacagctgcaactgcagcccccctcccccacaccaattgattttcccacccaacactgccactttttttcccattttttccggatggtgggtaattgctaacggtactcggtagctaggtaacaaattaccaatacgtaccgcccatcggaaaaccccaccttcgtattatctgccccactcccaggcgcttttaatagtttagctcacgtttgcgatttgtggccaagtgctttcgatgggctttccaacccccttttttccattttcctccaattgtcggctgaatctattttccttttccttccttttttatacttctgtcaagtgaaaaggctttgttgggctttgcttacgggattgtcctcaaatctgattacattattttacaatgtagtacttttttaacataaccatctaacataagaacgtattcaactacatatttaaaatatttaagagcatatttaagcatctttcatattgattacaatatgtgtcatatgtttttaatacgattttatagatttttgaccctaagaactttactcatagagctcattaaattttccttttccttaactactatcaaatattgatcgatactaaacttatatgaccccttattaggtccccttattagttccccttttagacccacttttcgacccccgcggtgacttcactttgaatttgaacagccaatttcctggccactcaagtaattacattgtcatcccatttccgggactgcctgcagttgcgctggccatttgggccccattcaaaaccacaaaaccccgccactccccccgcccagccatcaattggcacgtaatcgagaaaagtgcaatgcactgaagccatagattctagagcactgcagttgggttgcccactccaaaacaaaatatggggcggtagtcgcattgggcagacagagtacaggcttacagggtacgaaatattacgcatacgccccgttctggccaccagcgagatttgggtttctggcacatggcacacaggtaaccatccatccggctgaggatacacagccgtgcatggcaagacgtctgaatgccgagcgaatgaaaagccaatcaatatggtagccaaggggccgttgtcatgtcggccattcaatcgttcatagttgttggtcaactggcagctgacgggccaaaacaggaagatttccaatcggcaggctatgtttgatatctatatataggatgatgatgatttgtggtgggtggcttgattgagtgggcctagtttcatgttagccagccatcagcgttcgctgttcgcttgcaactcgcaggacatgcaacaccctgcctcttccgccagccccggaaaattcaataactgacccagttcaggtgctgttctagccgaccacttttcagccagcccactcgatggtttttcctgccatttaccatcgtccaccgtctgtctccgttttttggcatttcctgtgggaaatgggaaatgttttggagtcagaacccatccagcggcattggttctttcttctttcatttcagctagttctttttgttgttatgtaagagcccagacaattggcagtagcacgaatctggcatatcgatttagccattaaaaaaaatggaacaagcaacgaaaaaaaaaaaaactagaagaagaacaacaacaacgcgagcagaacaagtggcatgggaaaattactcaggtggcacaggtaaaattatcgggggggttgggtctgcacttttgttgtgtaatgcctggcgaagacctcgaggattaagggattcgggggatacgacagattcttgctggcttatgaacttggccagcagttaattagcccgtttaaggttaggtattgttctctttatctgtcttatatatccgcaactattcagtttaaatggttcgtccatttgcgcttgcaacttgttttgtaatcacttatgcactgtgcacttccgcttcacttcgaagtcacttttcacttttacttgggcagttatataatgccaatagttttccgcaaagtttccctttcgaatgcagttttcttttccatttatttacgtaagagtggagacattcgcaattttcctggctctcgaactatttcaagctgatgacaccgaagtggaaatgaaagggcccccaaatgaaaagcgaaaagaaaagcggatgccagagaaaaagggctcagaaatatggttgaaaggggggtggggggttggtggaacggctagcgggtggaaacgggtgaatagttgtgggcgaagggtgcgcggggtgtgggcggatttaagtgcgattccagtgcaaattctctcgcaaggacgaagcacaaagtcaaagcggccgagagcgaaagagagaggaatatcgagtgcggaaaagagacacagagacagagagagagagagagagagagagggtgcgagcgcccttttgagaaaaaccaagcgaaaaaagttaaatcgatagcgaaccgcgccactgaagcgggattatctaacacggcttacagtccgtttcgcccagaatcgcgactttactttccactctttgcacttgtctcgatttttccagctacctttgcgctcgctaaaaaaaactctcgaattcgtacttcaaatgctcgattttgtgtgccaagggcctcctgatttgctgtggactctgatgcggtcacgcgacgcggtagatgcaaccccaaacacggtgaaattctttctgagcgctccgccaaatccgcagctgtccggcgagatttccgccgagctgtttctgtttctctggagagcgagaatctcaccgaaagagagagattgcgcactgaacaaccctggcaaatctctattttatattctgcgataagttttaagtattttcaaacatctaacttcaatacttcttgcttatatattttttttcaaatttttaaatttaccgaatgattggatatctacagtatccaaataaattttttataataatgttatgtcataaattcaatttatttttagtctgctataag

SEQ ID NO: 13598 - DNA, 972 bp, DROSOPHILA
aaactttgcggaaaactattggcattatataactgcccaagtaaaagtgaaaagtgacttcgaagtgaagcggaagtgcacagtgcataagtgattacaaaacaagttgcaagcgcaaatggacgaaccatttaaactgaatagttgcggatatataagacagataaagagaacaatacctaaccttaaacgggctaattaactgctggccaagttcataagccagcaagaatctgtcgtatcccccgaatcccttaatcctcgaggtcttcgccaggcattacacaacaaaagtgcagacccaacccccccgataattttacctgtgccacctgagctaatatgctgatatagcatcgtatcagcatcagcacgcaaattgtccaacgaagggaactcgtcaccgaaacaaattgttgctccagccgccgggcagagaagaagtgaaaacataagctcaaaaagcaaataaaactaattgaaataaatccaaatacatacaaaatgtcgccgttcatggagaagacgttgttgttgttaggcgtgctctgctgcatacaagtgaccactgccctgatgtgctacgactgcaacagcgagttcgatccccgctgcggcgatcccttcgagccgtactccattggcgaggtgaactgcagcaaacaggagcctctggagcatctgaaggacaaatacaagcccaccctgtgccgcaaaaccgtgcaaaagatttacgggaagacccggattgtgcgtggatgcggatacatcccagacgaaaacaccgacaacaagtgcgtgagacgctcgggaacccacgacgtggccgccatctactgctcctgcaccaaggatctgtgcaacggggccaactcgcctgctggccagtggatgatgctgcccctcattgtggccgccggattggcgctcctgctgaactcgaggcacacaatacgattccagagctcgtaa

SEQ ID NO: 13599 - protein, 155 aa, DROSOPHILA
MSPFMEKTLLLLGVLCCIQVTTALMCYDCNSEFDPRCGDPFEPYSIGEVNCSKQEPLEHLKDKYKPTLCRKTVQKIYGKTRIVRGCGYIPDENTDNKCVRRSGTHDVAAIYCSCTKDLCNGANSPAGQWMMLPLIVAAGLALLLNSRHTIRFQSS

SEQ ID NO: 13600 - DNA, 5634 bp, DROSOPHILA
gttggtttctcgaaattattgcctttatatgcgagatggagaatatgtggaagcccttaattattctaaacgattacataaactgcagtcagggtataataatatttgtagctacattctgcaaccacgaaatgtttaggctaatacgcaagcggtgggttttctgtgacagtacaccctaagattttcaaatgatcatttgcattctttcagcatccaaaaccgaaatattacttccttagaattgaccaatacgagccgtcctgtggaatctgagaaaatggccgacgtagaattagggaaatgagaaaaattaagtaactgaattgacttttatttgccatcacttcattactttagaggactggagacttcctgaacaatatcttgaattgtatttcttatgtttaatatcttgaaacgtagttcctaggcttgattacatatgtatattttccacatgctccttcagtgaagcatggaactaaatcaatcggtacgtaaattactcgtaccgcagttcaaaagatattgctaactaatattaaatctaatagttgaatcgaaatttcgaatatcaaaagtatatgtacgtatatgtatgcatgtggaggtatgagcaggttagaagtcaagctccgtatcttaaaactaagttgtagattacttaaatgacttcagtcgaaataaggacgcgtttcatgtttttgaaaagcgtttcgttgcactaagtaaggtataggtaactaaatactaaatacagcacacgttgtttgtgtttagaactgaactagatgcacgcaaccttatcgagttttgcaaactaaaaactgcttaaatgtatggtttcccttatgtaaaaactgtaatatttcgaattaccaagaagtttgctttaagggttttaaagattggtagtgtttaaatatttgcagcttttctataacattatttttttttaccaggctgtctatgtatttggtcaaactgaaaaatacgctcacagtgtctcgtggtgtgtgcgctttaagtggaactctaccatgttgtcgagatcactgatgaacatcttggactttcggatatccgagttgagcacgcgcagattagaggtgtagtcgggcaggtttagacccaagctgacggccatctccttacccatcttcttggccatctgggcaaacgtgagccgtgccttgccaagccgctttagtgggttgaactgctcgtgcacctctttaagttcaccataatcgagcaccagccattgaccgctctccatattccaggtgaacaagatgcggctttcgtactgcctgttgtgaaaaacacagtccattcggccagtgcagtgtatgcaaatcgccagcggctgatcccgcgccgagaattgggccgtcagcatgcagacgatagtctgactaagtggacacacgctgatcacctcatacgcccagtcgtagaacacgttgtagatcttctgatgcttctggcacagaaggctgatcacgtagtacgtgaaggtctccagatcaaacgagtgctgggtgattacgacgctactacagcgcagccgatgatacgacgcctgtgaaatcatttgcatctccgagtaacatgagccgtgcacttccattggcagcgatgtgtgatagcccggtgatatgcagtcgtctgatatgagaacagattccaattgacattattatatactatactttaaaaagaattcttttaccctcttcgctggtgatgacggaggttgcatcgtcctcctctacatagcgtcttcttagcttctttgtgcacacaggcttctctggcattacaccgccctgcacaggcatctccacaatacgtggctcatcgcgtcgcggtgacaggaagctcaatccagcgtttggggacatggagccacccatatcgaaacgcttggccaacgacatctggagtggagaaagtgctcccagtggacccactggcttgtaactaagcatttgctgtgtggcctgggataatggtggcgatttctggttaaacatctgagccgagtttgcattccgacttggcgaacgcattagcatggaactggacggtggtgaacggaatcccagatgcggaggcgtctgtgccggctgggagggatgtggcgaagaggagggcgaagcacagggcgagttgtgaaagaagtgtgccgtgggcgaaaaacgatggaagctgcgagacgttgtgctggcagtggaggcgttgaaagccctacccgccaatcgcaccttggtaaaaggtatgatattctccgagttgtcttccgagaactcatatttcttttccgccaaacgtcgctttcggaaagtggatatcttttcgtacttctcgttgtcctctgagaattcatatgcattcgatttgtccgtcatcgaattggcaatgggagggctctaagaaaaaagtaaaatgtattatccggtgtacttaggcaaatttctttaaatgaaacccacctgcaaatcaatggttgtaatgccatttcggaacttagtgactatccgatggttgcgcctgcgtggcggactagattcgttgacaagtggttttgtgaccggcagcgtggtctccggcagagtcatactattagggcccgtaaccagagttggactgcaatgtggcgtgaaaattagcttatcgtatgcctttggcgaagagtaaacgttgctcccggactgcgactcattttggttatgaccgggttgactagagcgctgctcggtttcaatgtcgctaaagtcggcaattatgcgggccacaacactctgttcatttaaagactctgcctccgatccggaacctgtgaatgcagctgaggagcgatcctcttcgctggccaaaatcgatctgggtagcaagaaagattgcgattgaggttgcgcttgaagactgggcaagataaggctctgctgctggggaaggtaccccgaggtcacggccggcgtgtccatatcgatgcgcagcatgtgcataaatccattggagataatcagaatgcgctccgggcaaagcagatttattttcggatcgaaagccggatcagtttcagtcgaggagtattttgtgtgcactgttaagtgacaggtcaggcagtgcgcattgtaaaaggaatctaatggcggaaaagggcttaggatcacaggcaatctaaaagttttaatttctaacacctacatggaccgtcgtcattaagtttcttgcactccaagcaacccagtttaggaactttgacatatgtgatatagctatcttcaccctcctccgtggctgcgccgtggacaactaggatttggtgctgcgcatttttccactgcgtcatggttacagtctttatgttgtccaccacatgatcgtcaaagaggcgacgcgagaaaaagtggcgcagcctcttgtgcggttggaaaagccagaagtacagactttggagaaaattattattaaccttatgataggatatgttgaaaaatatggatctcacgtgtatttgtagcccatgttaaaggagtagtggttcagcgaagagctgtcgttgcacatcacccgatggcttagcatgtactggccgcaggcagttagacccatgaaaatgtgtctgcatggatattcaggttatgaacagaagattgaaaaatatgactattcgaatatcttacccctccatcaaattgctggccataacatccttaagatataactttaacctatttggcactctgacgtaaggaagctgttgcttttggccagccctggaggagcctgagaagtgtccagtgcgctgagaagagaattgaaagtatgtttaattcgtacatcctttggctaagtatagctctgttcctaatattagtaaaactatcaaaagttagtcatgcgcatgtatctttgtaattctgatgtttcttaaattaaatcctttatatattaatttataaagttaactttagagaattgaactctcatgcactcatgcactttcattgcaaatcagtcaaacaaaaactacaatttttccttaaaatgagagggtagaccttgaactgaaaagttaaccccctataggttttgcataattttattgtctgatcaaaatgattaaaatactctaaaataaattagagggcagattagattgcatataatctttcaactggacccacctctctgtcgtagagcatctgcaccagatttcgtgtccttgggattgatgatggcgtgggaactggctcttccgaagactcgtccgagctgtccaccgtggagaagtcgtcctcgtcggaggacacacccgacagcgactccacgtagttctggtagtcagtctccatatccaaatcgttaaaaatcagacttaatttattcctcctactgtctcgtctcctgaatatcgtccgtgttcctccggctccggccgaaatgcggctgtgtcctgagtcctagcgcctctgatcgactggcgtgtagcgccagtggtgctcatcggactctggaccttttcaaccaccgcttgagggtccaaatattacagcatcatcgccttttcgttataaataaaccgaattgctaaatctcactgcaaccgctagagctggaacaaaaatctatgttggttcgatactatcaacaacaatgccagtagcattagttatcgataagaacaaaatcaagaatcgtaattgaactatcgatagatagagcttcaagggcggtttgttcaaatgctagtttctgtagctatgaattaaatttaacttttgtttgtatgtaagtgaataaacacattccattggtacggtacataacgaatttagggaattcttgtataatgttctatattttaatttgtaactacattggtttagtttcgatgacaaatcagcatattgaggtggaaaaattaaaatgagctcatgcaaatgacccaaaatatgcatgttcttgaatcccacaacgtgactatttgttcattgaccccagggcgtatttgtgggtcaattcgtttgcggaagccacccgtggccccaccgcaaccccttaagagccgatcctataaccggcaaaactgatgccgggttcagtgcgccgggttttagagctgaacaaagtgcagtcatgaagaaacccagcagcgggcttcaaaatttttggtaattcggcataaaaatgtcgagcatgccagcaaaacagaacgccaattgccgggatcagcaaatttagccaatggaaattcggatcagaaccgatcgaccaggaaacctgatgcgctggcagcggccattgcaccgtgcttataagagctggatggctaactctcaggttttagttctggaatagtacgtgtcgcggttggtaaatcgaggtacttcgataccccgaggaatcagttaaaatcatacataattgttgaccacaattgcctcgggaacttcgatcgcgtcctgaatttatatcgagttatctaaggaaatagtagccgtgattttacccaagaatttttcacatatcacagttgctgtttcttttagatagctcttttgtaaacagcctagatccgaatgcgagtatccgagtgccttgcgtgaatcctggatg

SEQ ID NO: 13601 - DNA, 2943 bp, DROSOPHILA
ccagctctagcggttgcagtgagatttagcaattcggtttatttataacgaaaaggcgatgatgctgtaatatttggaccctcaagcggtggttgaaaaggtccagagtccgatgagcaccactggcgctacacgccagtcgatcagaggcgctaggactcaggacacagccgcatttcggccggagccggaggaacacggacgatattcaggagacgagacagtaggaggaataaattaagtctgatttttaacgatttggatatggagactgactaccagaactacgtggagtcgctgtcgggtgtgtcctccgacgaggacgacttctccacggtggacagctcggacgagtcttcggaagagccagttcccacgccatcatcaatcccaaggacacgaaatctggtgcagatgctctacgacagagagcgcactggacacttctcaggctcctccagggctggccaaaagcaacagcttccttacgtcagagtgccaaataggttaaagttatatcttaaggatgttatggccagcaatttgatggagggacacattttcatgggtctaactgcctgcggccagtacatgctaagccatcgggtgatgtgcaacgacagctcttcgctgaaccactactcctttaacatgggctacaaatacactctgtacttctggcttttccaaccgcacaagaggctgcgccactttttctcgcgtcgcctctttgacgatcatgtggtggacaacataaagactgtaaccatgacgcagtggaaaaatgcgcagcaccaaatcctagttgtccacggcgcagccacggaggagggtgaagatagctatatcacatatgtcaaagttcctaaactgggttgcttggagtgcaagaaacttaatgacgacggtccatattccttttacaatgcgcactgcctgacctgtcacttaacagtgcacacaaaatactcctcgactgaaactgatccggctttcgatccgaaaataaatctgctttgcccggagcgcattctgattatctccaatggatttatgcacatgctgcgcatcgatatggacacgccggccgtgacctcggggtaccttccccagcagcagagccttatcttgcccagtcttcaagcgcaacctcaatcgcaatctttcttgctacccagatcgattttggccagcgaagaggatcgctcctcagctgcattcacaggttccggatcggaggcagagtctttaaatgaacagagtgttgtggcccgcataattgccgactttagcgacattgaaaccgagcagcgctctagtcaacccggtcataaccaaaatgagtcgcagtccgggagcaacgtttactcttcgccaaaggcatacgataagctaattttcacgccacattgcagtccaactctggttacgggccctaatagtatgactctgccggagaccacgctgccggtcacaaaaccacttgtcaacgaatctagtccgccacgcaggcgcaaccatcggatagtcactaagttccgaaatggcattacaaccattgatttgcagagccctcccattgccaattcgatgacggacaaatcgaatgcatatgaattctcagaggacaacgagaagtacgaaaagatatccactttccgaaagcgacgtttggcggaaaagaaatatgagttctcggaagacaactcggagaatatcataccttttaccaaggtgcgattggcgggtagggctttcaacgcctccactgccagcacaacgtctcgcagcttccatcgtttttcgcccacggcacacttctttcacaactcgccctgtgcttcgccctcctcttcgccacatccctcccagccggcacagacgcctccgcatctgggattccgttcaccaccgtccagttccatgctaatgcgttcgccaagtcggaatgcaaactcggctcagatgtttaaccagaaatcgccaccattatcccaggccacacagcaaatgcttagttacaagccagtgggtccactgggagcactttctccactccagatgtcgttggccaagcgtttcgatatgggtggctccatgtccccaaacgctggattgagcttcctgtcaccgcgacgcgatgagccacgtattgtggagatgcctgtgcagggcggtgtaatgccagagaagcctgtgtgcacaaagaagctaagaagacgctatgtagaggaggacgatgcaacctccgtcatcaccagcgaagaggacgactgcatatcaccgggctatcacacatcgctgccaatggaagtgcacggctcatgttactcggagatgcaaatgatttcacaggcgtcgtatcatcggctgcgctgtagtagcgtcgtaatcacccagcactcgtttgatctggagaccttcacgtactacgtgatcagccttctgtgccagaagcatcagaagatctacaacgtgttctacgactgggcgtatgaggtgatcagcgtgtgtccacttagtcagactatcgtctgcatgctgacggcccaattctcggcgcgggatcagccgctggcgatttgcatacactgcactggccgaatggactgtgtttttcacaacaggcagtacgaaagccgcatcttgttcacctggaatatggagagcggtcaatggctggtgctcgattatggtgaacttaaagaggtgcacgagcagttcaacccactaaagcggcttggcaaggcacggctcacgtttgcccagatggccaagaagatgggtaaggagatggccgtcagcttgggtctaaacctgcccgactacacctctaatctgcgcgtgctcaactcggatatccgaaagtccaagatgttcatcagtgatctcgacaacatggtagagttccacttaaagcgcacacaccacgagacactgtga

SEQ ID NO: 13602 - protein, 892 aa, DROSOPHILA
METDYQNYVESLSGVSSDEDDFSTVDSSDESSEEPVPTPSSIPRTRNLVQMLYDRERTGHFSGSSRAGQKQQLPYVRVPNRLKLYLKDVMASNLMEGHIFMGLTACGQYMLSHRVMCNDSSSLNHYSFNMGYKYTLYFWLFQPHKRLRHFFSRRLFDDHVVDNIKTVTMTQWKNAQHQILVVHGAATEEGEDSYITYVKVPKLGCLECKKLNDDGPYSFYNAHCLTCHLTVHTKYSSTETDPAFDPKINLLCPERILIISNGFMHMLRIDMDTPAVTSGYLPQQQSLILPSLQAQPQSQSFLLPRSILASEEDRSSAAFTGSGSEAESLNEQSVVARIIADFSDIETEQRSSQPGHNQNESQSGSNVYSSPKAYDKLIFTPHCSPTLVTGPNSMTLPETTLPVTKPLVNESSPPRRRNHRIVTKFRNGITTIDLQSPPIANSMTDKSNAYEFSEDNEKYEKISTFRKRRLAEKKYEFSEDNSENIIPFTKVRLAGRAFNASTASTTSRSFHRFSPTAHFFHNSPCASPSSSPHPSQPAQTPPHLGFRSPPSSSMLMRSPSRNANSAQMFNQKSPPLSQATQQMLSYKPVGPLGALSPLQMSLAKRFDMGGSMSPNAGLSFLSPRRDEPRIVEMPVQGGVMPEKPVCTKKLRRRYVEEDDATSVITSEEDDCISPGYHTSLPMEVHGSCYSEMQMISQASYHRLRCSSVVITQHSFDLETFTYYVISLLCQKHQKIYNVFYDWAYEVISVCPLSQTIVCMLTAQFSARDQPLAICIHCTGRMDCVFHNRQYESRILFTWNMESGQWLVLDYGELKEVHEQFNPLKRLGKARLTFAQMAKKMGKEMAVSLGLNLPDYTSNLRVLNSDIRKSKMFISDLDNMVEFHLKRTHHETL

SEQ ID NO: 13603 - DNA, 7048 bp, DROSOPHILA
ccactgatgagtgcatagcgatcctagcggatcgcatcgttaccataatcaagtgggcaatgaataaggagctgcaaccttctgagattgcagacgagccgcagtagatgctattttcgcggtggctgtgcggcagtggaatttcccctccccaaaacctgcgagccgaagacggaaacggagcagcagctggggaatgcatcaaacatttactgcccctccaccagtcgctctttaaaacgtttgagtacctccgggatatcgtgttgctctcgactctctgtacccgataaccccgagaaggagccatcagtgttaattcgatgtgcgttcaatccttgtagccaaaattttaagtaaaggaatataatatagcttctgggttttttaatcgacgactgactaaccttgaaacccactggttccatggcgggcgtgacgagggcggcgggattaagctcgatgttgatgttgttgggctccatgatgagccccaggctctgaagattgcacacctccggcagctgtagggtgggcgtgggcaccttgagcaccgccacggtgcagtcgatgctcgacgccgtcaccgtcgcagtggcgggcagcgtctccggcatgctggccaccgcttcagacggcaccgacctctgctcctcggcgctgctcctccgcctcccgatccctatgctgacaccgatcttgactgggttggtgctccgcgtcgcaaatctgcaagatagttgacattcattagattttaagacttgtagactgcatttcactttcattcggaacggaatgctaattggatcaaaacttattacgcaaaagcctaaaagtatagaaaaaaaaagtggcatgtgttggtgggtattatgggattatggagcatactttcaggcaacgaaacaatgcccacatatcaaacttgcatgataaagtcgtgcacatattgaacaaatattgaaccgaaacccgagaaaaacaattggttccggcttaaatgcgagtcgcttctgcgtttatttgtttctttttagtgttcattttggtataagttgtccgcacttattcctatggttacactgtagacctaagcatagtagcacgcggcgcctccggccaggacaccaagaatacaaaacgtacaaataggaaaaaaaaattcatatacttcgatgctggatggttcataaattaggagcgggagcgtttaagtgtcgctaatatcagtgtcgtgaaaagagcctaggcggaggcttgctgccgtcgccggatctcggcggccagatcctcaagctttacgttggtctcctcgcgcgtggtcacctcacgcagtttgaccaatccctgcgccagctctgcgtcgccgaggacaaccaccagaggaatctggtgctcctcgcagtgctgcagctgtactaacagcttagggttcagcttgtaagagtgctccgcctgcgaggattttaagattattatgcagtctcctggattcaactcaaacataccttcacgcccgcatcccacagcaggttcagaaccttcagacgctgctcgtggagacccttgtgggcggaggccacgtaaacctccacgtcgctggttcgcaacttcagaccgcttgcagccgcccgcgcctccagaaccgagaaaatgcgctccacgccaatagacacgcccacgcagggcacagccttgccgcgcggatcgaacatgcccaccaggttgtcgtagcgaccgcctccagccacggatcccacggtggccggctcgttcgcctgctctccgttctgctgtgatgtcttcgccggagatgccacggtggcggactctcccttgagcacaccttcgtagataacaccggtgtagtagtccaggccacgggccagactcaaatcgaagctaactcgcttatccagaccgaatatggaacagtacttaaggagctgcttcatgccctccagaccctttacggcatttggcacagccttgagcttctcgttggccagcagttgttccaccagctcggcaccgccgctcagtcgcacgtactcgccaattcgatccgctgctgcctcgtccagacccttctcatccaccatctccttgcgcacatccgcccagggcgactggaataaccgatacattacaatattgaccacaattgcagttagcagcgtttgtgctcaccttatccaacttatccaccgctgagcagatggtgcggaagctatccgccggcactccgcacgcctggaacatgccgtccaaaagctggcggtgatttagctttatcacatagtctccaatgtccagcgtgtccagtatctccgacacaatcttgacgcactcggcatccggcagcatgggatcgtaggtgccggcgatgtcgaagtcacattggtagaactcccgatagcgacccttggtcattgccggattgtcgcgtcgatagaccttggcgatgtggtagcgcttgatgctcgagatcttgttcatcgccaggtaacgagccagcggcacggtcaagtcatacctcatcgataggatctcaccgccctgatccttcaagtcgtagatcagctttgagtcctcgccgtacttgcccgtcagcacttcctgtggtgatggataatagaaaaataagtcgaatatctagacacatgacatgaaatgtgtaaggatttataccacaataccatacaatttttacttgtggtttctgcttaaatacctaattaactacttttataccaaaattaatgatggcgagccattaaaattatgttactttagtctttatagtatatgtttccaattgaatactagagatttagaaacaaagctgtgtatactaagtgctagcaaattgtaggcttctgtggctttatcacttaacttgggcgcagctcagtgctatcacaattatatatatataaatcattcaagaccctatcaatataaataatttattgttaataacaaaatgaagcaaggtcatttttgttgattctgagattataatattaaagtaccgaataagctaccagaaactaattgggaattgatgacaccatatcctgcatttttaccttgtacctgtttttggaaaccacttcaatctataatatccctcttttaaattggacatttcatgaattgtagagtttaagttaataatagacccataataaagcctaattagttagacatttcaaatttaagttagtgaatccattagtatagagctcttctatgatcattaaattgtataatgaaatagaatctaagctattagacacctcaggatacctttctaggtgttcacctaaacaaaaactccttacataatcctccaacaattctcatagtcttgaacaatatcatcccactccaatgtgacccaggtgaactcaccttcagctcgaacacgggcgtatcgatggcttcgccgccgtggcgcttgaacacctggacgatcttgtccaggacgccctggcgcagggtcatctgctgaggaccatagtcccgtgtgcctttgggcgtctttagcgtgaacttctgattggtgggggcggcatctccgccaagagtggcctttagggccagtaggcgggcgacctcctcatcgatctgcaatggagaggcgggaaaagacttcagagaggggacatggacatggtggggattgcttagatgctaacctgatgcagttgctcatgttgttgttgttgtacttgtgcttgttgttgtttttgtggctgttgttgttgttgtcgttgggctggaacgccggacgagctgacgcgtccgccgccagagggcgccgtctggaacgttgcacactgaaacgcagcactacagcgccactggcggccaattgaacgcaacatgttatttttttctttttttttttaagttactaattttttgtcgtttttcacttgcaacaactttcttttgcaacttttcaaacctaattaaacaacaacaacaataagttttgcttattttacaactagtttagtgtatggtgagaagaaatgaagtgtgtcggtgttttgtgtgtgtgtgtgcagctgaagcaataaataaaaataatcataatacattattgcgttccattgaccgtcagcgctgatttttttttgtttctcccgtttttggaaacaagtttttgcaatttaaaaaacacttttttatgacacttgaagcggaaaaaacaggaaagtgacgcgatataatggaagctggaagccaaacagttcaaggacactcacaccacacacacacacacacaagatcaagctagattaccgttagtcagctgatctcgtcggacacacacacacaacagcaactttagtgatatttaaaaataggtcacttttaagcttatttgttattatatttcataaattaagctgtttaaaaattggtttgtactattaactattagatattaaagccaaaacttaaaaatgatgatagatataagggaattcccttaaaaacggagagacagatagctcttaaaaaaaaaatagtacataaatctatatataagatattgcctctttacaaggctacagatttgaacaataggaataagtgcagttggtggtaagcgttgttgcaaatgcctcatagcccaaatcacatgttgcagtcgtcaagtcttggatcggttgattgtggtctagcaggtttttgatataatcgctataaccaccatgtgccttttgtacatgcctcctgtttgaccagtcgctctcttttcagtcagtcagtcggtcatagagcactcactttggtgatgcaaatccagctattagtctcatttagctacttgactttaattaaatctaaatctaaaattatgaaattaaatcttttttcgattactgaacatgcaagcttcaacttcaaatctgaaagatatcctaagtatcccaattggattatttaatacctgtacaatacttgttctaattggacagcgtctagaacatcaaagagtacaggaaaaatcactttaaggtcttattaacacaaaagattattgagttttctagaagtctccaactgttttcagcacagtttcaaggaaatccagccaaagatttgaagtgagcatcagtagacttacatcagcaagagattaatataaacaattgcttctattagtcacagcttcggacagcactgctaatttaagctactttccagccaaatagtcgggacaatagtttggcatcactgtgcacaacactaacacacacgcacacagaagcagtgcatttgccgttggccagagcgagacaacaataacaacagagtggcacgaatgtgcgaatgcgaatgtaaatgtgaaagtctgcgcgctcctttaatttgccgtttttcctttgcaccgctcttccgatgttacattcatctaattattacactgcaaaaacgaagatttcgaacaactccaaatgccagcgcagcatgtgtgtgttttttgttatttcccttattctcaactgcatgacgatctgatgaaatatgtatgcgagtgggatttcgaatttgatgacgaaagcagggccgggaattacggcaacaattgcacttattccattgtacacacacaaagggggatgacactggaaggcggacgcgttgctgacgggtgggggggttggatggtggaagtggtagtgctgggtggagggagggagtcggtttccaactggaagtacgaccaaaaactgaccttctccttcgactccttcgctgctttcaattgacggacgagatcgccttgcactttgatttgctccagaatctgctcacgcgtatcactcatattccgtgctcgatggccaaaaatgaaaaacggcaaacggttgacagtccactgcaaaaggcgggcgcgcggcgtttcaatcgtctcgaatcgacacggcgatttatgctgtcttttccagctttcagctgctttttctgcgctgctggccaaaaaaaaaattcgcacgcggtggtcaatgtgaccgttcgtcgcgtggtgggaaaacgtgcgctagtgcgaactcaaaccgtggttgataactgggctggcggacatgtaaagtgtataatttataatttattaacaacaatcaacacacgaatgctggccactgttagtaatattaactgcactacaatttattagctaattttatcgtttttttttttttttaaataaaaatgttcatgtcacttgattgcgtaaagttgatcttgtttgttttttgttttaaacaagttcaaataagttaaaataagttgattcgattacagcacaaacttatctatcctaaaatcattaaatagaatattttttgtcaaaactacatatattacaaatcatcaattaaaaaaaatatatttttttttaaatagcaaatcctgaaatattttaagaagcgttttttgtttaaattgttgtttattgttaaattgtttaaaaatcgaaaaattcgaaatgaaatataagattggaaaaatgttttttacttcaacatttaaaatttccctgcccagcaggcgatgtgcttagtttcattggtatatatttaagcatcacccttagattcagtattccttcgacaccgactgactacaaactgaaattaaaaaaatagcattgaaaattaataagacacgctacacatacacaaacacacacgcacaccacacacgagatgaacaagccgcaaaagcccatcaaggtgaagcgcgccaagcggaccggatgctccaggattcagccgcaggaattcgtggaggctcaggtggagaacgcgcgcagggcggtggagcgcaagctgatctacctgtccgagtcgaacagagccagtgcatccactcgggcggccaagcgaagcacggctggcgcaggcggaggagcagggcgggaaggatcgagcatggctggccatgcccatggtgagcgtcgcaggcgcagcaagaggagtctgctacacgctccagctcaggaagagaccgacgagga

SEQ ID NO: 13604 - DNA, 2008 bp, DROSOPHILA
cgaacggtcacattgaccaccgcgtgcgaattttttttttggccagcagcgcagaaaaagcagctgaaagctggaaaagacagcataaatcgccgtgtcgattcgagacgattgaaacgccgcgcgcccgccttttgcagtggactgtcaaccgtttgccgtttttcatttttggccatcgagcacggaatatgagtgatacgcgtgagcagattctggagcaaatcaaagtgcaaggcgatctcgtccgtcaattgaaagcagcgaaggagtcgaaggagaagatcgatgaggaggtcgcccgcctactggccctaaaggccactcttggcggagatgccgcccccaccaatcagaagttcacgctaaagacgcccaaaggcacacgggactatggtcctcagcagatgaccctgcgccagggcgtcctggacaagatcgtccaggtgttcaagcgccacggcggcgaagccatcgatacgcccgtgttcgagctgaaggaagtgctgacgggcaagtacggcgaggactcaaagctgatctacgacttgaaggatcagggcggtgagatcctatcgatgaggtatgacttgaccgtgccgctggctcgttacctggcgatgaacaagatctcgagcatcaagcgctaccacatcgccaaggtctatcgacgcgacaatccggcaatgaccaagggtcgctatcgggagttctaccaatgtgacttcgacatcgccggcacctacgatcccatgctgccggatgccgagtgcgtcaagattgtgtcggagatactggacacgctggacattggagactatgtgataaagctaaatcaccgccagcttttggacggcatgttccaggcgtgcggagtgccggcggatagcttccgcaccatctgctcagcggtggataagttggataagtcgccctgggcggatgtgcgcaaggagatggtggatgagaagggtctggacgaggcagcagcggatcgaattggcgagtacgtgcgactgagcggcggtgccgagctggtggaacaactgctggccaacgagaagctcaaggctgtgccaaatgccgtaaagggtctggagggcatgaagcagctccttaagtactgttccatattcggtctggataagcgagttagcttcgatttgagtctggcccgtggcctggactactacaccggtgttatctacgaaggtgtgctcaagggagagtccgccaccgtggcatctccggcgaagacatcacagcagaacggagagcaggcgaacgagccggccaccgtgggatccgtggctggaggcggtcgctacgacaacctggtgggcatgttcgatccgcgcggcaaggctgtgccctgcgtgggcgtgtctattggcgtggagcgcattttctcggttctggaggcgcgggcggctgcaagcggtctgaagttgcgaaccagcgacgtggaggtttacgtggcctccgcccacaagggtctccacgagcagcgtctgaaggttctgaacctgctgtgggatgcgggcgtgaaggcggagcactcttacaagctgaaccctaagctgttagtacagctgcagcactgcgaggagcaccagattcctctggtggttgtcctcggcgacgcagagctggcgcagggattggtcaaactgcgtgaggtgaccacgcgcgaggagaccaacgtaaagcttgaggatctggccgccgagatccggcgacggcagcaagcctccgcctaggctcttttcacgacactgatattagcgacacttaaacgctcccgctcctaatttatgaaccatccagcatcgaagtatatgaatttttttttcctatttgtacgttttgtattcttggtgtcctggccggaggcgccgcgtgctactatgcttaggtctacagtgtaaccataggaataagtgcggacaacttataccaaaatgaacactaaaaagaaacaaataaacgcagaagcgactcgcattta

SEQ ID NO: 13605 - protein, 522 aa, DROSOPHILA
MSDTREQILEQIKVQGDLVRQLKAAKESKEKIDEEVARLLALKATLGGDAAPTNQKFTLKTPKGTRDYGPQQMTLRQGVLDKIVQVFKRHGGEAIDTPVFELKEVLTGKYGEDSKLIYDLKDQGGEILSMRYDLTVPLARYLAMNKISSIKRYHIAKVYRRDNPAMTKGRYREFYQCDFDIAGTYDPMLPDAECVKIVSEILDTLDIGDYVIKLNHRQLLDGMFQACGVPADSFRTICSAVDKLDKSPWADVRKEMVDEKGLDEAAADRIGEYVRLSGGAELVEQLLANEKLKAVPNAVKGLEGMKQLLKYCSIFGLDKRVSFDLSLARGLDYYTGVIYEGVLKGESATVASPAKTSQQNGEQANEPATVGSVAGGGRYDNLVGMFDPRGKAVPCVGVSIGVERIFSVLEARAAASGLKLRTSDVEVYVASAHKGLHEQRLKVLNLLWDAGVKAEHSYKLNPKLLVQLQHCEEHQIPLVVVLGDAELAQGLVKLREVTTREETNVKLEDLAAEIRRRQQASA

SEQ ID NO: 13606 - DNA, 3317 bp, DROSOPHILA
ttttctcggatataggcaaaatggaacaatttagccatttctagccaatgacacgccccttcacctcgacgtttctacatctgtgcaaagtcataaaagttaaacgattgccagagctattaaatatttcagacacattttgtgggcaaaaattgtaacagacttcaagcgaacgaaataaaccgaaacccaacccaaatttaagcaaaaacctaaaatgtcttttggaaatgttaagcgcgaaattggcaaactttatgtgcctgaattttggactgcaatttgcgtttaatttggggtcacacacatttcgggcgaaccccgggcaatgttaagttatgtaaaggcaaatttaacaatgtgccaagggacggagctgagggtaatcaatgtgaagcagttttagtctccgaaggcattttaattgccacagagcaacttgcaacattgcaacctgccccgcggccaagttaaatgacacatgtgtctgccccggccatttttctctttctcccccaatatcttatctctctctctctctctgtctgtctctgtatatcttggcctgtttgttgctgctgctgccgatgctgttgaaaagactttcactctggccgagcgctatagatgaaatggcatttgacttcatttttggccaaaaataaaaccgaaccattaactaattagcttacattttgaacgatttattgagctctagacttaagcgaagctcgtctaactaaaaatactacttaaatgctatggtttgctctctcttcatgagagcaggcaatgattaattttaaaggaaggcacaaaagtcgatgtttcagttttaacaaatattgtggaatatattgagctctagttaagttatatttactgaaataactcctccttttattttatggattttggtttttaataaatatctagaaacactcagaaaacgttctcacttgtcctaattatttcttttatattaaccatatctgatcactcaccttctggcctgcctgggaatggactgcgtccagcacacgggtgccttgtgtagttgatgcatatttcgggaggacttgtaggtgagatcgccgcactccgtctgccacacctggagattcccctccgccggatagaaggtatacaggctgtgggtggccgaggcgatgaccggcgaggagccaccgccctcgaccacatcgaccacgcccgctgccaccagtggagatagggtggcactagaaatcggttggacgagtagggcctgtccggctgccggtgctccggctgcagtgcctccgccaggcgacttgtagttcagcatgcgggtggcggtggcaccggcattgctgctgcttatattgccatttccgtcgtgcttcaggatcaggctacttggatcgtagccgtggcgattgtgccgcgaaatggcgtccaccgaatgggatctaatgccggttcgaggtggattcacgtggagccgacgtccgcgccggtagttagcagtgccagttccggttcccaggctactattgcccaatcccgaagatccctgctgcatcgacgcggtcaaccggtgattgtggacactggaggcggcacttggaacgaggggctgtcgttgtttttggtactggaggcgtggctgttgcgggggtgcctgatgccttagtttcccctgatccttggcaaagaactcccgcctctgcagctggggggcggccaaagtgagtgcgcccctgacggagttcaccattgaggggctggatgcatttgctccggacgtcgtcttagtggcgcccccagtagccgccgaactaagctgcgcgagcttactggcattgttgttgctgaccgtatttgctgcattgctgttgttgcaagtgctggtgctagtggttccacttgtctgatgctccgaatcggtggaaacccgatccggatcactttcgaaaccttcgtccagggatcgagttggactcagaatgggcttcgagtgctgctgctccagtttcgtagacatggctgctggccactaaggggtattatttgttgttgtttcttttgtgtttttttattattttttctacagctttagcccgggtattgggtatcgttacacttgctgcacatatgcaccttatttctctctttctctgccgcctgccatgcacacttgtttttcacatttaatttcgcttggctttcagctcgttcacttcgcgaaaagtcgcgccaaagttgcagtttgcagttggtttggattttggttttggttcgaataaaaaatagctactgcgttatacacgtctgtctcgcacgaaagctttttatcgactgtggagtgcgagtcggaaacggaattaacttggttcgctctgttatcgccatgttaagtaacattcgttaacatttaccaacggaaagagcaaaagcttcgatcgacacttgttgcggtgcacctgttacatttaaaaagtgcctgagagagagagagagtaacatcgctcagctgtttgccaaatgttattcgcgaaacttccaagtgagaaagatcatcacagaataacaaagtaaaatgaagaaagacaggaaaatataaacacggaagtgtcgagacatcatcctaaaaatgctttttcctgttcacatttgctttgcacgaaaatgttatcaatttacaatattttttaagtgttttatcaaagctgttgttttagtaaatacgattgtgaaaatcttttaattgacactacacattcaatatctcccagatatatatctatatttttccgatattcggtaaaactttaaaaccaccatgccatatattttagaagcgactgtgattttgttttcggctccactgggatttatcaatgaaaataccaactccaaagcaagagcaaaaacaacaaccggcacaagccgagagagggagcgaagcaaacaaaaacaaaacgaaggcttgaaaagctcgctgtgctgagagcaaaagagcaaggagctttcgacacctgctgcacctgtacaacaacagcataaatatttgtgggagggtggcgataggaagtattttgcttattttgttgcttagattcgattgaattttgagcaatgtcttttgtaatttcctttttatatatttttttaatttttgcaatatgcctaactgactgtatgaaccatatgaattaactcctattgaatatattttaaaaacttacgcctattgactatatattgttcgaaaaattattgtaataatcacttggcggcacagatccttccgcaatcctaatccaattcatgga

SEQ ID NO: 13607 - DNA, 1317 bp, DROSOPHILA
acagacgtgtataacgcagtagctattttttattcgaaccaaaaccaaaatccaaaccaactgcaaactgcaactttggcgcgacttttcgcgaagtgaacgagctgaaagccaagcgaaattaaatgtgaaaaacaagtgtgcatggcaggcggcagagaaagagagaaataaggtgcatatgtgcagcaagtgtaacgatacccaatacccgggctaaagctgtagaaaaaataataaaaaaacacaaaagaaacaacaacaaataataccccttagtggccagcagccatgtctacgaaactggagcagcagcactcgaagcccattctgagtccaactcgatccctggacgaaggtttcgaaagtgatccggatcgggtttccaccgattcggagcatcagacaagtggaaccactagcaccagcacttgcaacaacagcaatgcagcaaatacggtcagcaacaacaatgccagtaagctcgcgcagcttagttcggcggctactgggggcgccactaagacgacgtccggagcaaatgcatccagcccctcaatggtgaactccgtcaggggcgcactcactttggccgccccccagctgcagaggcgggagttctttgccaaggatcaggggaaactaaggcatcaggcacccccgcaacagccacgcctccagtaccaaaaacaacgacagcccctcgttccaagtgccgcctccagtgtccacaatcaccggttgaccgcgtcgatgcagcagggatcttcgggattgggcaatagtagcctgggaaccggaactggcactgctaactaccggcgcggacgtcggctccacgtgaatccacctcgaaccggcattagatcccattcggtggacgccatttcgcggcacaatcgccacggctacgatccaagtagcctgatcctgaagcacgacggaaatggcaatataagcagcagcaatgccggtgccaccgccacccgcatgctgaactacaagtcgcctggcggaggcactgcagccggagcaccggcagccggacaggccctactcgtccaaccgatttctagtgccaccctatctccactggtggcagcgggcgtggtcgatgtggtcgagggcggtggctcctcgccggtcatcgcctcggccacccacagcctgtataccttctatccggcggaggggaatctccaggtgtggcagacggagtgcggcgatctcacctacaagtcctcccgaaatatgcatcaactacacaaggcacccgtgtgctggacgcagtccattcccaggcaggccagaaggtga

SEQ ID NO: 13608 - protein, 341 aa, DROSOPHILA
MSTKLEQQHSKPILSPTRSLDEGFESDPDRVSTDSEHQTSGTTSTSTCNNSNAANTVSNNNASKLAQLSSAATGGATKTTSGANASSPSMVNSVRGALTLAAPQLQRREFFAKDQGKLRHQAPPQQPRLQYQKQRQPLVPSAASSVHNHRLTASMQQGSSGLGNSSLGTGTGTANYRRGRRLHVNPPRTGIRSHSVDAISRHNRHGYDPSSLILKHDGNGNISSSNAGATATRMLNYKSPGGGTAAGAPAAGQALLVQPISSATLSPLVAAGVVDVVEGGGSSPVIASATHSLYTFYPAEGNLQVWQTECGDLTYKSSRNMHQLHKAPVCWTQSIPRQARR

SEQ ID NO: 13609 - DNA, 3990 bp, DROSOPHILA
ctgcgatgacggatcacctccggccgacgaatggagagactacacgcccgggttatggcattgcgagaaaaccgaaacattttgcttgaagtttaacttaaaactttgatgaatgctgaataatattactactagtattgaaaactttctcttcgattttctgtgccgcttcaaaataattcatgaaattttttcacccagactagctaaaagtgtgtacgtgttcaacctcgaaacgaataaaaataagactgagctagtcctatgtttcagttccgacgtagcactgacattagtctcgataaggttgctagatcatcaggattttaatgtaaaatctctgcctgctaagtgcgaattttttagagaatatgttcttaagatgaaatgctccaaatgtcaattgtgttgcgatttgcaacatgcttttgcacaaaatagcaatcgaaggttaatgttcttgcaactgtctaatgcactcaataaaagtcataaaatcgctagataccattactacgcataccacagattcgattttcattacaatgtacattttcctgtataagttacttcaactacataaattccccaaaggcgatatccatgaaatatctaaatatattgtataggcttattgaaaagccaatatgcataggcttgtatcccaataagtactcatgccatttctaagaaccattatatttgcaaatatcattaagaaccatttacaaaaaaatttcgatttgagtgcatcttaaggttttttttttattaatttgcttaatatgtttatgtttacttaaaacgaacaaacattttttccctgggaacaatgtcgttggaaatttttaggggacgctgacgaactgactaaagacatccatcctgcacagacttcaaaatatttcaccaaaatatggacatagtgatagcgctgtcactgccgttgggatttcgcatcttcggtcagctgctcatggcccgatctctgcacttcgtcctacttgcccatcttgggagcggtgtctttgcagatcgtctgtgcaatgaattcgataagagtacgagtgggtcggccagccattccgcgtcgcaggtactcgaagtcaataccgttggtgaccatcacattggtggcatcctaggcgaataaaagtattagttgaatataatttaagccatgctaagcaaagtgcaacttacaatatgcatccattggccgcaaggcacaaattcacgaaggaaggcggcagccttgcaagggcgtccaccacgaccgataccgtagttctggacatcacttcgtcctccggcacgaaccgccttgctgtagaagttccacaacgggaagcgccacacgcggtctccagtgtgcatgctggcgtgcttgatctgctgccaaaggatctcggagttggtgaacacaccgcaagcagcttcgtcgagggactgacgcatgtatcccgaacaggtgccgatgtcaatgatgcacttggggcagaagttctgggcatacagcagggcatcggccagaaccaagacatcctcgtgatccgtgcactgcacctcaatggtcttgccattcatagacttgaccatgtcacctggtcggaaggagttgcagccaacgacgttttcgcacagaggaataaggcctcggatattgacctgaaatgggattgattaataacggaactacctggggacgcgtctcgagtgtcttacaggcaatctaagtccagcaacggcccgacatgtggccaccaccacagccgctccagtcatgtcgccgcgcatgttgaagagctccttctttttcttcaggcacagaccgccggcatcgtaggtgatgccctgtccaaccaggacgatgggtctctcctccgcgcaggtgccgtagtagctcagctccagaaagattggtggttcgcaagaggcctttcccaccgccaagaaggcgtgcatcgactggctctcagcccaaccctcgactttgacctctacattgacgccggacttacagagcacttcgacgacattctgggcaaaggcagtgggggtcaaaaggttggagggcatctcctgcaactggcgggtcaggttctgcgcggcagccttttgcagcccaatgcgccatccttctatgtcgcagacctcgtccttggtggcgtacaaatcgatggccggaacaaagattcgggtcttgggatcgcgcaattcctggtacaaccagatacccaaggcggcaccttcggcagccgattcggcgtgtccgcagttctccacctcaatacgatcggtatccaactcggcgagaatcctacaggcagcggccaccgaccttcggatagcctccttctgttcgtccaggacctcatagggattatagcccaagcactccttacccagaccaacgaccgccaccacagaataatagggaatacgctccggctcaacggcgaagagaagacgggcctcgcctctcttgggcatgggtcccgacatccggagcacctctatcagacgaccatttgtcttttgaagattataacgccagccggcgggggtcagaatgccggcatcgttcttgtcctcctcatccgcatagacgcctatgaccaaggctcgcgacggctgatccgcacagatgtccatctgctggagcagcagcatctggttaaccgcctgcgaggcgtatgaacgcttgatgaacttcgggacatatcgtcggcacaccggggaccgaatgcaaacgctgaatagcaactgacgagtttttccgaacattgtcccagtacttctgcacacgtaaagtacccttcaaaaaaatgttgttccaaaatcgagagaaaaaaaaaactatgaatttatcgttcgtaaaattttgtttccaataaattggaaataacaaatagtcgaaatggggtctagtgcaataagcaatttttttacgttaaattttttttgatgagttcttaactctacgaaacgatcacggatactgaattctagggagctgcctaggggttaggtagcaaatggatacgaaagtcggatgacagttgttccagggccatctataccattttccatggcctacacggattgattgttcgtatcctatttactatatagaaagactttactttacatttactttggtttcgtttattagtttccatactcagcataatcatttaggtacaattcgttcattagttataatactgcttaacatttgagacaccaactagacacagacacgtcacgtatacgtacactaatggggcaacatttgtggtaacttccatacatgggtatatttcgatttagctacagtgagcagatatacatacatatattccggtatataaaataacattggctatcgaacgtcctctatcgtaattcactgcgacaattcttgtacttattgtatgtgtaaatcgtcctttggttgggttgccgttgcctcgggatatgttttagtttaaatggcttcagattcgattcctttcgtttggtggggtgtgtggtttgcggttcgcggtttaatgcgaaagtatgcagttgagaaatagatatatgtatattagatatagctacaggtctatatagttgaagttcgttctttgagaggggggagcaacagtggattcaacagagactagcgtaaactttgaaggagtgcaacaatctaggggtgcgcagagcacataagaggcacattagttatttgagcaacagtagcatagagactagagtgttaaacagctgtgagtatccatgatgctgggtactctacggtactttggcattcgtcatcaaaaaaaaatgtcatttcgggccagcacttttaggcctggcttcaattatgcacaagagtgtggaaagaattttatatctaatatctttaacatatttggttattcattctatatacaagaacattcatcttggactacgaggttttggtttgaaaaaagattt

SEQ ID NO: 13610 - DNA, 1763 bp, DROSOPHILA
gtttcgtagagttaagaactcatcaaaaaaaatttaacgtaaaaaaattgcttattgcactagaccccatttcgactatttgttatttccaatttattggaaacaaaattttacgaacgataaattcatagttttttttttctctcgattttggaacaacatttttttgaagggtactttacgtgtgcagaagtactgggacaatgttcggaaaaactcgtcagttgctattcagcgtttgcattcggtccccggtgtgccgacgatatgtcccgaagttcatcaagcgttcatacgcctcgcaggcggttaaccagatgctgctgctccagcagatggacatctgtgcggatcagccgtcgcgagccttggtcataggcgtctatgcggatgaggaggacaagaacgatgccggcattctgacccccgccggctggcgttataatcttcaaaagacaaatggtcgtctgatagaggtgctccggatgtcgggacccatgcccaagagaggcgaggcccgtcttctcttcgccgttgagccggagcgtattccctattattctgtggtggcggtcgttggtctgggtaaggagtgcttgggctataatccctatgaggtcctggacgaacagaaggaggctatccgaaggtcggtggccgctgcctgtaggattctcgccgagttggataccgatcgtattgaggtggagaactgcggacacgccgaatcggctgccgaagaaggatggcgcattgggctgcaaaaggctgccgcgcagaacctgacccgccagttgcaggagatgccctccaaccttttgacccccactgcctttgcccagaatgtcgtcgaagtgctctgtaagtccggcgtcaatgtagaggtcaaagtcgagggttgggctgagagccagtcgatgcacgccttcttggcggtgggaaaggcctcttgcgaaccaccaatctttctggagctgagctactacggcacctgcgcggaggagagacccatcgtcctggttggacagggcatcacctacgatgccggcggtctgtgcctgaagaaaaagaaggagctcttcaacatgcgcggcgacatgactggagcggctgtggtggtggccacatgtcgggccgttgctggacttagattgcctgtcaatatccgaggccttattcctctgtgcgaaaacgtcgttggctgcaactccttccgaccaggtgacatggtcaagtctatgaatggcaagaccattgaggtgcagtgcacggatcacgaggatgtcttggttctggccgatgccctgctgtatgcccagaacttctgccccaagtgcatcattgacatcggcacctgttcgggatacatgcgtcagtccctcgacgaagctgcttgcggtgtgttcaccaactccgagatcctttggcagcagatcaagcacgccagcatgcacactggagaccgcgtgtggcgcttcccgttgtggaacttctacagcaaggcggttcgtgccggaggacgaagtgatgtccagaactacggtatcggtcgtggtggacgcccttgcaaggctgccgccttccttcgtgaatttgtgccttgcggccaatggatgcatattgatgccaccaatgtgatggtcaccaacggtattgacttcgagtacctgcgacgcggaatggctggccgacccactcgtactcttatcgaattcattgcacagacgatctgcaaagacaccgctcccaagatgggcaagtag

SEQ ID NO: 13611 - protein, 519 aa, DROSOPHILA
MFGKTRQLLFSVCIRSPVCRRYVPKFIKRSYASQAVNQMLLLQQMDICADQPSRALVIGVYADEEDKNDAGILTPAGWRYNLQKTNGRLIEVLRMSGPMPKRGEARLLFAVEPERIPYYSVVAVVGLGKECLGYNPYEVLDEQKEAIRRSVAAACRILAELDTDRIEVENCGHAESAAEEGWRIGLQKAAAQNLTRQLQEMPSNLLTPTAFAQNVVEVLCKSGVNVEVKVEGWAESQSMHAFLAVGKASCEPPIFLELSYYGTCAEERPIVLVGQGITYDAGGLCLKKKKELFNMRGDMTGAAVVVATCRAVAGLRLPVNIRGLIPLCENVVGCNSFRPGDMVKSMNGKTIEVQCTDHEDVLVLADALLYAQNFCPKCIIDIGTCSGYMRQSLDEAACGVFTNSEILWQQIKHASMHTGDRVWRFPLWNFYSKAVRAGGRSDVQNYGIGRGGRPCKAAAFLREFVPCGQWMHIDATNVMVTNGIDFEYLRRGMAGRPTRTLIEFIAQTICKDTAPKMGK

SEQ ID NO: 13612 - DNA, 2351 bp, DROSOPHILA
ttcttaccaaccttccaggaaactatgtttcttatttgcatagaatatcattcaaaaaacgggttgcaatttatgcactctacattcaagtttatgactgtttcgttttggtcaattaggatttccataataaatggacgcaggtcaaatcgagttatgactaaaagatgacataaattttcaatacaaatttccatttattgctaaattatcgtaaaagaaactgaaacagataggttggcaaaaagatctctatatgccgaatataataaaaagaaaacttaatcaattagaatatttgcaaattgtgtaaatttatatttttatgttctgactttataaataaactgaaaactttataaacatttttttatcgtaacatgaaattatgtgtttgaaggcaaaactcttgaaatacgataaactagtctccaaggcgaaatctagattgtggtttgtgtactcgctaaggagacctgatctgttctgagtgtacccgctaggggtcgctctactacatacgataagataaaatgacttctttatttaatttttaggataaccatttttaaaagcgaagtatttattagcagattaaatgttacatacgttttattaacttgtaaaaattggcagccgtttaagtaatacttaaatatcgtacttgggaaattgggtcaataaacagctgaggtccaaaaaatgagcaaattcacattcgatttgcactttggacgcaataatttaattgctctgctattaagctctgcaaaaagggagacagactgcatggtgacagtaattttttgccacattaggtgataatcgtctgcttgtttctagtttgcgacccgtttaaattgcttgctatgtgatggcactgcatttcttaaagcctacggtaaaagtgccgagttttgttattaaagtcaacgcatgaatgctataagaatgccaccattggtcactaaatcgacagttgtaaatcacttagttcatcatgcagatcgttgctctcaccctcgttgcgtttgtggccattgccggtgcctcctgcccgtatgcagctccagctccagcttattcagcgcccgctgcttcttctggctacccggctccaccatgccccaccaactacctgttcagctgccagcccaatttggccccagctccttgtgcccaggaggccccagcctatggatccgccggcgcctacacagaacaggtgccccactacgtgggaagtcccaaccgagagcagttgcagcaatttcaccagcgcattggaatggcggctttgatggaggaactgcgcggcttgggccaaggaatccagggtcaacagtactagtggcaaaaaaaaattcatgtgaagaatgttttcgaattaaatccgtctatgctttaattggactttatactatggaacaaaaaaaaattgggattggagataaggaaaactggtaacaaaaaaaaaaatgatttaaaacttattttttgttgttttgtgccctctgccctccgattccttttcgaaagccataaagaacatgtgtcgtctgtatttatatattctaactgcagccgtcctaaaacggattattgcaagccattttccgagcgattcacctcttgaatttcccattactagatgattctcacgagatcgtctccgttggtttctctcgcgggcatttttgtcaatggatgcggcgcgggtgccaaatatattgtcagtcgaaattgctgtcttgtgcggtcggtcgcatattcagacgtctccaccgcgaaccgcttgaaactgctccacattgctttgcccaagtggatcacgccctcggaacataaatcccatcaagcatatagattccagcaggatggcgttgcgttcgttcaaatcgctgccatgtgacggactctaagtcccatagccacatttgtgacccaattcgatgagcaattgtgtctgtgtgcctgtgtgtgtgtgtgtgtgtgcggggctcttggccatttaacgattagtggccataacggcaaagtgtttgtttattttgttgtgcgaccgcagaaacgattccaaaaatgattgcataattgacttttggcgggggggtgtagaaatcgcgctagacgctcagcataaatttcggcttgtgttcctataccgtttgtgattccaaaacaatttgtgagccatgaaaaagcttcatctgggtgccaagcacaagggcaagtcctacaagccctttaggaataagaatcgtcgggtaagtgaaagtaatagatcggttagacatcctaatcttaccccttattttaatgtgcccccgggcccgggcggaattcgtata

SEQ ID NO: 13613 - DNA, 351 bp, DROSOPHILA
atgcagatcgttgctctcaccctcgttgcgtttgtggccattgccggtgcctcctgcccgtatgcagctccagctccagcttattcagcgcccgctgcttcttctggctacccggctccaccatgccccaccaactacctgttcagctgccagcccaatttggccccagctccttgtgcccaggaggccccagcctatggatccgccggcgcctacacagaacaggtgccccactacgtgggaagtcccaaccgagagcagttgcagcaatttcaccagcgcattggaatggcggctttgatggaggaactgcgcggcttgggccaaggaatccagggtcaacagtactag

SEQ ID NO: 13614 - protein, 116 aa, DROSOPHILA
MQIVALTLVAFVAIAGASCPYAAPAPAYSAPAASSGYPAPPCPTNYLFSCQPNLAPAPCAQEAPAYGSAGAYTEQVPHYVGSPNREQLQQFHQRIGMAALMEELRGLGQGIQGQQY

SEQ ID NO: 13615 - DNA, 11251 bp, DROSOPHILA
aaatggtttagaattaaagaatagataattcaaaaagttcagttatagtagctgagctttctggttaccaattatttaaacattgataagcatatcattttcccaataaaaatcgcttcagttctgaaatgagtcattaaattcaaagctatgccgttttccctacgcggttttatcatagaattagtaagcgttatcgtttgcaacatgtaatgtatgtttgtgccttatatgtcggcgcctaataactcgaccggaactgattctgtagccgacctgtgcgccataaaatccccagccagatttcccttttctgtcctcaaggaaaactgcaaagtggagatatgacagtgaaatcggcggaggtaggggagggggggggggttgtaaatttcgattcaaatcgacagcggtagcgttataacggaaaatgcccgttgacaagcgctctctctctctctctctctctcttttcccgagctctttccctctctcccactccctaactctctctctctttcactcagcgtacttcgggaaaatcggtctgggaatcgggggtattactcgtcgctatagcgctaaggtttggcattcttgttctgtttgtcaaaccgtgcggttgattgtcggaacttttgaattccggaaaatatagtattgatcgaattcgaagctagtagaaatctgcgatttgtttaccagttgcggtcacggtctctctcgcaagttgcattagtaatattgcattttctattctcaaactcaaattcaaacttaaactcaaatccaaatccaactccaataccacacttttgagacgtgtcccgatcattgctattaaatctgtcattcaattctgttttgtatctgtaacaagtgcttggaagccagcctcgattttcgagcgttgctctcgtttcgcgcccaaggatcttaacacccaacggccccatcctgcatccgcagagatatcggctaattaaggattatcatcaatatgagtttccataagagcgactcgcggacgccgctggcgcccaccgagtacactgtaagtaattcttctgattaaatcgattagatgggggattatcatctgaaattacctcaaatgggttaaattgatttgtaaacttttgttcttttcctctaatttatccatcattctttgcaattcttaattcaagagtcctttttgattattaaagatataaatagttgtgtatctatgtttgcattttgagggttcaggacgcataagtttagcataatagaatgttctggaaagttgaagagaaggtcctttgttatcctgcccgttgctttgttagacctgtagacaggactttaagttctaccaaacttagctatctaaatgatctcaaaagtataaataataatatgaattgtaaattttccacttcctgtctttaagcgcgttaagcattaaaatcccctatgcgaaatcacttagattcttgcgtatttagattttcgcatattatcggtagactatgaaactttccgttgattaatttggcataaaggctttttatcacggacatgtgatgtgacaccttttctcccgcatttggctcgaaagtcccgggacttaacccactaatgccttgtttatttattgatcgatggccgcttgccgcgctttacatttgctttcgtttgaatgattgtttatgcaaattttgtgggctaatgttttgtttggattgataacaaactaaagtctaatttcggggatgatttcggtgcttccttttctcttttccattttcctttttggccgcttgctcatttatcgctttgctgttgctgttgttatgagtaacaggccaaacagttttccacccgcttttcctcacagtttgttgttgttgttgttgttccttcggttgctgcctattttcagggcacccagtggaattttccactcgccgccgagctgcacttttatgtgtgccgggacttgggcataatatttcttaacaatggacatagtggagtggagtgtagggcattcggacgaccggttatgactggaacacacatactacctacctactactgtgtcagcgaatttggagttcggggtttcgagtcgatggaatatttcttttttttcggctgctgcgcaagcgccaatgttgaacaaaaaatcgtactgcgcggaatccgctgatttgacactttgggttttggcaccgattcgagctgtgggtttttggtttcgcactcggtaactttccactgcaatgtgtgggggaaacttctgtagccacaaccgtacattctatatactatatagcatagctcgctccgtgtcaccccacttgcatttggaggcagactgcacttgaaactcgaaacgaaacttgaacatttaagctaataacaatcgctgggctttgttccgaaaatcggcaaccgattcgtctgatccgatttcgatacgaacacctacgggctatttggatcgatcggtaatattgccgatccaactggattggcgttcgaatcaattgaaactatgaaactatggaactatgtggaactttcaagaagaacatttcgtaatgaatgataattatagatttcaagctctaatgcaatgttaagttaagttggcatctaaaagtcgttgcttataagtgggttttataaaagaaattcattataatcaaatatatggttggcttagaagtgaaattagataatatgtttcataaatttgcggtaatttatattgtaagctaggcttaaatgtcaaaaacctatattttagttgcatataaaagtcattcttcatatgtgcgttgtaggcttaaagtcgcatagcaaattcaatttgtatcttttactttaatgggtcatttaatttattactattcctaatttgctacatctttacaaataaaatctttctctgtatactttgcatacttttttaagtgccttagttaattttatcttatttatttatttatcggtcagtcaaaaacgtgcaatcaatcttctgattgtatttgcaaattggaaatgtcatgaaacgcaagtcatttaattcaccagtgataattgtatccctatcgcgatcatgggactgatcgacctaacttagggcactcgtgattcgttgagatccgtgcagcatgacccatatataccatttcttatcggcaaatgtcggaaattgcaggcgccatagttgcaattcaccaatttcgcaggaaatgtggggaaacaaatagatctgacgacattttcaggggaactgaaccctcggccacgtgaattccccgcgatgtcaaactcagcgcttatattcacgcagttttgcataccacaaactgcatactgcacaatgcattttttttgtctgttcgtgcttcacattttgctaacaaatatacacaaaaattttccactgcaatttgttgtcgtttgccattttcagtttcgttttattgcttttgccgtttcggtttctgtttcggttgtattctctatattttccacatccacttttttttttcacttttcgcttacataagttcaatggcacgccaggttggggcagcgcatttggagttcgttgggtctacggctacattcgatattatatccctaccaaactactattgacagttttaattaggaaagcacacgaaatgcctgtgcgcctcagaatgcggcattttttctttgctcagttgcacaggtagaaaaaaaagggttattagagggggtttaatgtgcaaatgccacaggttgtcatgtccggaagaaggcgtcaccctagccagattagtcacccaatctcggcgaatttgctgtaagtgctactgagattcttggccagataagaagaagcctaattaataggcttcccaaccatatcgttatcggctgggagaagcgtggaaatcgggaaatacctgccgtaaattaaacgctttttttttttgctgaatgacagtgagtgatgcagttgaggtatttttttttttgaaattttttttttttttagcatacaaactattcaggtgacacaagtgttttgcgcagttccagaaatcactattatctattattaaataagccaaacattcatgattgcattatttgtctgtggctaattggaagtgataactatttcgtgttgggcggcaatgcaaagcagcgaatcgatttgttggtatttatttgctggcattatctttctgcgcgcgaaactatagttgtgggtgtggcatttatgggcgtctaataaggtgaattttataaataattataattatttatttatttgacattgaataaaaaaggtattttagacagcataaaaagaatatgactgattttaagatcattaatacagtttatatgagaaaatgtgctaatagaaattttggctagcaagtcttctgctttgccctgtgctcttatcaatcgctcattatcaattcagcgccccttatttctgcgcccattcgtcacacactttgcaatgttaactacacttgactccattttgctgaacttgagtcgatgcagtgacacgtgtcgtgcttctggggcggctcctcctcctccttttatgagcaccaccccctaaaaaaatgacacattcccaactatttttgcttttttttttaccatcatcacgtttctgtttatttttgctgcagtttgctaaactcacgatattagaatgcaataaaaaagtgcaacgcaataagcaaatttggtccactatcaatgcagtcaaaaaatagatctagtaacttaaactagttcatattaaagaattggtgggtgttctttttcgtggaaacatagtttttaaaccattaatttaaaatttttcattttattgagcatttattaatttattatatttgtttgactatttttatcagtgaaaaacatggataactttgatattcaaagatttaataacccaaattataaatttgaacaaaaagttaattttaagttaattttttattcattgcatataaaaatcattttagcagatttaagactttaagatatatttaaattccaaattgtcacctgtaaatcaacttttttgctgtctgtactaagataaattgaacattaacttaaaatacaatgtaagcaattgactgattgactaactaactgactgaatggcgctttgtcgcaattagttggcactgcagctgtctaattattttgctatctatttcaagttcgaactttccgtatgccaaacaccgcgtttttgtttgcctttgcatttgcgcactcgattttcagcgaataataaatatatgggttcaatgtttttcgaagcggaaaaaggctgcatgtacaaaattcttagcaaatcggtctcttaaaatttgtttggccaaatttaagtctcgacgggcggtaatcaatcaagcatgaatgagcgcagtaaagtcccaaaatgttttgaatattcaagttttgtggttaaagtctggtggtatttatgctttatttgagttcctcttaaatgagaaaattaaaaatgaattaaaaatatacttaaaacattttattgaataagcattataaaaagaaagttaaattaagttattgtagagttgttttaataaaaacaatagtttattttttacgaaatttctttacattctgcaacattacttacatgcattttacattacttgcattatatttgacactaagcattttgatcttcagtcactatgttacccgatttctgttaaccgttgtcatgttatcattcttctgttagcagtctgctagttaacagcaagagcctaagcttccactgatatcccctaggtggcgccattagcaaatttgaattgaaaaatttaaaataagtaaaaaacgtttgtcaaatcgcgttttctattaagcggacaattaagcaagtgctttgttttgtgctcattttttgtgccttttagcacgtatttgttgcacaaattcccagtttcctcattagtctcaacgctgcccagcgatcgtttaattttgaaagcgttgaaaaacaatttattcaaaaatactctctcaccctcgacccgatgaatttccacgatttttcgcactgcggtcacgtgtggaagagaggtatttaattttgctgtgacgtcatgcggcgactgcacccaaaaactaaagaaaaataatgcaaattgtgaacttggtggctgtctgggaattagtcgaatgtatgatcccactcaagagcatttatagagagaatccgctgaaaggtgggtggctagttgggttggttggttgggttttgctgtttttgacggtggtgtggcggtggggcggtgttttgtttgtcgccgtcattgcatcgctggctggccgccttgattcagttgcttgtcgccatttgcacgagtcacgcgctgagatttctcccgagactcgtatacacacacacacacagtgacgcccaccgtccaccgtccaactggaacagaacgtccatcctccagcctgaccttggaagacctcaagctgaacgcccccgctggaaagccgccgctgccgccgcgtcgcgagcagctgacggagaagggacagagtttaagcctctccagctttggtggctccgcaggcaacatttccggttccggtcggaagcagcatctttcgggcgctgccctagcacgccataagctgaagatgtccttgaaacgtggcggaccgccaccggtggccaccagcggatccggcgtcatgaccacctcgttagaccagcaggtggcaaagtcaacgaaccgtgctaaatcagccaaagcctaaatatcgcgcatacgccacctgttacaatctgattccgtagttaaagcaatagattatctatttcgtttgtgtcataaaactgcattgaacttgttcattgatcttgtttttgcgtattttttttgctttccgcttttgggccacaattcattggttcctcctttttgcgcactgcagctgcgaagagcttttacataactttagctgctgttcgaaaatcgcagctcgctctctatgaattttctatacgcttttcacgatccgtactcatttttggcttttccttctggccgcttttcctctcgttgcagaaaatcccgacggtcactgcgggctacggagaaaacgagaagcccaaaggcggcaaaggcgggcaatccaagtgagtatcacctcctatttccgactcttacgagagtagataccatagagatcgagattctacggccgggacgaatcgattcattcgtctggtcgatgccacagccatcggccacgttgtctttgaattcgatttcgattgcgttgcggctatagaaactcgatcgcgatgtacaagaacatcgacaatgagtcctccacgaccatgtttgaaatgtactcctcctcggataggttcatacgttcggacatggccgacgtacccgtgcagcaggcggcaggatcgacgcttccgttggtaatctctcggaaaaaaggcgacgactccgaggatggcaactacaatccgttcgagcaccgcaaggtggagcatccgacatcgtaagtactctgtgtaaaagtcgatttaaattaaaaggggatttgtaatttataaagatatataggggaaaattcaagactttcaaaccaatctgtccgttaaatattcttgcaattgttgaaaatgttacttaaatttttaacagagtttaagaggtttaatttaatatgtgagcaagaaacatactttgttgctaaacgattttgttgatattttatagaaaatagtgttctatttctttagttctgctggcacctaaaataaatgctgtaatatcatgccttacttagtatttaaaaccttaacgtacacaacttttgttggcacccccgttaagcagctgatccaagtcgttaaatgctcaatgactaattcccttaattataaaccaccattcgcgtcattgacctttaaccgatctaatgactttgacttagcatcgatctaaagcgaaaagaacggaaatgcaattgtattgacattggccttggacatttttggcaaactactttttccaaactaaaaataagtaaaatcgcagatgaaaatctcgagcgaacgagctaataaaacgaaagcgccgacaaatgttttgctcgactcgtttagcaagtggaatgaggaatccacccagccttccaccctccgatttttcatctgatagagaaaaacgcatccgctaggccttgcattttgcaattgcgtgaaatgaaaatgccgagaactgtgaactgcaatagctcactagaataattattaaccgaaatataccaaaatattcggtgctatatactttaaagtatacagatgagtgattaataggataactacgtcattgacgtgctttgcgggaaagtccctcatttccaacacaatgagatctgcagcagggcatcacgccatcatgcatccaataatttaattgaaatagtttttttggcaacgaaaaagtgatctatatttatttcagtatgatgattttaagagcatttactttttgtatctacctatttcactaactgtctagctagtaaatatattgaaactattattaaattaaattataagaatgatacctatatgtatacatatatttagtatgaatggaaagttgtttttctatatttggcttagtacggaagttttgaaagaacataaactaattaaacacaattttttcagggatctcgagacatttgtacacttgctaaagggatcgcttggctccggaatattggccatgccaatggccttctcccacgctggattgtggttcggtttggtggccaccttcgcggtgggcaccttgtgcacctactgcgtccacattctggtcaagtgcgcccacatcctgtgccgacgtcgtaaaatcccgatgatgggattcgccgatgtggcggaacaggctttcctcgacggaccacctgccctgaatcgctggtcacgcttcatccggttcatggtcaatacgtttctggttatcgatttgctgggctgctgctgcatctatctggttttcgtggccaccaatgtggagcaggtcgtgcgggtgtatatggaaacggagctgagcattagagtttggatcatgatcgtgacggcaccgctaatctttatgtgcctggtacgcaacctgaagttcctcacgcccttctcgatgatagccaacatcctgatgttcgtgggcatcgtgatcaccttcatctatatgttctccgatattcctgcacccgtggaacgtcctggaattgtgagtgtaaccgaatggccattgttcttcggcaccgtgatctttgctctggagggcatcggtgtagttatgtccctggagaacgacatgaagaaccccagccacttcatcggttgcccatctgtcctgaacttcggcatgggtctggtgattgccctctacactctggttggattctttggcttcctgaagtacggcccggaaacccaggccagcattacgctgaatctgcccctggaggataagtaggttttttactattccttataagaagatcgaaggtatttacttctctctattttgttttccaggttggcccaatccgtcaagttgatgattgccatcgccatcttcttcaccttcaccctgcagttctacgtgcccgtcacgattttgtggaagggtctggagcacaagatccggccggagaagcagaacatcagtgaatacggacttcgtgtctttctggtggtaagttgatcgagtaactccttaacttttcactttctcagtagatttgaatgaatttgaatcgactaactcctttgaaaattctattaaccctgatatcatctcaagttaagcgaactcatttctaatagaaaacccttttcctttccagcttctgtgcggcggaatcgcagtggctctgcccaacttgggacctttcatctcgctaattggagcggtgtgcctgagtacgctgggcatgatcgttccggcgaccattgagctggccgtgtatcatgaggatcccggatacgggcgcttcaattggcggctgtggaagaactccggactgatactgttcggcgtggtgggtttcgtggccggaacctatgtcagcatcatcgaattccacgccgaattcagcagcggtcactgagagatactgctaatctaatttaacgtagtctttaatgaaactcttctaagcacagggatgtctaagttaagtttttaactaattttagggctaaccaaagttttctaggactccgaaacctcccgcctcgccccctggttatcctatcccgccccatcctttccaactcgatccgccacgatccctgatatatatatatatatatatctatatatatgtatccacatccataacccccataggggggtatcagcaatcaaacaacaaaagtatttcgatttagtcggtgccacgccctcaaggagttgcggcggtgcgaagggggcgtggcattaaggttacttagagaattcttgtagaagtgattttgtatcgtagtgattttgacaacaacttagtcgtaattagttcctactcgaactaagctaaaacagacggacgcagctgaagtttgttttcgttcttcaattattttgttttatcattgatttactctgtacattatcgacgccctaattcaataatcatgacatattaccaattacacaaataaccgctgtcacctttaaaggggcagcaaaaaaatggcattaaaaaaaataataaaactttttgaaacaaccaatattgaatacttacttaccttagtgggttatcttttgcaatgcaacatttaaatgggtgggcatattttgcaatatttcatcaaggtcatttatgataagtttgcgatataacgaaattgtaagaaaaggttgcatacttttgggcacatattgatttgcttattggacctctcaataaacaatcacaatgcagttttctattaaaaaactattcaaaaaacgaaggaaaatttttcaaaaatattaattatttcctcaatactttgtttttggcttaggtataatacttttgatttaacaacaatcattagcaaagcaaaacatttacgacttttttgggggttcttctaagtactctaagcacagaaacataa

SEQ ID NO: 13616 - DNA, 1509 bp, DROSOPHILA
atgagtttccataagagcgactcgcggacgccgctggcgcccaccgagtacactaaaatcccgacggtcactgcgggctacggagaaaacgagaagcccaaaggcggcaaaggcgggcaatccaagttcatacgttcggacatggccgacgtacccgtgcagcaggcggcaggatcgacgcttccgttggtaatctctcggaaaaaaggcgacgactccgaggatggcaactacaatccgttcgagcaccgcaaggtggagcatccgacatcggatctcgagacatttgtacacttgctaaagggatcgcttggctccggaatattggccatgccaatggccttctcccacgctggattgtggttcggtttggtggccaccttcgcggtgggcaccttgtgcacctactgcgtccacattctggtcaagtgcgcccacatcctgtgccgacgtcgtaaaatcccgatgatgggattcgccgatgtggcggaacaggctttcctcgacggaccacctgccctgaatcgctggtcacgcttcatccggttcatggtcaatacgtttctggttatcgatttgctgggctgctgctgcatctatctggttttcgtggccaccaatgtggagcaggtcgtgcgggtgtatatggaaacggagctgagcattagagtttggatcatgatcgtgacggcaccgctaatctttatgtgcctggtacgcaacctgaagttcctcacgcccttctcgatgatagccaacatcctgatgttcgtgggcatcgtgatcaccttcatctatatgttctccgatattcctgcacccgtggaacgtcctggaattgtgagtgtaaccgaatggccattgttcttcggcaccgtgatctttgctctggagggcatcggtgtagttatgtccctggagaacgacatgaagaaccccagccacttcatcggttgcccatctgtcctgaacttcggcatgggtctggtgattgccctctacactctggttggattctttggcttcctgaagtacggcccggaaacccaggccagcattacgctgaatctgcccctggaggataagttggcccaatccgtcaagttgatgattgccatcgccatcttcttcaccttcaccctgcagttctacgtgcccgtcacgattttgtggaagggtctggagcacaagatccggccggagaagcagaacatcagtgaatacggacttcgtgtctttctggtgcttctgtgcggcggaatcgcagtggctctgcccaacttgggacctttcatctcgctaattggagcggtgtgcctgagtacgctgggcatgatcgttccggcgaccattgagctggccgtgtatcatgaggatcccggatacgggcgcttcaattggcggctgtggaagaactccggactgatactgttcggcgtggtgggtttcgtggccggaacctatgtcagcatcatcgaattccacgccgaattcagcagcggtcactga

SEQ ID NO: 13617 - protein, 502 aa, DROSOPHILA
MSFHKSDSRTPLAPTEYTKIPTVTAGYGENEKPKGGKGGQSKFIRSDMADVPVQQAAGSTLPLVISRKKGDDSEDGNYNPFEHRKVEHPTSDLETFVHLLKGSLGSGILAMPMAFSHAGLWFGLVATFAVGTLCTYCVHILVKCAHILCRRRKIPMMGFADVAEQAFLDGPPALNRWSRFIRFMVNTFLVIDLLGCCCIYLVFVATNVEQVVRVYMETELSIRVWIMIVTAPLIFMCLVRNLKFLTPFSMIANILMFVGIVITFIYMFSDIPAPVERPGIVSVTEWPLFFGTVIFALEGIGVVMSLENDMKNPSHFIGCPSVLNFGMGLVIALYTLVGFFGFLKYGPETQASITLNLPLEDKLAQSVKLMIAIAIFFTFTLQFYVPVTILWKGLEHKIRPEKQNISEYGLRVFLVLLCGGIAVALPNLGPFISLIGAVCLSTLGMIVPATIELAVYHEDPGYGRFNWRLWKNSGLILFGVVGFVAGTYVSIIEFHAEFSSGH

SEQ ID NO: 13618 - DNA, 2885 bp, DROSOPHILA
cagagaagcaaagagttcacttcaaattactgccaacgattaatagatgattttcaaacttaataccaattaatttccgccaatgtaatagatgtatactaatcggaagtaatttcaatggcaatgatgcgttattgaaaactaacgatgtcaacggcccgtgttttagatgatggatggtcgattatggaatctgaaaccgatcagaaatccccgagtttaaatggacgtttgtcaacctccagatacttgtcgtatgcaaatggcgacaaacacgatggatggataaatatatctgggaaatccgctcaagaacgaaacatgtcttggcgcagaacaaaagactcaaatatctatacaattgctaattaatgttaatgaatgcagacgatcaggtatttgtatatttcgtgttaaaagcaaatctcagcaaatgcgtaacaaatacgtctcgcgaacaataacaagaacggaaatgttctcgcctatataatgtaaatatatagttttcgatgtatttaactcaccctgagcttgaatgagggctgcgaatcccagacacaaaagagcgccaatagccaaagtgcagcacaatttgttggcagccattataagcagtacttgtgtccgaaaaatatttgtttgcaaatgcaatttgaaaagtcactgaacagtatcacaactatctgtaaacaaccgacctctatcgagctgcccgatcaactgagctgaaagtgctacgagcttcgcttttttgttgacaaaagctcgccgaaagcttcaaaacggaagacttaagctgagaacttgagagagccagcaagccaactaaagagattagagatttttaccgattataaaagtatactttttggtgaaaattacaaaatttcaatcattattccaataaaactgatgtgtttttacaatctgaattatgattggcttattgcagctttcatgtgaaatattttatttaaatatgaagacaactatatttgcttagttcgctttgctcaagtttattgttaatataagaatctcagatgtttagatcttgttgaaggcagcaatgtcgacagactgaacaaagtcctcgaactcctcgatcttctcctgcagcaaatcgatggacaccttgtcgtcctcgatgacgcacatgatctgcaacttgttgatgccatagccgactgggaccagtttggaggcgccccacagcagaccgtccatttcgatggtgcggacattgttctccatctccttcatgtcggtctcgtcatcccagggcttgacatcgaggagcaccgacgacttggcaatgagggcgggtttcttagacttcttggcggcgtaagcggcaactcgctcctgcttgatgcgctcggcctcctcgtcctcctcgtcgtcggatccgaatagatccacatcgtcgtcatcgtcggcggcgggcttggcagcagcagccactgtgggctttccaccggccaactggggcagaggagtacccgaccaagcggcacgctcagcggcctcaaaggaggcgatgtggcggtaccagcgggccacgttcacattgtcggcagagggggccttgcccagagcatcgaacacggacagatcggccttgctgggagtatatctaatgggagtatagtaatgggtagaaaattattcgatcaatacatctgccgacgtggtgaggtcgtacataacctcacatttaatgacgcgtgcttacccgctgatgtagctgttgtcggccaggaaggcgttcaactccttcagtccctgcggggtggtcacatcaccgaatgccattttaaatgcgtttttgtggggtaaattcgcgtttaacaaatctggagccgtgctctgcgcaacgttgccgacgaaagaagaacagagtgaccttcgcgggaaacggtctttaaacatataatgaaaatactgactttttcctagtatttcaagtagttgcaacacagggtgacccggagtttgagtaaatatcgttcaaatataccatacattcaaatagatttttaacgcttacttgtattttttttaataaaacataaggattataattaataccttatacttaagctagctattggctacgtaaatttaaggccaaacaattacatttaatattctgaaaaggaaaaaaattgtatagaaattgtatgcttctactttgtaacttgtgaaaacaatatgcatttccttgggcaaattcacacaaattgggagcttgggcttaatagaaattaagtttaagtagatcctttactttcaaataaattcatataagtcattgaatatttaatttaacacaaatataccaaaagcgcggactaaaaccgtgaatatcttatgcgcagtgttaccgttgcagtgaaaatcatgagggtgaaaaaacgcctccaatcaagctataatgctacacaatttttttgcaaacgcataattttcactgaaaagccgaaagaaaaattaaaaaaaaaaacgtagaagcgcatgaaaaaaacggctcaacaataaggcagagtagacattcgaaagccacttaaacaaatgccataggaagcgtttatagtatttcctcagcatttgtgaaaaaatcgtcgctttcggctattgaattttcaacgcgtgcggtcaaacagaacaaaaaaaaaacaagtggtaaccataaagaaccgaattgaacctattataaacccagaactatgagcgacttccagcaacaaggcatcaatcaatcgcaggcactcgcgcaggcaattcagcgtgccaagcaggtgagttcccaccacttggaagaggaagaagcggaagtgggcattgattcggcttcttttgccccaatccccaaaccagat

SEQ ID NO: 13619 - DNA, 786 bp, DROSOPHILA
caacgttgcgcagagcacggctccagatttgttaaacgcgaatttaccccacaaaaacgcatttaaaatggcattcggtgatgtgaccaccccgcagggactgaaggagttgaacgccttcctggccgacaacagctacatcagcggatatactcccagcaaggccgatctgtccgtgttcgatgctctgggcaaggccccctctgccgacaatgtgaacgtggcccgctggtaccgccacatcgcctcctttgaggccgctgagcgtgccgcttggtcgggtactcctctgccccagttggccggtggaaagcccacagtggctgctgctgccaagcccgccgccgacgatgacgacgatgtggatctattcggatccgacgacgaggaggacgaggaggccgagcgcatcaagcaggagcgagttgccgcttacgccgccaagaagtctaagaaacccgccctcattgccaagtcgtcggtgctcctcgatgtcaagccctgggatgacgagaccgacatgaaggagatggagaacaatgtccgcaccatcgaaatggacggtctgctgtggggcgcctccaaactggtcccagtcggctatggcatcaacaagttgcagatcatgtgcgtcatcgaggacgacaaggtgtccatcgatttgctgcaggagaagatcgaggagttcgaggactttgttcagtctgtcgacattgctgccttcaacaagatctaaacatctgagattcttatattaacaataaacttgagcaaagcgaactaagc

SEQ ID NO: 13620 - protein, 222 aa, DROSOPHILA
MAFGDVTTPQGLKELNAFLADNSYISGYTPSKADLSVFDALGKAPSADNVNVARWYRHIASFEAAERAAWSGTPLPQLAGGKPTVAAAAKPAADDDDDVDLFGSDDEEDEEAERIKQERVAAYAAKKSKKPALIAKSSVLLDVKPWDDETDMKEMENNVRTIEMDGLLWGASKLVPVGYGINKLQIMCVIEDDKVSIDLLQEKIEEFEDFVQSVDIAAFNKI

SEQ ID NO: 13621 - DNA, 6267 bp, DROSOPHILA
aatatgcatgttcttgaatcccacaacgtgactatttgttcattgaccccagggcgtatttgtgggtcaattcgtttgcggaagccacccgtggccccaccgcaaccccttaagagccgatcctataaccggcaaaactgatgccgggttcagtgcgccgggttttagagctgaacaaagtgcagtcatgaagaaacccagcagcgggcttcaaaatttttggtaattcggcataaaaatgtcgagcatgccagcaaaacagaacgccaattgccgggatcagcaaatttagccaatggaaattcggatcagaaccgatcgaccaggaaacctgatgcgctggcagcggccattgcaccgtgcttataagagctggatggctaactctcaggttttagttctggaatagtacgtgtcgcggttggtaaatcgaggtacttcgataccccgaggaatcagttaaaatcatacataattgttgaccacaattgcctcgggaacttcgatcgcgtcctgaatttatatcgagttatctaaggaaatagtagccgtgattttacccaagaatttttcacatatcacagttgctgtttcttttagatagctcttttgtaaacagcctagatccgaatgcgagtatccgagtgccttgcgtgaatcctggatgaaaaggtccttcggtttcagtttatgggatacacacagttcagttttgtcacacttcaagcatcactgggctttgtttatctcatgagagcgaaatttattcaacaggaaaccttaaatcataccaatatataaaaaaatctgtatataaaacatttgaatttcttggatcaagtttttaagcttaatcagaaaagtaagtacaaaagtgaaataaagtaggttggtggataaatatattgtaaactaaattcttttgtcataaaacgaaataagttaaaatattttcattgaaatcaatctttcatttcccagaaaaacaaagtacacccaatttaattagataccaagaataagggcttactttattggtttgaccaggttggggaagcaccaccacaatttaaaacttagggaactacaatttacagtgtagaaatgcatgtggaatatacatatataaaaacaaaataagatgagttgcttaagagagcattttgcgaatcatgtagttgaggattccaccattcttgtagtaggtgatgtccacctcagtgtcgaagcgcagaatagtctcaaagacggtgccatcagccttgaaaaaagatagttcattaatataaccaaaatcgctagcaccaggtttccaatagcctacctccacttggatcttctggcccggctttaaaccgctctctggcagggcgatgttgtacacctcccggccagtcaggttcaatgtctcggcactctgtcccggcaggaattgcagcggaatgatgcccatgcccaccaggttggaacgatgaatgcgctcgtaggactccgcgatcaccgccttgacgcccagcaggaagggacccttggcggcccaatcccgagagcttccgctgccgtagtccttgcctacaacgaggaccagaggagtaccctcctcgcggtaccgctcggcggcatcgaagatatccagctcttcctggctgggaatgtgcacggtgcggggtcctgtcttttcgaccagtttgttgaccaaccgaatgttggcgaaggtgccgcgcgacatgatggcatcgttgccacgacgcgatccgtacgagttgaagtcacggggtgtgatgttccgctcggacaagaatcgggcagcaggcgaggttctagcaatagatccagccggcgagatgtgatccgtggtgacggaatcgcctaggaagagcaggcaacgtgccttctgaatgctctgcagcttgggaagatctctggtcatgccctcgaagaagggtggtcgcttaatgtaggtggaatcggcactccaggagaagagcttgccctcggacacctgcagagtctgccaatcctgggagcccagctcaattttgcctgcagatggaagtgaaattaaaccaaactcaaataaagatggcgcacgaagtactcactgtacacctcctggaacatggcggggattacatgcttgttctccacttcctgtatctccgatcgcgttggccagatgtcctgcaagaacacattcttgccattggcatccactcccagaggttccttctcgaagtcgatgtccacgcgtcctgcgatggcatatgcgatcaccaacagaggactggccagatagttggccctggtgttgggatggatgcgaccctcgaagtttcggtttccggacaaaactccagcacacacgaggccgttcttctcgatggtgttcaccacattctcctcgagaggaccggagttaccaatgcaggtcatgcatccatagcccacaatatcgaagcccaacttctccagatagggaatgactccggactctttcaggtagtaggtaaccacaccggatccaggcgacagcgaggtcttgatatagggcaggatgctcagacccttctcaacggcctttttggccagcagaccggcacccagcatcaccgaaggattcgatgtgttcgtgcaggatgtgatggccgcaatgacaacagatccatgatgcagtttgtaggtcttgccatcatcccactggaactccccaaaagcggattgagcttccggagcaatggcgaatcccttgaaacccacctaaggtaatggtggagcaaaacaatgtttaatttaattccctttttctcaatgaatttgaaacttactgggctggacaggcacgacttaaaatcctcaggcatgtcggagacagaaacgcgatcgtgaggacgcttgggtcccgaaacggaggtgaccaccgtcgacagatccaaggtgatactctgtagaagggatgtatgttagcttaagtttttagtggtatatgtaaggcaatttcaacctgagtaaacttgggatcttgggccgcatcagcatagttgcgcagctgctgagttgccttcagatactggcgaatgatgtcgatcttcttttcagaccgatctaaaaagtttgttatgatataggtaaaatattgttttatgaaacagtctggttttccgtacttgtctgcttcatgtaaccaagagtattctcatcgatggggaagtatcccacggtggctccgtattcgggacacatattgctgatggtggccctgtcagcaatgctgagttccgcaactcccgggccgtaaaactccacaaactttcccaccacacccaactggcgcaggtgcttggtaatggtcagcaccagatcggtggatgtgaccagtgggctcagtttgccctccaacttgtagccaattacctcgggcaacaacatggaaatcgattggcccaacatcacagcttccgcttcgatgcctcccactccccaaccaagtacgcccaatccatttatcatcgtggtatgggaatcagtgcccaccacactgtcgggatacagaatcttggagccatcggttgcgtcattctcgaacaccacgcgggccaagtactccagattcacctggtggacaataccggagccaggtggcacgatcagcatgttgttgaaggccttggctccccactaattaggaaaaacaatattattaaaaatactatctggataataagctaaggaaaagtaaccttcaggaaggtgaagcgctccttgttgcgctcaaattccagtgactggttcttggccaaagcatcaggcgcacgggcgaagtccacctggaccgagtgatcgatgaccaagtcggcggggcagatgggattgattttctccgggtcgccgcccagatccaaaacagcatcgcgcatagctgcaaagtccaccacagcaggaactccagtaaagtcctagtagcaagatattatataatttaaatattactttgctagattgccgtatgaaactcacctgcaggatgacacgggccggcttgaaggacacctccacatcgttggatccctgcttgagggcgggcgaccatcccaggatgctctgcacgtccttctctaggatatggaagttgtcgcagttgcgaaccgccgactccaagagcactcggatcgagtagggcagttgatctacgcgttggaaatgttaagtgttaatcaaagtgtttagaatttcatcacaggtacagtaaagcctcttggtgagaggacctaagacaatttgccgcactaaacgtatgtatctttaaaaaacctttaagttgcacttgttgaattaaaattcacgagtagagtaaagaacctccctttttctataaccgtccaccttagttagtttaaagtgtgctagtcagatagcagtcacttcttatcacaggcacaatgattacgtttgtccagcacttaatgcgattcacaggcgtcactatatgggaggagccaccaaagaagccctcacctcagaaccccgatttctggacacgcgcggttccagtaaaaacattccactgatcttgagatttttcggagtcatcggactacgaccccaaatcagcagatctgcgaagttttaattcgctgataagtgagcacgtaaaattgggaaatggaaatcaaatttcggaggcacacgattcgttatcaccgctagacgagccccattatgaggcaatctggcggtgataactttcgctttcggcgcaagacaagcccgcccatagaaaactatagaaaatccacttaatgctccgggagcaccttctacttgacattgcctgacttgcaaattgagctgttcttctacgcttctttttcaattcaggggtcaaactccaacttcaacaggtgcttaattaatcccatttttgatatgcatgtttagcctagtttattgcgaccacgtagacagacacgcccacttttaaagccttcttaagaccacatccacttaccatatttactatcgatggaggcgaggtcaaagtacttgtatgttgtgccggcctgggagaaagttttctcgaactgggcgaagggattggcgcctgcgacgatacgaatgtgttatataagccacaggattcgggggacagggtatatggtagtcgagggaactgcaaagctccggactggcaacccacctgacatcttattggaactctttactgaacttattccggacgagcaaagcaagaaactgattggagaagcagttcggataggagctggccagccttcgctgtctatcgatagccagcgatagttgcgtatatcgccagtcggatcgacagtgcattttatacattatatatggtgcattatattttataaaacgatagctttatgttcacttctctttttctaaaatgagattatagtgttctgcgcttggtatgttattatcatatgtattaaatgcagtaataactattcggatatttatgtaatacaccatcttttgaaaagcctgaaatttgtgcaattatcagtaaactaaatcgacgaaaataattgaaagttgtataacatatggttcatttttaaaatgaaaactccacccgccaaacctatcagtaatcgacagagctcgtgcaatcgcaacatcatattgcaccgatatgtcgagggaaaattgaaatcgttatcgaaaatacgaggcgatagcacgcgcacgttgttttctttgaatattaggaaaatataatatgaatttaccagcgaaaatggacgtggaaaaggataagcttcgccagatgcactgcgaattcaatcccttgtcgcgttgcgacggatccgtgatgtacagccagggtatagccgtgttttcaactctagtacatggccagaaccggctaacatggtcttgccaatttcaggtgctacaggtctcataggcgcagttctcggccccatcgaggtgaagacccaaaacctgagcatagatggcagctacttggagtgtaactaccgaccaaaagcgggcctgccgcaggttaccgatcggattcgggaggcggccattcgggatgtgctggaactggccctcctgtcggaggctcatccgcgctccaagatgtccgtgcagatccaggagctggaagatcgtggcagtgtatgtttttgaatctccttcatctgtaatccttctaacaatatatatattctatcagattgatgcctgcgccgtaaattgcgcctgcctagccatgctcat

SEQ ID NO: 13622 - DNA, 2916 bp, DROSOPHILA
actgcttctccaatcagtttcttgctttgctcgtccggaataagttcagtaaagagttccaataagatgtcaggcgccaatcccttcgcccagttcgagaaaactttctcccaggccggcacaacatacaagtactttgacctcgcctccatcgatagtaaatatgatcaactgccctactcgatccgagtgctcttggagtcggcggttcgcaactgcgacaacttccatatcctagagaaggacgtgcagagcatcctgggatggtcgcccgccctcaagcagggatccaacgatgtggaggtgtccttcaagccggcccgtgtcatcctgcaggactttactggagttcctgctgtggtggactttgcagctatgcgcgatgctgttttggatctgggcggcgacccggagaaaatcaatcccatctgccccgccgacttggtcatcgatcactcggtccaggtggacttcgcccgtgcgcctgatgctttggccaagaaccagtcactggaatttgagcgcaacaaggagcgcttcaccttcctgaagtggggagccaaggccttcaacaacatgctgatcgtgccacctggctccggtattgtccaccaggtgaatctggagtacttggcccgcgtggtgttcgagaatgacgcaaccgatggctccaagattctgtatcccgacagtgtggtgggcactgattcccataccacgatgataaatggattgggcgtacttggttggggagtgggaggcatcgaagcggaagctgtgatgttgggccaatcgatttccatgttgttgcccgaggtaattggctacaagttggagggcaaactgagcccactggtcacatccaccgatctggtgctgaccattaccaagcacctgcgccagttgggtgtggtgggaaagtttgtggagttttacggcccgggagttgcggaactcagcattgctgacagggccaccatcagcaatatgtgtcccgaatacggagccaccgtgggatacttccccatcgatgagaatactcttggttacatgaagcagacaaatcggtctgaaaagaagatcgacatcattcgccagtatctgaaggcaactcagcagctgcgcaactatgctgatgcggcccaagatcccaagtttactcagagtatcaccttggatctgtcgacggtggtcacctccgtttcgggacccaagcgtcctcacgatcgcgtttctgtctccgacatgcctgaggattttaagtcgtgcctgtccagcccagtgggtttcaagggattcgccattgctccggaagctcaatccgcttttggggagttccagtgggatgatggcaagacctacaaactgcatcatggatctgttgtcattgcggccatcacatcctgcacgaacacatcgaatccttcggtgatgctgggtgccggtctgctggccaaaaaggccgttgagaagggtctgagcatcctgccctatatcaagacctcgctgtcgcctggatccggtgtggttacctactacctgaaagagtccggagtcattccctatctggagaagttgggcttcgatattgtgggctatggatgcatgacctgcattggtaactccggtcctctcgaggagaatgtggtgaacaccatcgagaagaacggcctcgtgtgtgctggagttttgtccggaaaccgaaacttcgagggtcgcatccatcccaacaccagggccaactatctggccagtcctctgttggtgatcgcatatgccatcgcaggacgcgtggacatcgacttcgagaaggaacctctgggagtggatgccaatggcaagaatgtgttcttgcaggacatctggccaacgcgatcggagatacaggaagtggagaacaagcatgtaatccccgccatgttccaggaggtgtacagcaaaattgagctgggctcccaggattggcagactctgcaggtgtccgagggcaagctcttctcctggagtgccgattccacctacattaagcgaccacccttcttcgagggcatgaccagagatcttcccaagctgcagagcattcagaaggcacgttgcctgctcttcctaggcgattccgtcaccacggatcacatctcgccggctggatctattgctagaacctcgcctgctgcccgattcttgtccgagcggaacatcacaccccgtgacttcaactcgtacggatcgcgtcgtggcaacgatgccatcatgtcgcgcggcaccttcgccaacattcggttggtcaacaaactggtcgaaaagacaggaccccgcaccgtgcacattcccagccaggaagagctggatatcttcgatgccgccgagcggtaccgcgaggagggtactcctctggtcctcgttgtaggcaaggactacggcagcggaagctctcgggattgggccgccaagggtcccttcctgctgggcgtcaaggcggtgatcgcggagtcctacgagcgcattcatcgttccaacctggtgggcatgggcatcattccgctgcaattcctgccgggacagagtgccgagacattgaacctgactggccgggaggtgtacaacatcgccctgccagagagcggtttaaagccgggccagaagatccaagtggaggctgatggcaccgtctttgagactattctgcgcttcgacactgaggtggacatcacctactacaagaatggtggaatcctcaactacatgattcgcaaaatgctctcttaagcaactcatcttattttgtttttatatatgtatattccacatgcatttctacactgtaaattgtagttccctaagttttaaattgtggtggtgcttccccaacctggtcaaaccaataaagtaagcccttattcttggtatctaattaaa

SEQ ID NO: 13623 - protein, 899 aa, DROSOPHILA
MSGANPFAQFEKTFSQAGTTYKYFDLASIDSKYDQLPYSIRVLLESAVRNCDNFHILEKDVQSILGWSPALKQGSNDVEVSFKPARVILQDFTGVPAVVDFAAMRDAVLDLGGDPEKINPICPADLVIDHSVQVDFARAPDALAKNQSLEFERNKERFTFLKWGAKAFNNMLIVPPGSGIVHQVNLEYLARVVFENDATDGSKILYPDSVVGTDSHTTMINGLGVLGWGVGGIEAEAVMLGQSISMLLPEVIGYKLEGKLSPLVTSTDLVLTITKHLRQLGVVGKFVEFYGPGVAELSIADRATISNMCPEYGATVGYFPIDENTLGYMKQTNRSEKKIDIIRQYLKATQQLRNYADAAQDPKFTQSITLDLSTVVTSVSGPKRPHDRVSVSDMPEDFKSCLSSPVGFKGFAIAPEAQSAFGEFQWDDGKTYKLHHGSVVIAAITSCTNTSNPSVMLGAGLLAKKAVEKGLSILPYIKTSLSPGSGVVTYYLKESGVIPYLEKLGFDIVGYGCMTCIGNSGPLEENVVNTIEKNGLVCAGVLSGNRNFEGRIHPNTRANYLASPLLVIAYAIAGRVDIDFEKEPLGVDANGKNVFLQDIWPTRSEIQEVENKHVIPAMFQEVYSKIELGSQDWQTLQVSEGKLFSWSADSTYIKRPPFFEGMTRDLPKLQSIQKARCLLFLGDSVTTDHISPAGSIARTSPAARFLSERNITPRDFNSYGSRRGNDAIMSRGTFANIRLVNKLVEKTGPRTVHIPSQEELDIFDAAERYREEGTPLVLVVGKDYGSGSSRDWAAKGPFLLGVKAVIAESYERIHRSNLVGMGIIPLQFLPGQSAETLNLTGREVYNIALPESGLKPGQKIQVEADGTVFETILRFDTEVDITYYKNGGILNYMIRKMLS

SEQ ID NO: 13624 - DNA, 2694 bp, DROSOPHILA
agaaatatactggaagcatagaaagccgaaggcagtgatggtgacataaacgaccagaccttggcattgtgttgaaggactgtgaatcgaattattcgaggaagttgcttgaattatggctcaagggggtactttgaatttatgagtattcaggatattaagaatgtcttttttttcgccggccagcaccatccatccatcttccacaccccgaaaaccaaacgaaatccgcttcctgctgccaaataatttacaacttgcgaatgcgatgcacaggctatgggaagaaaacaaataatgatcagtcgcacataatgcatgcatatatccatgggcatatcgataacccttatcaagtgtgcggcatcgcggccaaaaatatacaaattatgcttaccaaaaggcagagaaaacataaatcaatggttttggaatactctaaccaagacagcaatgtatgaaacttcaaacatttttccttatttccaaatttacttaagagatattaagataagtatacaagaagtgcaaatttgttgtacctacttaaatattcatatgcatacatgtatgtacatacatatatggttatttgcgtgtggttggtcgcctcaagtgatgggcgtggcactttcaactctggttcaacccatacaatcatgaaaactctgaccagatcttgccaaaaatgagcccaccttgaacctgagtttatcaaattgcagtcattttgcttgtggtttttatagtactttcaaataactgagattagttggtcagtatcgttacaaaaaaaagggtaaaagtgatcgactttttcactttccgccaatttgaggatatttgcagagatttgagtgttgcatgattcataatcgaacatttatatcataaaaaagtaaacagttcagttgcttatttattacgcagaattgccttaagagttcaattaaccattaaatatttttagaggtgaaacaacgtttgccctcacttaatcgacaaaatttgaactaattcgaataaaattaagagtcagaacgaattcacgagtggctaaattattgtttaaaatgaccaagggcgtgaggatttgcaacgatggattgcctggtttgccgaatgaaaggccatattcccgaagaactttagatacgcggcaaaagactcagaagatgtcctccaggccatctaggaaaccattgcagtctctacaaactgtcggtcggaatacgagttccagcctgaagcgcataggaagtccgatctccgaggaagaatttggtgtcctggtgcagcaggattgtaaggcagagcagcatcacaccgatcgccaaaacctggcggacataatccttatgcaggcccgtcgcatcgagaagcagcagcgggagatgaaaagaataaaggcgcactatgagcgccaggtgtccaccatcaagaacaatgccatcatgctggagtcgcatctgcaaaaggtgctggccagtgtcgaaagggatcgggccaagcggattggccaccactgccaggacatgctcggtgccgtggagaagctgcaaaggagcgacatccaagtgaagccgcaatcttcggccaaccaattgctgatccagtatcttcactccaagaaaatttcgcattcgaccaagaagtccaatgaaaacacaagtaggtacaggaatatgttgtgaatcgtattcttgtgtgtacattgtggtttcactgggttttgtggtcagcttaaattagcatatatgtgtattaatagaagtacaagttattataaaataaaataatggcaacaatgaatttattttattttactaagttaattctcaacaaggacggagttgggcacaatcattatctgttctattcctcgtcctcctccgaggcagttacatccacgatcgcgttagacatgctctgttgtatcttttgctggacattggcgtcctggaccaggtgatctggctggatgtagcacaagttggcgcagccgagcaccgggcatcggatgccaatgcggtccattatgatcggcatcaccgagtcgcggtcgtagatgtgaccgcacattttgttgcgcatggggttctttatcagggccttggaccagggatcgtagaacgagaagacctcgctgccggagtcttccataataaggtcctcatcataggcggtgccattcgcttgatcattgacttccgcacccgcctgaccagctgctgattcaactgcttttacgaagttcttgaactcgtgtagattcttgacattgatgcgcttctgctccaccgctttggagcgttccttccagacttcctcgaactcctcgatggtggcgctagagtttttgacctgattcatagccttgttgagcgattggtgctttatcttcatatggactacattcacggcgtgctccacgctctgctcaacgctctgctcgagcaacttcttgatcttcccgccatcgctgaaatcggacacgaaatctgacatttccttgaagaactttttgttttccactaaagtggaaagtgcggaatcagcaaggtaattgaattccattttatccagaatatttaagccaaatgttcaagactgatggttagttaggctagcctattaattagtggtctttgaatggacttatatttataaataacgttgatatttacctgaaat

SEQ ID NO: 13625 - DNA, 694 bp, DROSOPHILA
gacaaaatttgaactaattcgaataaaattaagagtcagaacgaattcacgagtggctaaattattgtttaaaatgaccaagggcgtgaggatttgcaacgatggattgcctggtttgccgaatgaaaggccatattcccgaagaactttagatacgcggcaaaagactcagaagatgtcctccaggccatctaggaaaccattgcagtctctacaaactgtcggtcggaatacgagttccagcctgaagcgcataggaagtccgatctccgaggaagaatttggtgtcctggtgcagcaggattgtaaggcagagcagcatcacaccgatcgccaaaacctggcggacataatccttatgcaggcccgtcgcatcgagaagcagcagcgggagatgaaaagaataaaggcgcactatgagcgccaggtgtccaccatcaagaacaatgccatcatgctggagtcgcatctgcaaaaggtgctggccagtgtcgaaagggatcgggccaagcggattggccaccactgccaggacatgctcggtgccgtggagaagctgcaaaggagcgacatccaagtgaagccgcaatcttcggccaaccaattgctgatccagtatcttcactccaagaaaatttcgcattcgaccaagaagtccaatgaaaacacaagtaggtacaggaatatgttgtga

SEQ ID NO: 13626 - protein, 172 aa, DROSOPHILA
MSSRPSRKPLQSLQTVGRNTSSSLKRIGSPISEEEFGVLVQQDCKAEQHHTDRQNLADIILMQARRIEKQQREMKRIKAHYERQVSTIKNNAIMLESHLQKVLASVERDRAKRIGHHCQDMLGAVEKLQRSDIQVKPQSSANQLLIQYLHSKKISHSTKKSNENTSRYRNML

SEQ ID NO: 13627 - DNA, 4533 bp, DROSOPHILA
aaatctcacacgtaaccaaaaaaaaaaaaagaccatgcaaaaaaaattaagattgaaaagcaatgggtagcaacaaatagatcataactcttttagcatttagccgggcagtgaggagcggtcttataaagagggttacgaattccgaagattaggggaggtttttcccaggaaaatcagctggaaaatataccgtgttgcagcataatttatttctatacctatttaactttagatgattttgaaataaacgtacttttccagagattaaataactttacccctcctcctcgttgacccctcgtaaacccggacagaatgtctggccattccattaggatttttgaaacgtgtttccgctgtgtttattttcgtagtcgcctcttatcagccccaaaaacacgagactctcatttgaaatgtggacccgtactataaatcacgagattaacaagtgatttgttatactacttagttataacaatcatttttggctgcagaaagaactcatatgccttggaatgcgaatcataatcgtacgattcttgggctcttgggcataatgttgcattattcacatctcgcgagcactttgaccttgatcttttcctacgtggctgctcgaaaagtgtgtcgtctatttgtagtgcaccatttaccaagtgaactgccacatgttctctgcacttttcaattaatatttaaacaaaccagccgatgtttcagataagaaacggaagtatacgttttttttttaaagagaaatcggtctgaatgaaagagcaatttttggaagagtatgttagttagtattatctataagcagaaggcaaacgtacatatatggggagctcatatataatacttatcaacatacagtcgtggtcgcaatattgggatatgtatacttcgccagttaaattattcaaatcgaattcaaatattttcaaaatgtacagcatttattcatattaattttcatttattagtttaaaatgagataaactcagatacgctgaaatttggaatcgaaccacaatcggtggacactttctttggtcagaagatgttcctgcgggctctaattgacatcatacgatgtccaaatcagtgcggcagctgccacttctccgcctgcccggcaccccgatttcatccccattctgatatgggaagttattgattctatttagagtttcctaatgcggatcgctgatcaatagattggctacggggttgaacgctctacacaccacacacacactggtagatagataggcgcgtaccgctcacacagacacagccagataggcggacgttctgttctgggttcgtacgaaccctcgatgctctttgtgttttcagtctgagactgaggcagctggcgagcggttgatcgcgcgctccaaaatccgagattcgctggacagagattcactgcggtactggagagtgctgctgcagcaactgctggtgctggtgctggtgcaacttggttccgtttttcaaccagattgttgcacaatcgaacgggttcatcgggcgtatacgcaaccagacgcgttaatatattgcgcatacgtcacggtgccgcgaccattgaaccgctgctagtcagttatcgtacgacactcgacggttgacaacgccgaatctcaggtgttacacctggcactgctccaccaatgggctacgacgacgtcatcacccacctgggtgaattcggtccgtatcagaagcgcatctactaccttctctgcctgccggctatagtctgcgccttccacaagctggccggagtgttcctgctggccaaacccgacttccgatgtgccctgccatacgaaaatggcagtatctatgaactatcaccccacctgtggaacctatcgtatccggagaatgaaaggtgctcctactacgatgtggattacacggaggagtacctgaatggcagcattccacggagcagcaacgaaaccaagacctgttccagctacgtttacgatcggagcaagtatctcaatagtgcggtgaccgagtggaacctggtctgcagtcgaagcctgctaagtgccaccagtgattcgttattcatgctgggcgtgctcctgggcagcttaatctttggccagatgtccgacaagctgggacgcaagcccaccttcttcgcctcactggtgcttcagctaatcttcggcgttttggctgccgtggcacccgaatactttagctacacgatttcccgtatgattgtgggcgccaccacttcgggagtcttcctggttgcctatgtcatcgccctggagatggtgggctcctcgtatcgcctctttgccggcgtggccatgcagatgttcttctccgtgggctttatgctcacggccggctttgcctacttcatccacgactggcgttggctgcagattgctataaccttgccgggactgctcttcctttgctactactggatcattccggagtctgcccgttggctcttgatgaagggtcgcaaggatgaggcctttgtgatcatcgagaaggcggccaaggagaacaaggtggaggtgcccaatgaaatctacgagcagctggtggacgaggtggccgaaaagaagaagcaggacgagatggccgcctcccaaccagcggccactgtgttcgatctcctgcgctatccgaatcttcgacggaaaaccctgctcatcttcttcgattggtttgtgaacagtggcgtttactacggcctgtcgtggaacaccaacaatctgggtggaaaccaattggttaactttatgatctctggtgccgtggaaattcccggctatacgctgctcctcttcactttgaaccgttggggtcgtcgctccatcctgtgcggtaccatgatggtggccggaattagtctgctggccaccatcttcgtgccgagcgacatgaattggctgatcgttgcctgcgccatgataggaaagctggctattacctcgtcgtatggaaccatctacatattctcagcggaacagttcccgactgtggtgcggaatgtgggtctgggagcctcctccatggtggctcgcgtgggtggcattctggcaccctacctaaaactgctgggcgagatctggcgaccgctgccgctgatcatctgcggagcactgtctctcaccgctggcctgctgtccctgctcttgccggagacccttaacaaacccatgccggagaccatcgaggatggggagaacttcggcaagaagccggcgccgcaagaaaccgccgaggagggtggcacccaggagctgtccggaatgctgaacggaaagtccggctaattggagccggaattgcgagacgacgagcagttaatcactcaatctacactgatggcctcaattggtcatttcaacgaatttaagcattcagcgcacttccatttctccagcgatgtatattgtacaattcattccattttctcagctctatttgtttaattttaaaagcgatttaataaaagtcacgcatatttaaatcgtatttgcacacaagtcgccgtctgttcaacgaactttgtgacaactttgtttttattgagccggttcaccgtcggtgagacgataatataaatttgctcattaaaagaattaggtctaaatggtcggctgataagagaacgctataatctcattgagtgcaatctcctaatgcacttgcccgccagaggaacattcaaattttttactcattaatggcgctaataaagttgcgttcacatatcagtggttgtgagtgataaaactgattactgtcaacgctgtccattgataagaaaatcaaatcaaatccacaaaactcacatgttcccaaccttaagtatgttcaatttaacggactgatcaagtttatctgatttatggttcaacgaccttatattgatattgtatatggaaatgggatattccaatatttatgagccatgtgataattttatacccctaaaactttgaaataaagaacatttcataaatgttatattacttgactaattcaaagataaaaagttttagtttgaattaaacttatcgtgtatgtgaattgtggcgtattgttgttgagcaaatgggttctacataaaaacaagagattatgctatagttgagtaccccgactatcagatacccgttactgagctagtgtaactcgactatagcattctctcttgttattttcattattctaagggcagcccaaaagtatgccccacatcagaaccagcgttttcaaactgtgcctgtgcatgtcaaactgtcttggcgcgagttttcaaatttctcagtgaaatgaagtgagcatacaaattgttggctggactaaatggatttgccctttggcacacagactccggaactagatgtactgattgtgggcgggggcctctcgggcctggcctctgccctgaaaatcctggccatggagagcaccctgaaggtgagaatgattgaggctagcgatgccttgggcggcctgatgggccag

SEQ ID NO: 13628 - DNA, 2533 bp, DROSOPHILA
ataaactcagatacgctgaaatttggaatcgaaccacaatcggtggacactttctttggtcagaagatgttcctgcgggctctaattgacatcatacgatgtccaaatcagtgcggcagctgccacttctccgcctgcccggcaccccgatttcatccccattctgatatgggaagttattgattctatttagagtttcctaatgcggatcgctgatcaatagattggctacggggttgaacgctctacacaccacacacacactggtagatagataggcgcgtaccgctcacacagacacagccagataggcggacgttctgttctgggttcgtacgaaccctcgatgctctttgtgttttcagtctgagactgaggcagctggcgagcggttgatcgcgcgctccaaaatccgagattcgctggacagagattcactgcggtactggagagtgctgctgcagcaactgctggtgctggtgctggtgcaacttggttccgtttttcaaccagattgttgcacaatcgaacgggttcatcgggcgtatacgcaaccagacgcgttaatatattgcgcatacgtcacggtgccgcgaccattgaaccgctgctagtcagttatcgtacgacactcgacggttgacaacgccgaatctcaggtgttacacctggcactgctccaccaatgggctacgacgacgtcatcacccacctgggtgaattcggtccgtatcagaagcgcatctactaccttctctgcctgccggctatagtctgcgccttccacaagctggccggagtgttcctgctggccaaacccgacttccgatgtgccctgccatacgaaaatggcagtatctatgaactatcaccccacctgtggaacctatcgtatccggagaatgaaaggtgctcctactacgatgtggattacacggaggagtacctgaatggcagcattccacggagcagcaacgaaaccaagacctgttccagctacgtttacgatcggagcaagtatctcaatagtgcggtgaccgagtggaacctggtctgcagtcgaagcctgctaagtgccaccagtgattcgttattcatgctgggcgtgctcctgggcagcttaatctttggccagatgtccgacaagctgggacgcaagcccaccttcttcgcctcactggtgcttcagctaatcttcggcgttttggctgccgtggcacccgaatactttagctacacgatttcccgtatgattgtgggcgccaccacttcgggagtcttcctggttgcctatgtcatcgccctggagatggtgggctcctcgtatcgcctctttgccggcgtggccatgcagatgttcttctccgtgggctttatgctcacggccggctttgcctacttcatccacgactggcgttggctgcagattgctataaccttgccgggactgctcttcctttgctactactggatcattccggagtctgcccgttggctcttgatgaagggtcgcaaggatgaggcctttgtgatcatcgagaaggcggccaaggagaacaaggtggaggtgcccaatgaaatctacgagcagctggtggacgaggtggccgaaaagaagaagcaggacgagatggccgcctcccaaccagcggccactgtgttcgatctcctgcgctatccgaatcttcgacggaaaaccctgctcatcttcttcgattggtttgtgaacagtggcgtttactacggcctgtcgtggaacaccaacaatctgggtggaaaccaattggttaactttatgatctctggtgccgtggaaattcccggctatacgctgctcctcttcactttgaaccgttggggtcgtcgctccatcctgtgcggtaccatgatggtggccggaattagtctgctggccaccatcttcgtgccgagcgacatgaattggctgatcgttgcctgcgccatgataggaaagctggctattacctcgtcgtatggaaccatctacatattctcagcggaacagttcccgactgtggtgcggaatgtgggtctgggagcctcctccatggtggctcgcgtgggtggcattctggcaccctacctaaaactgctgggcgagatctggcgaccgctgccgctgatcatctgcggagcactgtctctcaccgctggcctgctgtccctgctcttgccggagacccttaacaaacccatgccggagaccatcgaggatggggagaacttcggcaagaagccggcgccgcaagaaaccgccgaggagggtggcacccaggagctgtccggaatgctgaacggaaagtccggctaattggagccggaattgcgagacgacgagcagttaatcactcaatctacactgatggcctcaattggtcatttcaacgaatttaagcattcagcgcacttccatttctccagcgatgtatattgtacaattcattccattttctcagctctatttgtttaattttaaaagcgatttaataaaagtcacgcatatttaaatcgt

SEQ ID NO: 13629 - protein, 548 aa, DROSOPHILA
MGYDDVITHLGEFGPYQKRIYYLLCLPAIVCAFHKLAGVFLLAKPDFRCALPYENGSIYELSPHLWNLSYPENERCSYYDVDYTEEYLNGSIPRSSNETKTCSSYVYDRSKYLNSAVTEWNLVCSRSLLSATSDSLFMLGVLLGSLIFGQMSDKLGRKPTFFASLVLQLIFGVLAAVAPEYFSYTISRMIVGATTSGVFLVAYVIALEMVGSSYRLFAGVAMQMFFSVGFMLTAGFAYFIHDWRWLQIAITLPGLLFLCYYWIIPESARWLLMKGRKDEAFVIIEKAAKENKVEVPNEIYEQLVDEVAEKKKQDEMAASQPAATVFDLLRYPNLRRKTLLIFFDWFVNSGVYYGLSWNTNNLGGNQLVNFMISGAVEIPGYTLLLFTLNRWGRRSILCGTMMVAGISLLATIFVPSDMNWLIVACAMIGKLAITSSYGTIYIFSAEQFPTVVRNVGLGASSMVARVGGILAPYLKLLGEIWRPLPLIICGALSLTAGLLSLLLPETLNKPMPETIEDGENFGKKPAPQETAEEGGTQELSGMLNGKSG

SEQ ID NO: 13630 - DNA, 4811 bp, DROSOPHILA
atgcaggccagcaagggaggtgcacctaagaagccacaaagtcctcctatgacaccaaaggaaaccttactgcgtttgccacaggacaaccttaacaatagcaataaacttcttatacaggaaatttagagaactgcatacagtgtctgcagcgtgatgtttttacgattgtttaaaaatatatacatatgtaatgcaaataaataatggaaaaataactgttttggtatgatcttttagccaccaaaaaatgaaatcgcgttaagtggtttgtataatttaattacaatttcttttaatataccgttgaaatatttgtcataaatttcgtttttttacaatataacttgtatatttggttttatcgtgtgctatccgtaattgtattgatgttattttcagcattttgttcttcatcgtattgttttcatttaatttggatataactagacagagaaagattaagtgctgttggatttggtttagagtcgagtgtacggtagcaacactaatcaacacgtacatttaacaaatctttaggaatttcaatacattataatataataatttataaaatggaaatgtagcatttagttttgtttggtattgttgaatctttgcttaatagattagccccatttaaaatatgcaacataacaattaacaatttcataattcttctatattattcgttatttgttttgtgatctcaaaagcgtttatttctgataacctttgaacgtcacactcagtgatactatttttatatattattgatatacatatatatattaaattgtggtaacatatgaacatatgcacgtacaatatgatcggttttaaattatccgatgaggttgtgggcgatatacacagaaataaagctaggaacttaatcagagctaaactagggaatgttgaaacatcattgtatactggagagatgcgcacatataatgtaagaaggtgaaatgagatggaactggtcacatgatcccatttactcgtgggcctgagactcctgctggacgagcttgaagcgccggggtgacttgatggatccctggtgtccgaatagcgccttcagctgtccattgtgcgtaaggaccttgcgaatatagcgcgacacgaggatctgcggacgctgtttgggtgaaaaatcatatgttcaattacattccattgagagggggagttagtcgggatcacccaccgcttgccactcgttcatgacctccttgggcgcgttgacctgatccccattgaggcggttcagcagggcgacacacaccaccgctgccttgatgccggcatggtgggtcagggccgcaaagatggtgctctccatctcgatgttgaccacgccgttctcgcgcagcttctccagataggccatcttctcgttctcgctgaaatcacagaatgcgccgtccaaacgaccctggccctcgtagaaatcgttggtgcacagcgtcttgccaataatggtatcgtacggatcatcgggactggccagggactttagctcacgggccagctttttgtccagcttggcaggacgatggatggtcttgccgagaatggtctgcaaatcaagtgtttagggtcatctatcgcatttgaggtgatatttcagccacgacttacaaactcatgggagttcctcagctgcccatcgagggcatcttcggtgatgatgacggtgccgccgtcgacgccaattcctccgcacgttcctatcctgatgaagacgggatccttgcacttggcgtggtacatcagcttgatcatctcatgcatcaggatgctgaccgagggcgtacccatgccatggctgacgcacagcaccggtcccactttgtacatggagtagcgatacgaataggcgctgatgtcctgcagctgggtgcccgctggcaacttgtagccaatctcgttcattatgaaatgggcaaaattctccatgcgctttggtgtgccgcccatgcaaacgaactgaaagtcaaagacagacacggattaattgagtgagcttttagaaggggaataaccggcattgtgtttcagatttgtaaattactaataccgctggtattgcaatctatgactatataattatttatataaaacatacccttaattgtaaatcgcaaatcgaaccagtactagattagcacattgatatatttattaagtttatgaatctgactaagcatataattagcttaattggcaacagctaatgaactcgtttcgcttgtgccccacttgatttgataacaatcaaggtctaggtctgggtctagtctttaaccgcctcagactatgaataattcaagagaccactcaccttaacgtcgccaaacatctcctgcaggtcgtggctctcgctgcccaaggccaggtgatagaggatatcctggtccatgagctcaatgttcgagttgcgcaatttgacggttccatcggagtacctgcaattaaagcgaatgcaaaacgaattaatgaggattaaattctattcgccgccagcgggggccataaataaacgcccacttcaggccaagaaatgaatgagttaattactttcagctgtcagaagtaaatcacacttaaaaatgctcgttttctgataaaagataagtttatctaagtgtttcctagaaaatcggtggccgaacaagccccccaaaagtgtaatcagttgggatgggcaggaagaaattcgtcatcgctggaataattatttattttttaggtaatgcttagcaaaaacacattgttatgagctaatttttatgaaatatacattacttatacacacaattttgtcacacaatcgtgagtaagcactattcgagtatttaatggccacaaaatgacagattcaaatttcgtatttctaatcaatatttggatcagaattgattcgtgtattagtgactttatttatagagaccccccttgcgatgtagggggtctagagagcaccaatacccaaccaatatcattatcaagtgcgtcaaacggggagtcggaaaaaaaacatgttagaagtgtgagcaaaacaaaaagcaaaatgtctatgactctagcataatcaaatgaaaaccccgtgtagtcttgaccttgattgataagcgcgaagtgaatatatttcgtaagcactccggcaaacatccgattgaagcataaattatgatttgatgagctcggaaatcggataggatgaaaagtgatctttgaaatgaatacagggtaatcgagtaggcgtcacacccaccggtctgtgcaaatattgtgccaactggccaagcgttctgttttccattggcgttctttgctcagatgaagagctggttttgtgccaacacagcgatttgacatcaggcaaactatagactgcattgcagatggattttgatttgcatttgttttcatttttcaatagaaaacggctgttatttgttgctagcaaacagagaaatttccagagcaactttctcgcgccaaatgaaacaacccccggctgacttaagaagcagctgcaggaccaaaaaccggtttcagcatccttaccgcgttatccttttcacgtacgcatcgtccgtctcgtcgtcctgcagcgaggacctgtgggcgcaatcgtagtgggccttaaagtcgtgcgtctgattatcggttatggtgggcggcatgatgtcacctctcgaatgtcctttaactcacaaacgaactaccaactaccagacgaaggagcagccagcgagccaaaacaaaactagttactcgtgtagacacgtcaacgcttcgagcgagactgaaaaaatttcttgcgtttcgccggcctttatataggccgcttctgctgagctgtgtagataagacaatcttctcggcgaatcggaagttatgctgcgcaatttgatagtggaaatgaaaatatattgcacactgtatggtcgtgtaatagaaacctctatagaatggcatacatacatacatagatacagattgttatcagttcagagcgacttatgcatcactaatcaagtgcaattggccacgagccttgaggcgaaattgcagccgagcataacggatttgcgtaatccaattattgcaatttcgctgctttattcgctgtatgaacagggtgttcgatcaggtccaattagccgaatcattagtataacatttcaactttaaattcatgcaaattggcttggaatttttggttttgtatattttaaacgggtttttgagatacctatttcgctacacattcttcaactctgatatttgcaaattagatgcaaataagaccaattcggttaatttatttttaatgttgcccacaattggcaactattcgcatgaaactaggcaccctgtgatcgtaactcaaagtaactctacaaaaagaaatatttcgccatggacaagaatgtgagcagcgcaactaccactattgtaggcccagtcaccagtgcgtcatccgatgtcggtggctttaatttcgaagtcaggccattaaatatacataaacagacgacagcgaaagacaaacgaaagaggagctcattgcccacacacagttactcctgcactcacactggcaagcagaaagcgaaacaatcagcaaagaaaagagggaacttaaacaaacagaaagaaaaataaataaaaacgggtaaggctataagataacttgtaccttttacatacattacaaaaacgatttttaaactgttgacatctaaatttatttatatattatatatgcatatattattattatatatacgcat

SEQ ID NO: 13631 - DNA, 1166 bp, DROSOPHILA
aagcgttgacgtgtctacacgagtaactagttttgttttggctcgctggctgctccttcgtctggtagttggtagttcgtttgtgagttaaaggacattcgagaggtgacatcatgccgcccaccataaccgataatcagacgcacgactttaaggcccactacgattgcgcccacaggtcctcgctgcaggacgacgagacggacgatgcgtacgtgaaaaggataacgcggtactccgatggaaccgtcaaattgcgcaactcgaacattgagctcatggaccaggatatcctctatcacctggccttgggcagcgagagccacgacctgcaggagatgtttggcgacgttaagttcgtttgcatgggcggcacaccaaagcgcatggagaattttgcccatttcataatgaacgagattggctacaagttgccagcgggcacccagctgcaggacatcagcgcctattcgtatcgctactccatgtacaaagtgggaccggtgctgtgcgtcagccatggcatgggtacgccctcggtcagcatcctgatgcatgagatgatcaagctgatgtaccacgccaagtgcaaggatcccgtcttcatcaggataggaacgtgcggaggaattggcgtcgacggcggcaccaccattctcggcaagaccatccatcgtcctgccaagctggacaaaaagctggcccgtgagctaaagtccctggccagtcccgatgatccgtacgataccattattggcaagacgctgtgcaccaacgatttctacgagggccagggtcgtttggacggcgcattctgtgatttcagcgagaacgagaagatggcctatctggagaagctgcgcgagaacggcgtggtcaacatcgagatggagagcaccatctttgcggccctgacccaccatgccggcatcaaggcagcggtggtgtgtgtcgccctgctgaaccgcctcaatggggatcaggtcaacgcgcccaaggaggtcatgaacgagtggcaagcgcgtccgcagatcctcgtgtcgcgctatattcgcaaggtccttacgcacaatggacagctgaaggcgctattcggacaccagggatccatcaagtcaccccggcgcttcaagctcgtccagcaggagtctcaggcccacgagtaa

SEQ ID NO: 13632 - protein, 350 aa, DROSOPHILA
MPPTITDNQTHDFKAHYDCAHRSSLQDDETDDAYVKRITRYSDGTVKLRNSNIELMDQDILYHLALGSESHDLQEMFGDVKFVCMGGTPKRMENFAHFIMNEIGYKLPAGTQLQDISAYSYRYSMYKVGPVLCVSHGMGTPSVSILMHEMIKLMYHAKCKDPVFIRIGTCGGIGVDGGTTILGKTIHRPAKLDKKLARELKSLASPDDPYDTIIGKTLCTNDFYEGQGRLDGAFCDFSENEKMAYLEKLRENGVVNIEMESTIFAALTHHAGIKAAVVCVALLNRLNGDQVNAPKEVMNEWQARPQILVSRYIRKVLTHNGQLKALFGHQGSIKSPRRFKLVQQESQAHE

SEQ ID NO: 13633 - DNA, 6045 bp, DROSOPHILA
aacacaaatacgagaatctattggtaacagaaaacgaaattgcatttacgcacgtatgcgaatctattgttaacagaaaacagaattacattaaccatttcataaacacacctgataaaaccaccgaacatgcatcaaaatgcttgactcgtgtaaatatcgaatttgtgtgccataaagtaatcagtttcgtgatcaatttcgtgattacaattttgtgatagctagtaattaatccattcccatacaattttagggactaaagcaaaacacaattatatttacattttttatgcaaacaactgatgataataaaatctttactaaaaaaataaaacaactttcaacctttttgaatgtgaacaattgtacgaatctaaaaaaagggaagcataagctgatcttcttaataacgttggtattcaacgctattgcgaggctgcagcaatactttccttctcagtggaagctctggatgagttccatgatccataaacctggcaaaccgaaacaaaagggagcccgcttccaacaggccgatcagctttctcctttcgatctcaaaggtgtttgacagactaattgctgcccagatagtcaggataacggaatcgaaaaggattactccttacagtaccgtttagcaactccatgccgtgtacagtatccgcccatcaatgaggcttaattgaagccaaccgaggtacctcattcttcgatctcctttaaggcgggtacgaatggtccgaattaatatgcctttctatatatgcctttactatatgagtaattaagcttaaaaagctagtttaaaaacacgcgctttagtgtatttgaaatgtgttttacctattttcgtttcgtttttcaaaacatcggcttttcaaatataccgttatttatcaacggatagttaggaaattctatcgatacttcgaagcgcgctggccacacttttcatctctatcaatagttccaccactactttcttttttagcaattgattcgttttttttttggacgcacctgcgtgcttcagccacatttttggcctaaaacaatttttggccccaaacaatggaggccctagtgaattatagtagtgaggacgaccaggaggatgctggctttcagatacgggtaaatatgcctacaccgcaaggccggaagcagctgaaaaaagaaagaatcatcagagcgcattttgtgtacacatacatcttcatcacttttttcttccttgcgtatatgggaaccgcgtgtgtgtcgtgtttgtgttgtgtgtgtgcgaatgcgcggaaacgcaaaataaagaactgatcccatcaattcaaaaaacataaaaaaacgaggaaaattcaaaaccactaaccactccaataatacatttcaagtatgctttggtaaaataatgccaatttgctgtttcttaaaagttgcaaaattcccttggcaccacaacaactgcagcatttgccgcatgctaaatcctcgagaacaacaacaactgctaacttactagagcagaacaacaataactatgttagcggcaacagtccgcgcggcaaggaaagagattgccgtatttgagaaccgtgtgtgtgtgtgtgtgcttgtgtgtgtgtacgaatgcgcggaaacgcgaaataaagataactgatcccatcaattaaaaaaaacataaaaaaaacgagcaaaaatcaaaaccactaaccactccaataatatagttcaagtatcctagtgctttagtaaaataatgcgaatttgctgtttcttaaaagttgcaaaattcccctaggcaccacaacaacaacaacaactgcggcatttgccgcatgctaaatccccgaaaacaacaactgatagcttattaaagcagaagaacaacaataactatggcagcggcaacagtccgcgcggcaaggaacgagaaagagagcgcgagcgggagagagagaagacaaagccgatgtcgcagcagcagagtcataggagcagcagcagaggacgcattgatgaggtaaagacttgccgttgcaccaaatcgatatttacttcccataatatataccaaataccatatgctattgtactccatacgtatgtgtgtgtgtgtgtatctgggttggagcgcaagcggatctttcatgtgccgtttccttccgctgccgcaaagggcgacgccatcgccgactgcgctgccagcagcagcacttacagaggcaggcaaaataatagcacagagtccgctttaaatcaaacgtctaatgtatagatatcaatcaaatcgaaaccgagatcttttaaacttttgagttaaagttaatcccagttgtatacattggccaattcacttcaaataaaaaagagaaaatgccacgtaatgaatgaaaagtacttgtgccaaaaaaacaggacactgcatcaaatcaataatgcagcctagttttcagtgcctccattcctttacgccagcaaaagtaataattctatacataggcaaggtcattggcagcagtacttcattgttaaaactaaattaatggaatgttaaaacacaataatgcatgcagtccattccccactggttctatagtttatattgcaattaaagaaaagaacagattcacaatcttttcttgtagtcttgtagttcagctttacttcgggttatcattgattaatacttccattagttacagatataaatcgcagatcttgttagattctgcatctttaggggcttcaggcattttcttgtgctattatttagtcatctgctgttcccaactgaaaaattcaatattcatatatttatgtatattgatctccacgatcgactgcatgcgctccaacccgttacatccaaatttcgctactgccagatttatatgggccaaaaactcaaaattaaatccaaagacagaaaattctgtttgttcggtccgcttgcgatttacacacacattgttgttgttgttgttcggccagcttagttaagtctacaaactttatatgccaatcaatatttaaatgactaaactctaccattttattatcattgttattgttgttacgtaaacgaaaccgaatcgaaccaaaacgaaaaaccattttccaaacaaacaagtcaaaaacaaaaaacgaaaacaaacctgaccgacgataattgacgatagcccgatcgtagtaatcgctcgattaccaatagcttcttcgatagtgcgacaatcgatcaaatttgttatgaccaccactgtgtgtgtagtcctgtgtgcgactctgtggctgtgttggtgggtgtgtgtgagccactgaaaaaggtaaaagcaaatagaacgatcacactcaccacacacatgcccgcccgcacacacacacacacacacaaccacccacccatccacccactcactcactcactggtggcgcgaaagcgagagagagagagagagagagagataatgcgaaagagagatcaaggcgcacgaaagtgagtatacaaaaagcgatcaaatagaacctaacaactctctaagcaatctaggacaccccggaaaggaccccagctggtggcccacagcccgaatcctctttctatttcccctccagcatcctaagcatctagcaactagacctagatccttagtcgccggcgcagattcgtagatccatacgctctaatgtaattctcctcaatgtgttgcttcatcccgttccaggagccgaagcccagcagtcgccaccgccaggagcgggacaaggacagggaacgggaccgcgaccgcgaacgtgacagggacaaggacaagaagcgcagcgattcagaacgcagtcgcgacaaaggacgcgacaagaatcacagcaaggtgagacagagtcctaatcaactcagcataactcagccaaactaatgtctgtgctatttacagggcgaccatcgccaccatcgtaccaaagacggcgacagccacagagagcgggagcgggatcgtgaccgggagagggagcgagatcgcgacaaggatcgggaccgtaggcgttcggagaagagcagtcgccaccacagtggcaaggaacgccatcatcatcatcacaacaactcatcgtcagccgccgctgcagcggtcagtgcagcatcagtccgtcgatcccatgatgaacgcagtcgtcgtcgccgggactctcgatccggttcccgcacaccaacgggcacgccgccctctcgtcgccgccatcagtcgcaacagtcacgcaaatatcgcgaacgcgactccagcagccgctccagatctccgaaggaagaacaagccacaacacttcgcggtggagctgtggccggatctcatatgctgctcgctaaatcaggcggcggagcaggatcaacggcaactaatgcaacagcagcggcgagggttgcagcggccgctctggtagctgccaatgcaacagccgcagccatggcagccggttcatccggcggcggtggcggcggtctcctgcccacgcccaactatgcgcccaagataccctcgctgatgtccttggagctgagcacaccagcggcagcagcaccagtcgcagaacccatccagctgcccagttactacaatccgagcatcatcaatgccaatcgctatgcggagcagcagcagaagcgcaagctactgtggggctccaagaagagcgagaactcggcgaacaagtggggcaacgcgcacttctcccaggactccgacggcaaggtggcctccaagtttatgcggctcatgggtatcaagaacgctggtacgtccggcaatgacgatggcaagggcggccaggcggagtccaccaatggaagtgcagcaggcgagggaaaccgcgcagtaagaggtgctgcgccatcgggagccgctggcggaacgaaagtgcccacggacgtgcagcagcgccagcgcatgttctccaacatggagcagcagtacgagatggcgcgagccgccacacacacgatgcgtggcgtggggcttggtttcggctcccagccacgtactttctagaagggatcggaacggaggaggatcggctccctgccaggctgtaaataccatgccactcactcaactcattagtcagtcaatatgtttctcctcaacaactttttgtttgtgttgagaaaattttttgtttttttgatttcaaataaacgttgcaacagaatttatgaagtgacgtggctctctctttggatttgcttgggataaatgcgtcgttaggtagacttttagtctacactattactaagtatgctaagagtatccaactttaactacaaagttcagcggctctaatcgaagaatgcttgaatattcaataataaataaaggtatttttttttacaataaacaattttaaattttggcactctgtttagtagatgtcagttttttgccatgcaccttggcggtcggtctgcctatcgccaatcgatagctgaccaaaaacaataacaataacaaaatcagctgacgataggacgtcggatatcgataccatatcacaaactaataataaaaataataataaataagagaattaatactactagaacacaaacaaaagcatataaagcttacacatcctttattaaaacaaacagccaaattggatttaaattgtggaacgaagcaaacagaaccgcttgagtttgtgccactgccacgcaaaaaaaattatcgtttccaaaaaactaagcatacttcatccgaaattagcaatcagctagccaaaagcggagtgatctcgtcgagaagagccacgccccctatccgcccacgctgcccagaagagagcagcgaagatgtcgtggctgaacagcagtctcagccagctgaagggccaactaaccaatctggcgcaggaagttctggccgaaacggcaggacccggcgacttggagtatgagggacatcaagcaggaggtgctagcgtccaagacgccgagcagcaggccaagacagccctggaactgctggccgaaacccaggagcagaaggagca

SEQ ID NO: 13634 - DNA, 1619 bp, DROSOPHILA
ttgattcgttttttttttggacgcacctgcgtgcttcagccacatttttggcctaaaacaatttttggccccaaacaatggaggccctagtgaattatagtagtgaggacgaccaggaggatgctggctttcagatacgggcaccacaacaacaacaacaactgcggcatttgccgcatgctaaatccccgaaaacaacaactgatagcttattaaagcagaagaacaacaataactatggcagcggcaacagtccgcgcggcaaggaacgagaaagagagcgcgagcgggagagagagaagacaaagccgatgtcgcagcagcagagtcataggagcagcagcagaggacgcattgatgaggagccgaagcccagcagtcgccaccgccaggagcgggacaaggacagggaacgggaccgcgaccgcgaacgtgacagggacaaggacaagaagcgcagcgattcagaacgcagtcgcgacaaaggacgcgacaagaatcacagcaagggcgaccatcgccaccatcgtaccaaagacggcgacagccacagagagcgggagcgggatcgtgaccgggagagggagcgagatcgcgacaaggatcgggaccgtaggcgttcggagaagagcagtcgccaccacagtggcaaggaacgccatcatcatcatcacaacaactcatcgtcagccgccgctgcagcggtcagtgcagcatcagtccgtcgatcccatgatgaacgcagtcgtcgtcgccgggactctcgatccggttcccgcacaccaacgggcacgccgccctctcgtcgccgccatcagtcgcaacagtcacgcaaatatcgcgaacgcgactccagcagccgctccagatctccgaaggaagaacaagccacaacacttcgcggtggagctgtggccggatctcatatgctgctcgctaaatcaggcggcggagcaggatcaacggcaactaatgcaacagcagcggcgagggttgcagcggccgctctggtagctgccaatgcaacagccgcagccatggcagccggttcatccggcggcggtggcggcggtctcctgcccacgcccaactatgcgcccaagataccctcgctgatgtccttggagctgagcacaccagcggcagcagcaccagtcgcagaacccatccagctgcccagttactacaatccgagcatcatcaatgccaatcgctatgcggagcagcagcagaagcgcaagctactgtggggctccaagaagagcgagaactcggcgaacaagtggggcaacgcgcacttctcccaggactccgacggcaaggtggcctccaagtttatgcggctcatgggtatcaagaacgctggtacgtccggcaatgacgatggcaagggcggccaggcggagtccaccaatggaagtgcagcaggcgagggaaaccgcgcagtaagaggtgctgcgccatcgggagccgctggcggaacgaaagtgcccacggacgtgcagcagcgccagcgcatgttctccaacatggagcagcagtacgagatggcgcgagccgccacacacacgatgcgtggcgtggggcttggtttcggctcccagccacgtactttctag

SEQ ID NO: 13635 - protein, 513 aa, DROSOPHILA
MEALVNYSSEDDQEDAGFQIRAPQQQQQLRHLPHAKSPKTTTDSLLKQKNNNNYGSGNSPRGKEREREREREREKTKPMSQQQSHRSSSRGRIDEEPKPSSRHRQERDKDRERDRDRERDRDKDKKRSDSERSRDKGRDKNHSKGDHRHHRTKDGDSHRERERDRDRERERDRDKDRDRRRSEKSSRHHSGKERHHHHHNNSSSAAAAAVSAASVRRSHDERSRRRRDSRSGSRTPTGTPPSRRRHQSQQSRKYRERDSSSRSRSPKEEQATTLRGGAVAGSHMLLAKSGGGAGSTATNATAAARVAAAALVAANATAAAMAAGSSGGGGGGLLPTPNYAPKIPSLMSLELSTPAAAAPVAEPIQLPSYYNPSIINANRYAEQQQKRKLLWGSKKSENSANKWGNAHFSQDSDGKVASKFMRLMGIKNAGTSGNDDGKGGQAESTNGSAAGEGNRAVRGAAPSGAAGGTKVPTDVQQRQRMFSNMEQQYEMARAATHTMRGVGLGFGSQPRTF

SEQ ID NO: 13636 - DNA, 3365 bp, DROSOPHILA
atcaacaaggtgctgaacgatggcaaggtgcgtactaaggatctgggcggacaatcgaccacgcaggactttacccgcgccatcatcctgaacatgtcctagatgggcaccactgtcatcgccggcatcgcgatcagcaagtctacaacatcatgggcaacaacgttggcgcttatataatcgacattagacagtttctgttgttgccacagctaaattttgaattgttgaaagaaacaccttgaaagttcttagttatcctattacgtccaattttttttatttgtcccgatgtcttcagtgcattcatttgagtattatttccggcgaatatttaagtttagtccaattgaaacgcctgcagacccgccccgaatccaaaagttgcgaattctttagttttaccaattggcagtaatacatcgatccttgattatgttgtaattatttacgtattatttccccccccccccctttttgatttcgcaaagatgctaatttacggtcgaattatattttatgtttaacccgttgaaaagcaaaacaaaaaaaaaaaccgaaaacaaatgatattgctaaaccaattaactgataacggatggctttgagtggacccactccactggagctgtgagaaagataacaataaactcaaatctaaattaattattatttaaaagccattgtcagttccgagctgtctaaattttaagtaatacaaacaaaagataaaaaaaaaaacccaaacatatttctcaaacttttttttgactggaatgaaaggccaaaggagatttcatcgctattcccaactccggcgccactttcacaggaaatccaatcccgtaaagagccggaaaagctctagttgttttttaaaaaaccaaaaacaaatttattagaaaagtcgataccaaatgtagccgaaatgaaaaacttagaacaccaataaggacggtaatgattatccagacgcacagtccacgtccgtctccaattattatccacccttgggcttggccaactcgatgaggcgtggcgaggctttggccttcagagccgccggcgatatggcaaacggattctcccggatatgcgtgttctcgaactccttgggctccgccagctccttgatccgcgtgctcgccttgtatttgagcgcgtttggcgcgataccgaatggattctccttgacatccgccagtccttggttggcatcgcgcgtggtaagtggctcggacatctccttgatgcgggcactcgctaagtgaagcaatgccaggtgctgcattattaaaagatcaactaaattggagtatgtgtacttacgcttgtagcgaagggcattgggcgagaccttctccggattctcgttgatgtggacattatcgcgcacgacgggctgcgatatttgcttgatccgcttggtcgccttgtagtccttcatctgggaggtcagctcccacttgggtttgatctcctccaaataggccttgggactggccagctgattgagacgcacgggatcgaactccccagctccacgatcctaaatgaaatgggggattatcatcagtttttagctgaatttagttttttttttaacttaccggtttcgggacctttggtgctttctttggtttcgccaacttttcgatgtacttctcgtgcttagccagctgcttctccgtcttcttcttctttttcttcctgcaagcacaaaggataatgggtttataaataataatgaatgaacataagatagatagatatattatcttacggcttaaccaacggctggatattcgtgagacgactgtacagcgatagatagctgtagcgaagccatctgttcagtatggactccccaattgagtcgcccgccagaatggccgttcgccgcctgtgaagcaatcgacggaccgtgggcagagctagttgctcggtgcgtgtgtgattctgggcgtcacatggtcgcaccatctcgatggacttgggaaatgagcaggcgcatttcggcacaaagcggcaggtgcgtcgcctgggtatggccatttccatcagacgccgccgcttgacgaacatgcgctcgtgtcggcgcgtcagtttgtccagctcctggccaatgtccctaacgaagcactcggcatcgtagggaatggggtcccggatgggacagcagtccggacggacgcagtccttcagctgcagacaagtggtcaccgtcgggctgaggtcacacttcagtccttggatggtcattctgtggatttccgaattttgacgcactactttaaaccaattaatgctaacttttttattcgcttatgataaaaaacatctacgattatctgaacgagttgaaagctaacttcatctggagaattttttgtggcaactaagtacagaaattttggaatttgacagcaaatgaaatgcatacatttttcgctattagacaagattttttaatacttacctaagctggaattttaatttcaaaattaagctttatccacttaaccccgatggcaatgaaaagacgttgttaatctttaattaatgttttattgacagtattcataaaaatactgagagtatgctccaagttcacatcattacaagttaatagttttgtttttgggccttgttttccgactgtcccatcggcaagttgttaatttttttagtttgctctccgacagctaacgtataccctctatttttgctcattctgttcacatatacacaaatctcatccatttcttaagcaatttttgcccgtttccttgacgttcttctcaactgatttcggttggtttttatgcttttttacaatgtttttgcttcggttaatgtaatgtatctccttactctggttgcaattcaattggaattcagcagttcagcacatgttcttatttgttcattattattggcttcaaatttgttgatcgttttttttttattcgtttgtcttgcgaacaaaatgtacataacgtggaaacgaaagggataagcataatgttaataataattgttatacacccacatcgaacttatgcaatacactcataccatacacaaatatgtactataaatttgaatttagcatttactaggtcattttttggttgacaaaaattttgctaatttgaatttaccttatttggtttgtttgtttttttttttcatttgatattcgatttgttgagaatcccacttggcattcgcttttttttatatacacaaaaggtcaacgccaaagcgaaataataattagttctatgtaaattggggttttctccattttcaatcaatttttttttttttttgcttgccatcgaaatatgtatgttcttttt

SEQ ID NO: 13637 - DNA, 1165 bp, DROSOPHILA
ttcaactcgttcagataatcgtagatgttttttatcataagcgaataaaaaagttagcattaattggtttaaagtagtgcgtcaaaattcggaaatccacagaatgaccatccaaggactgaagtgtgacctcagcccgacggtgaccacttgtctgcagctgaaggactgcgtccgtccggactgctgtcccatccgggaccccattccctacgatgccgagtgcttcgttagggacattggccaggagctggacaaactgacgcgccgacacgagcgcatgttcgtcaagcggcggcgtctgatggaaatggccatacccaggcgacgcacctgccgctttgtgccgaaatgcgcctgctcatttcccaagtccatcgagatggtgcgaccatgtgacgcccagaatcacacacgcaccgagcaactagctctgcccacggtccgtcgattgcttcacaggcggcgaacggccattctggcgggcgactcaattggggagtccatactgaacagatggcttcgctacagctatctatcgctgtacagtcgtctcacgaatatccagccgttggttaagccgaagaaaaagaagaagaagacggagaagcagctggctaagcacgagaagtacatcgaaaagttggcgaaaccaaagaaagcaccaaaggtcccgaaaccggatcgtggagctggggagttcgatcccgtgcgtctcaatcagctggccagtcccaaggcctatttggaggagatcaaacccaagtgggagctgacctcccagatgaaggactacaaggcgaccaagcggatcaagcaaatatcgcagcccgtcgtgcgcgataatgtccacatcaacgagaatccggagaaggtctcgcccaatgcccttcgctacaagccgagtgcccgcatcaaggagatgtccgagccacttaccacgcgcgatgccaaccaaggactggcggatgtcaaggagaatccattcggtatcgcgccaaacgcgctcaaatacaaggcgagcacgcggatcaaggagctggcggagcccaaggagttcgagaacacgcatatccgggagaatccgtttgccatatcgccggcggctctgaaggccaaagcctcgccacgcctcatcgagttggccaagcccaagggtggataa

SEQ ID NO: 13638 - protein, 353 aa, DROSOPHILA
MTIQGLKCDLSPTVTTCLQLKDCVRPDCCPIRDPIPYDAECFVRDIGQELDKLTRRHERMFVKRRRLMEMAIPRRRTCRFVPKCACSFPKSIEMVRPCDAQNHTRTEQLALPTVRRLLHRRRTAILAGDSIGESILNRWLRYSYLSLYSRLTNIQPLVKPKKKKKKTEKQLAKHEKYIEKLAKPKKAPKVPKPDRGAGEFDPVRLNQLASPKAYLEEIKPKWELTSQMKDYKATKRIKQISQPVVRDNVHINENPEKVSPNALRYKPSARIKEMSEPLTTRDANQGLADVKENPFGIAPNALKYKASTRIKELAEPKEFENTHIRENPFAISPAALKAKASPRLIELAKPKGG

SEQ ID NO: 13639 - DNA, 7192 bp, DROSOPHILA
ttaaactgaaaccacgagcatgtcgcaacagtcgctctcaaactgtgctcgccttctggtttacctggcggggatttcgctctttgccaaccacttggcaaacgcgtccagccaaatcgacgtggatacggatctgaagcacttgctgggtcgttgccactggtcggacgaggatttcaacgagtgcatgcggcaggtgtttaacgacctaagggcctacttcacaacaggtgagtgagatgtggattacgggcgagcaatcatggagcaactctttcaggtgtgcccgactacaacatcaagccctttgacccgcaccactgtagctacgttgagctgcgacgaggtgaatcacagggtctgggcagctttcgtctgatattgcgcaatgtatccgagtacggatgggcgcgatccgaggtgaccaagttccatgccgatccagaggaccagcgcatcgtctacactcagtatttccccgacaaaagtctggagggcgagtacgagttcgccgccaagatgctgggtactgagatgaacagaaaaggccactggaacctcaccctctacgattacaggtgggcaccgagttgcatggaaatatgtatttcccaagctgtgttgcaaacaccagtattgttgatagcttttggcttacatgacaacctatcgctcactttatttacttcctcagtcaaaccaccagcgttaggcgcatcggcggtccgggctcactcatcaaggtccatgtggaggtggaccgcatcggcggaatggagctgcacattgagaacttgctgcagggacagcccctcaaccaactggccgatggagtcatcaacagcatgtggcagctgggattgcccttcatcaagccgatgattaacgagttggttagcacggcatttacggatatattcaacgagtccttccggcactttccgctcgagaagttcctcgccacgtgacctcatctagttaaccatactgtatctctgtatctcttttgtagtatttttaatggaacttataacaaaggctagttaattaaacacttagaccacatccgccaaagcactcggaattgcttcgatctggggctgcgccacggacggttgcagggacatctgagccagggatcgggcaaagagcttgcttagcgagatgatcacgtaggaggagctctgcaactgctgatccaccgtttcgtataggagttgataggcctgctccagctccggtgtgagggtggcttgataatatggacaaaatataatttcaatatgaaatgctgtaaaacttaatgataccaatcttaagggaaatatatgtattaggtgtcagaactaatatataaactacaacaatttttaagaattcaaggatacaagcataaagaactactgaaatccgtcgagatcacgggaactataaaatatttcgactgatttttcctttcatgtgtcttgttatttagtgtcgatatttctctctcgtactccacattcttcattttgttcttatacacaaactattgttttagtttttgatactgcttataactacattgtatttacttacgtttttgctgcagcgtttgcttgccgaggtcgaacatgaatcgcaggtagcacagctgattgtacaggtcccgctccgtatactgacgcagcaggctgccgctcctgcacttttggcacagcgggcggtgggatttcttcctcaaggagtgtgtgcgggtgttgaagttgcaatccgggtgatcgcagaccagccaatttttatagaaccgttgcacatactgccgcatggaaagctgcagctgattgcgcacgcttgccaggtactgaatcggtgccgtttggcactcggacttagcgcattgctggagtacggctatgtgggagttgcttggacccggtcggtacgcagacgccatcagctgctccgtcttacaggtaacgcactggaagcggaacggttcgcacaggcgatacaactgcagagtcgtcttgagcagggactcaccctccgactgctcggtgttctctcgctgggttctacataaccaaaatattcgttaggttagagtttgtaaggagtaataagatagtaagtacctctgcgcattctgacggaacttggttgggtccatgcccagacactcggcgatgcgactcgcatcggttccctccagcacctccaccattcgcgtgactaccggatggatctggtgtcccaggtagtaattcgtgtccagctgcagcttcttatcctcactggtcttgagctcatccaaatggtatgctcgctgcatggcagcatttgttgtcccatccaaacagatcacatagtccaccatatcgccctttttgtaccgcctattacgctcgcgattcatacgaagggccacctggacgtggggcaatgaagcactattggcatattcctggggagtccgagttaactgtttggtgatgacaaacagtggcagcggtactacaccctctgcaatttgagttttgatcttctccagttgggcatgcactgcatccagtttctcctccaaaggcttttccgacagcacttcatcgagaacggcttttcccaccattacagccagctgagaccaatcgcgacgtactatatccaggcccttgtgctcctgttcacgcctcaggtttcccttggaatccttgctcaacttgatagcggcatacttctttttcttcagcaagagcaaacagccaaatactccatcgatatccaattccagctgcttgtatagtttatttacactctgcttaatattgtgaccaatcttgtagacctggtcgtagtcggttatgttggtatttatcatcagggaatctgtgtctccataaacaacgtcatagttcatcttttgcacgagttgttgtgtgttcgtgaggatttctctgcccttgtgggtgaccaaagcagccaagtgctgggcaaagaaccgggagtgggcgaaacccaagcaaccatacatggagttcgcagttagcttcagggccatctgccgaatgtggtactgcatctggagttccggcgaaagatcaggcgctgccattagctttttcacctcttttcgcgactccaccaagcgtttcaattgaaggggtaagattccaggttccgttttcgagtcgggtagggtgggcaactcatctgcatccaccggctgttggacggtggtgaagcatatgttgtactcctgtattatactggggtacagggagttaaagtccatgaggagaacgtacttctcgtagagaccacgcatgggctccaacactaagccaccagcataggctgccttctttttggtttgcatcgtcgcatctgcacctgaaagcgtagcatccgtatctcctgcaccacttcgtttagaaaccggcttcttgtccggcactatgtaattcttctcgtggaaggcatgcagcaacaagaactcatttcgttcagaacgacctccttgaagggtcctggtcatggtattgccgcagatattagtgatttgtagcgccaacggcatgatgttgagctcacacatcagccttagtaaatatgaattgtcctgcatggtgagcgatatgagcttggtaatgctttctcctttctcatacatctctagcagatcatcggcattcacttccattctctccgattccttaagcttcagtacttgtttgcatagcgtttgcagatcataggatcttgctcttatacactcctctgcagatcgctttacatcacaaaccattctgccgacgaaatgttccagcaatcgcttgccaaacgattggctcagcctcagtcgccccattcgagaccattggggaatcttcagggctacaatttgatcggttattacatttagttgacaatccatggaatcgaaggttacaatgagatctgcatctattttctggtactgagctaagaaccaactcaacagggctctctctgagtcatgtttgtgcactgtggtagacttatattttgccatctcaaagttcaaatctaaaggccaactaaccaccgccgggcgagtcaaagcgcacatatgtcgattgaaagcgggctgtggagcagggcggtcgatatggaaacgattgtgggtcagcatggaaatcatgcatatctcgtttctcgatgttttcggattcattgaggtgcgaacattaagcgatagtagcgtaagtggaggtggtggcgctggctttcccttatcttgcaccaactctacattcttgggctctgtcaatgtgacctcggtgttacaccaactcatgggagttgggctcaccttgaatccagtcacctgcagccaacagggacctttgattttccgatctaagaggaatctttcgagtgcattggtggtggcgccgaatatgtgtgctatagaattgtatttcttgtcagccgacaaattgggcagtggtttctttccatcgtagtgaacctccaagtaatcgcaagattgcggaacttcaataccgatagcgtgatgggcaaaactcttggtgaccttgcgggatcgaaagaactcgagcttcagttggtttgccacctcgctgtcgaactccttgtatatgtctgcgacggtcaccttctgcttggtgggctccttcgaaatgggatctaagagctaaaagaatatattcagaaacaacacttcacctaaggactaagtatttgtagaataatactcacaaattgtcggggcagcagatagagcacacggttgatgttctgtacacgcagacagacggactttccatctgcggtccgaccgaacaggaagacttcgccgggcatttttactggatcctcataggcctcccagtaccagaaccgaagctgttgatctgaggagattgtcgaatcctgctccgtggtgagcacggacttttcaaaatcatcgtccatttggcatatagactcccaattgttcagcaacctactaatgtcctccgattccgattcctttggcgatccagttgtttcttttttgggagctgatttttcggcgactttgctttgggatgttttctcagctgctgttttcgtttgggaaaccttctcggtctgctgtgtcttctccacatcaaactggttttcatcgtcatccagacagctaaagtccatttcattgtcggagaatggatcttcggtggctttttttgcaggtgtcttttcaggcatgggctcttttttgattgtaggactggagaaaaaggccacctttgtgtttggaactgctgccttgggcttcagaatgcgctccagcatctcgttatcgctactggcctccgctttcttacgttcctgctcctgaactttgatgttgtttagaaaactattcatgtattccttggcagcggcggcatcgaatttacgcgacgtaactgatattttcgctggggctataaccttttccgccttttctgacgtcgctgcaggctcttcctttatttcgcccaaaatatcagcaaggatatcatcgtctttcacactggtctttacatccatctttttgggcactgcattgctgaatagattcttgatggatgcttttcctgttactggtttttcattctcccgtggtctctttttgctgttgggggcaacacccttcttcttcttcgagtccttccgatcctcctccccatcggagtactcatcttcgtcctcgaagaaatcccgaagatcttctgcataaccagtaccatctaaaagttaaaatttagtattataaagtatagagttcagagttccaacttaccctcttcgatccaatcgtcaccgtacttttcctgcgccctcttcgcgtactcccgctcatcaaccacatcgtatacatcgtccacctggtcctccactttgcatttgttcttggttcccttcagctgacgcagtcgctccatggcggcgaacctaccatttttgtctactctctggcgcttagcgcgcggttcagctggaaatttataatttcggtaaaaaatatgtttaagggagttatcttattaacttacacggtgattcagacattgcaactggctaactttgataataatttccccgtgttgtgctgcagtttgcaaaaattgttttgtgaccagggctggaggatgatcaaagcgggaatggcgggaacatatcgataacagagctacgatacataaagcgctgccggacttttgcaatgtaatatcgatagtgtcgttaagaagaggaagaatgtaaggaaattaaaaaaaataaaagccatacaataacttaatcccaaattgcaattttattattaagtaacatctctattttatgaatttctgagtggtaatatatcgataggtggcagcgcgttatgttagctctgggcactgttagcgtctaatctgtaagcacaaatgatcgattacagttaacacgaatagttaacataacagttacagcgatttaaaatgactgctatattttggcgggaaatccgacctgataattgaaatgaattcaccaagtaagaaagaacaatgatcaccatttaaagggcgttcttttagattttacattttcgagcttcagctttttaattgcagtggatcacaaaaagaaaaacttttccattagcagttgctccatgaagatccccttttaatgtgcttgtcatatgtttttattcccaaattaaaagacaatagtttgtttggttttaatcgtattttatttatcatgcataatattaggcttataagatatatataatattatactttaaatacaatatacagcaatttcgattaaaatttgtgtggatttgaaaggtgatttcataccctatataattatcaatgcaaaatcatggtttatatatatacacacatacacaaaacagacttacatattacatgaatacatatatttatgactatatttgctgtttaattgttataagcaaaaattcgtacatatttacaatttaatagtaaatatttagaatttctgcacttgcagtcgttatattttacaattattttcgggtgtgttggtgaggaaagatttcggaagatgagaaaatatggaaaatactgttttaggatagggtgatcgagaggaactatagaaaggatattaaaatgtcagtctaccagaatgt

SEQ ID NO: 13640 - DNA, 4579 bp, DROSOPHILA
ttcccgccattcccgctttgatcatcctccagccctggtcacaaaacaatttttgcaaactgcagcacaacacggggaaattattatcaaagttagccagttgcaatgtctgaatcaccgtctgaaccgcgcgctaagcgccagagagtagacaaaaatggtaggttcgccgccatggagcgactgcgtcagctgaagggaaccaagaacaaatgcaaagtggaggaccaggtggacgatgtatacgatgtggttgatgagcgggagtacgcgaagagggcgcaggaaaagtacggtgacgattggatcgaagaggatggtactggttatgcagaagatcttcgggatttcttcgaggacgaagatgagtactccgatggggaggaggatcggaaggactcgaagaagaagaagggtgttgcccccaacagcaaaaagagaccacgggagaatgaaaaaccagtaacaggaaaagcatccatcaagaatctattcagcaatgcagtgcccaaaaagatggatgtaaagaccagtgtgaaagacgatgatatccttgctgatattttgggcgaaataaaggaagagcctgcagcgacgtcagaaaaggcggaaaaggttatagccccagcgaaaatatcagttacgtcgcgtaaattcgatgccgccgctgccaaggaatacatgaatagttttctaaacaacatcaaagttcaggagcaggaacgtaagaaagcggaggccagtagcgataacgagatgctggagcgcattctgaagcccaaggcagcagttccaaacacaaaggtggcctttttctccagtcctacaatcaaaaaagagcccatgcctgaaaagacacctgcaaaaaaagccaccgaagatccattctccgacaatgaaatggactttagctgtctggatgacgatgaaaaccagtttgatgtggagaagacacagcagaccgagaaggtttcccaaacgaaaacagcagctgagaaaacatcccaaagcaaagtcgccgaaaaatcagctcccaaaaaagaaacaactggatcgccaaaggaatcggaatcggaggacattagtaggttgctgaacaattgggagtctatatgccaaatggacgatgattttgaaaagtccgtgctcaccacggagcaggattcgacaatctcctcagatcaacagcttcggttctggtactgggaggcctatgaggatccagtaaaaatgcccggcgaagtcttcctgttcggtcggaccgcagatggaaagtccgtctgtctgcgtgtacagaacatcaaccgtgtgctctatctgctgccccgacaatttctcttagatcccatttcgaaggagcccaccaagcagaaggtgaccgtcgcagacatatacaaggagttcgacagcgaggtggcaaaccaactgaagctcgagttctttcgatcccgcaaggtcaccaagagttttgcccatcacgctatcggtattgaagttccgcaatcttgcgattacttggaggttcactacgatggaaagaaaccactgcccaatttgtcggctgacaagaaatacaattctatagcacacatattcggcgccaccaccaatgcactcgaaagattcctcttagatcggaaaatcaaaggtccctgttggctgcaggtgactggattcaaggtgagcccaactcccatgagttggtgtaacaccgaggtcacattgacagagcccaagaatgtagagttggtgcaagataagggaaagccagcgccaccacctccacttacgctactatcgcttaatgttcgcacctcaatgaatccgaaaacatcgagaaacgagatatgcatgatttccatgctgacccacaatcgtttccatatcgaccgccctgctccacagcccgctttcaatcgacatatgtgcgctttgactcgcccggcggtggttagttggcctttagatttgaactttgagatggcaaaatataagtctaccacagtgcacaaacatgactcagagagagccctgttgagttggttcttagctcagtaccagaaaatagatgcagatctcattgtaaccttcgattccatggattgtcaactaaatgtaataaccgatcaaattgtagccctgaagattccccaatggtctcgaatggggcgactgaggctgagccaatcgtttggcaagcgattgctggaacatttcgtcggcagaatggtttgtgatgtaaagcgatctgcagaggagtgtataagagcaagatcctatgatctgcaaacgctatgcaaacaagtactgaagcttaaggaatcggagagaatggaagtgaatgccgatgatctgctagagatgtatgagaaaggagaaagcattaccaagctcatatcgctcaccatgcaggacaattcatatttactaaggctgatgtgtgagctcaacatcatgccgttggcgctacaaatcactaatatctgcggcaataccatgaccaggacccttcaaggaggtcgttctgaacgaaatgagttcttgttgctgcatgccttccacgagaagaattacatagtgccggacaagaagccggtttctaaacgaagtggtgcaggagatacggatgctacgctttcaggtgcagatgcgacgatgcaaaccaaaaagaaggcagcctatgctggtggcttagtgttggagcccatgcgtggtctctacgagaagtacgttctcctcatggactttaactccctgtaccccagtataatacaggagtacaacatatgcttcaccaccgtccaacagccggtggatgcagatgagttgcccaccctacccgactcgaaaacggaacctggaatcttaccccttcaattgaaacgcttggtggagtcgcgaaaagaggtgaaaaagctaatggcagcgcctgatctttcgccggaactccagatgcagtaccacattcggcagatggccctgaagctaactgcgaactccatgtatggttgcttgggtttcgcccactcccggttctttgcccagcacttggctgctttggtcacccacaagggcagagaaatcctcacgaacacacaacaactcgtgcaaaagatgaactatgacgttgtttatggagacacagattccctgatgataaataccaacataaccgactacgaccaggtctacaagattggtcacaatattaagcagagtgtaaataaactatacaagcagctggaattggatatcgatggagtatttggctgtttgctcttgctgaagaaaaagaagtatgccgctatcaagttgagcaaggattccaagggaaacctgaggcgtgaacaggagcacaagggcctggatatagtacgtcgcgattggtctcagctggctgtaatggtgggaaaagccgttctcgatgaagtgctgtcggaaaagcctttggaggagaaactggatgcagtgcatgcccaactggagaagatcaaaactcaaattgcagagggtgtagtaccgctgccactgtttgtcatcaccaaacagttaactcggactccccaggaatatgccaatagtgcttcattgccccacgtccaggtggcccttcgtatgaatcgcgagcgtaataggcggtacaaaaagggcgatatgcgagcataccatttggatgagctcaagaccagtgaggataagaagctgcagctggacacgaattactacctgggacaccagatccatccggtagtcacgcgaatggtggaggtgctggagggaaccgatgcgagtcgcatcgccgagtgtctgggcatggacccaaccaagttccgtcagaatgcgcagagaacccagcgagagaacaccgagcagtcggagggtgagtccctgctcaagacgactctgcagttgtatcgcctgtgcgaaccgttccgcttccagtgcgttacctgtaagacggagcagctgatggcgtctgcgtaccgaccgggtccaagcaactcccacatagccgtactccagcaatgcgctaagtccgagtgccaaacggcaccgattcagtacctggcaagcgtgcgcaatcagctgcagctttccatgcggcagtatgtgcaacggttctataaaaattggctggtctgcgatcacccggattgcaacttcaacacccgcacacactccttgaggaagaaatcccaccgcccgctgtgccaaaagtgcaggagcggcagcctgctgcgtcagtatacggagcgggacctgtacaatcagctgtgctacctgcgattcatgttcgacctcggcaagcaaacgctgcagcaaaaacccaccctcacaccggagctggagcaggcctatcaactcctatacgaaacggtggatcagcagttgcagagctcctcctacgtgatcatctcgctaagcaagctctttgcccgatccctggctcagatgtccctgcaaccgtccgtggcgcagccccagatcgaagcaattccgagtgctttggcggatgtggtctaagtgtttaattaactagcctttgttataagttccattaaaaatactacaaaagaga

SEQ ID NO: 13641 - protein, 1472 aa, DROSOPHILA
MSESPSEPRAKRQRVDKNGRFAAMERLRQLKGTKNKCKVEDQVDDVYDVVDEREYAKRAQEKYGDDWIEEDGTGYAEDLRDFFEDEDEYSDGEEDRKDSKKKKGVAPNSKKRPRENEKPVTGKASIKNLFSNAVPKKMDVKTSVKDDDILADILGEIKEEPAATSEKAEKVIAPAKISVTSRKFDAAAAKEYMNSFLNNIKVQEQERKKAEASSDNEMLERILKPKAAVPNTKVAFFSSPTIKKEPMPEKTPAKKATEDPFSDNEMDFSCLDDDENQFDVEKTQQTEKVSQTKTAAEKTSQSKVAEKSAPKKETTGSPKESESEDISRLLNNWESICQMDDDFEKSVLTTEQDSTISSDQQLRFWYWEAYEDPVKMPGEVFLFGRTADGKSVCLRVQNINRVLYLLPRQFLLDPISKEPTKQKVTVADIYKEFDSEVANQLKLEFFRSRKVTKSFAHHAIGIEVPQSCDYLEVHYDGKKPLPNLSADKKYNSIAHIFGATTNALERFLLDRKIKGPCWLQVTGFKVSPTPMSWCNTEVTLTEPKNVELVQDKGKPAPPPPLTLLSLNVRTSMNPKTSRNEICMISMLTHNRFHIDRPAPQPAFNRHMCALTRPAVVSWPLDLNFEMAKYKSTTVHKHDSERALLSWFLAQYQKIDADLIVTFDSMDCQLNVITDQIVALKIPQWSRMGRLRLSQSFGKRLLEHFVGRMVCDVKRSAEECIRARSYDLQTLCKQVLKLKESERMEVNADDLLEMYEKGESITKLISLTMQDNSYLLRLMCELNIMPLALQITNICGNTMTRTLQGGRSERNEFLLLHAFHEKNYIVPDKKPVSKRSGAGDTDATLSGADATMQTKKKAAYAGGLVLEPMRGLYEKYVLLMDFNSLYPSIIQEYNICFTTVQQPVDADELPTLPDSKTEPGILPLQLKRLVESRKEVKKLMAAPDLSPELQMQYHIRQMALKLTANSMYGCLGFAHSRFFAQHLAALVTHKGREILTNTQQLVQKMNYDVVYGDTDSLMINTNITDYDQVYKIGHNIKQSVNKLYKQLELDIDGVFGCLLLLKKKKYAAIKLSKDSKGNLRREQEHKGLDIVRRDWSQLAVMVGKAVLDEVLSEKPLEEKLDAVHAQLEKIKTQIAEGVVPLPLFVITKQLTRTPQEYANSASLPHVQVALRMNRERNRRYKKGDMRAYHLDELKTSEDKKLQLDTNYYLGHQIHPVVTRMVEVLEGTDASRIAECLGMDPTKFRQNAQRTQRENTEQSEGESLLKTTLQLYRLCEPFRFQCVTCKTEQLMASAYRPGPSNSHIAVLQQCAKSECQTAPIQYLASVRNQLQLSMRQYVQRFYKNWLVCDHPDCNFNTRTHSLRKKSHRPLCQKCRSGSLLRQYTERDLYNQLCYLRFMFDLGKQTLQQKPTLTPELEQAYQLLYETVDQQLQSSSYVIISLSKLFARSLAQMSLQPSVAQPQIEAIPSALADVV

SEQ ID NO: 13642 - DNA, 3143 bp, DROSOPHILA
gtttttaaagcgtctctaagtagtttgtactattatatcccttgtaaataaataacactttgatttttatgtaaataatacaattacagaatgataaagatgcagacggatgaataatggtctcgactttcaataactataaattgaaattgaaccatgaagagattgattagtggccaatttatttgcatttcaattaacagattcgtggaatctgaatttgttgttgcgtctactaaaaagttcattgactgctgaaatcccttatggacttacctacatatttgcaaaatttcaagatgatccctcattactacttcgaatatatactacctgtagtatatgctagactaccgcaatggaaattaccaaacaactcacttagcacttggtttacagcaatttggccaagtcttccaacgggcctatctatctatctgtctatgtatctttccatctacgtatctatctatcaacgctgttgcaacttttatgggcgccacaaagtatgactgtgattaatcatgcctgcgctgaagacaaaacctgaagactaaacgataagttggcattagaggggcgtttacgatgctccatgggcatatgggcttgggtgtttttttctgaactgggccagtggggatttcgaattaacagagatacgagaacccaccgccgaatcgcaacgatacgaaacggggcatttgacaagtttattgggcaaacaaagcgcaccccgacttttcctaccaacgtcggcttatcgaggagacccaacccggaatatgaatactacggatagtacgtttgagtgctgctggccaagtgcgaattcaaggcctcgtagaaatctacgagtatttgcacttttcttgcgaaagtaagtcgctttggtaaacttctatttgcgtttgcaatcagaaggagagtttgccggtgcctataaaagatcgttccatggttctggcggcattagttggtgcggatttgggttttcgtcatgttcaagttgctactttgctgccttctactaaccatcgacagtggatgggcctttaatcatggccaggatctagtggactttcaaacttacgaggtatgtgagtcatcaagaaaacaaagtctggatgggatttaattagaaattatatcttgtatcttatggcattgaaaaggattgtattgagtaatggaattcaaatctttccatttacaggacaatttcaacaagacctatgcctcaacttcggctcgcaacttcgccaactactacttcatctacaaccgcaaccaggtggcgcagcacaatgcccaggccgataggaatcgcaccacctaccgcgaggcagtgaatcagttctcggacatccggctcatccagttcgcagccctgctgcccaaagccgtgaatacggtgacctcggcggccagtgatccaccggccagtcaagcggcatctgccagctttgacattatcacggatttcggactcaccgtggcggtggaggatcagggcgtgaactgcagcagtagttgggcctatgccaccgccaaggccgtggagatcatgaatgccgtgcagacagccaatcctctgccctcgtccttgtccgcccagcagctgctggactgtgcgggcatgggcaccggatgcagcacccagacgcccctggctgccctcaactatctcacccagctgacagatgcgtatctctatccggaggtggactatccgaataacaatagcctgaaaacgccgggtatgtgccagcccccatcctctgtgtcagtgggcgtgaagttggccggctattccacggtggccgacaacgatgatgccgccgtaatgcgttacgtatcgaatggattccccgtcatagtcgagtacaatccggctacctttggattcatgcagtactccagtggcgtctatgtccaggagacgcgtgccctgaccaatccaaagagctcacagttcctggtggtcgtgggctacgatcacgacgtggactccaatctggactactggcgctgcctgaactccttcggcgacacgtggggcgaggagggttacatcaggatcgtgcgcaggtccaatcagcccattgccaagaatgccgtctttcccagtgcgcttgcctaagaaggattccgatttgaccttatttcaagttaataaacttaagttttatgtgtaaatttttatatgatgattttgtttcggattcagtagatgctgtaagttctttaaaaaaacttaatgctagtaagcaatactattattattattatagacgcattatctttaaatcaactagaattcgagtaacagattcgggaatatctataataacactatgatgataccttaagagtgtgcctatctatatctatgatagttcatagaatagaagaatagtaatagaaccatccaagaaatagatttgggaatatctcaaataaagctaagataattcatcgagatcttgaatattacataaagagtaatcttgaaaaaaaatcccccgtcttctaccaaaaagtatcgtttggttttttgttgtgaaagcttacagcttttttgtctccatttattgaatttaccattttatttagtttatttattgatttttcatctacaagcggagctttacagacttaaatgctaaaaattaacaagttcactttattttcttttcttttcttgtttttcgcatctttgatctgcttatggattttatactattatctttgcagtgttttctttttctgttatgtttctcttgcataataaataagtttcccattttgttgctatccgtgttgctgtgatataaaaacgaaaggaaattatatagatatatataatatttaggtattatatttatggttatagaatattcgactcagccagcgcagacaaaagcttcttttttttggtgtgtgttctttctgtagatttcttaatcttagttctcgtaaattttttaagtttcagtaacttgtttggaaacgttgttattataaatacttctcgttattatatttcaattgcgttaaataatttgaaatatatgtatgtacgttgtgtttgcattttgttttgttttagtttaggtttttagtttttagtttttattttt

SEQ ID NO: 13643 - DNA, 1023 bp, DROSOPHILA
atgttcaagttgctactttgctgccttctactaaccatcgacagtggatgggcctttaatcatggccaggatctagtggactttcaaacttacgaggacaatttcaacaagacctatgcctcaacttcggctcgcaacttcgccaactactacttcatctacaaccgcaaccaggtggcgcagcacaatgcccaggccgataggaatcgcaccacctaccgcgaggcagtgaatcagttctcggacatccggctcatccagttcgcagccctgctgcccaaagccgtgaatacggtgacctcggcggccagtgatccaccggccagtcaagcggcatctgccagctttgacattatcacggatttcggactcaccgtggcggtggaggatcagggcgtgaactgcagcagtagttgggcctatgccaccgccaaggccgtggagatcatgaatgccgtgcagacagccaatcctctgccctcgtccttgtccgcccagcagctgctggactgtgcgggcatgggcaccggatgcagcacccagacgcccctggctgccctcaactatctcacccagctgacagatgcgtatctctatccggaggtggactatccgaataacaatagcctgaaaacgccgggtatgtgccagcccccatcctctgtgtcagtgggcgtgaagttggccggctattccacggtggccgacaacgatgatgccgccgtaatgcgttacgtatcgaatggattccccgtcatagtcgagtacaatccggctacctttggattcatgcagtactccagtggcgtctatgtccaggagacgcgtgccctgaccaatccaaagagctcacagttcctggtggtcgtgggctacgatcacgacgtggactccaatctggactactggcgctgcctgaactccttcggcgacacgtggggcgaggagggttacatcaggatcgtgcgcaggtccaatcagcccattgccaagaatgccgtctttcccagtgcgcttgcctaa

SEQ ID NO: 13644 - protein, 340 aa, DROSOPHILA
MFKLLLCCLLLTIDSGWAFNHGQDLVDFQTYEDNFNKTYASTSARNFANYYFIYNRNQVAQHNAQADRNRTTYREAVNQFSDIRLIQFAALLPKAVNTVTSAASDPPASQAASASFDIITDFGLTVAVEDQGVNCSSSWAYATAKAVEIMNAVQTANPLPSSLSAQQLLDCAGMGTGCSTQTPLAALNYLTQLTDAYLYPEVDYPNNNSLKTPGMCQPPSSVSVGVKLAGYSTVADNDDAAVMRYVSNGFPVIVEYNPATFGFMQYSSGVYVQETRALTNPKSSQFLVVVGYDHDVDSNLDYWRCLNSFGDTWGEEGYIRIVRRSNQPIAKNAVFPSALA

SEQ ID NO: 13645 - DNA, 3739 bp, DROSOPHILA
gtgctggccaccacgaggtgctctacgctgcgccgaacaagaagaagcaactgcagcagcccagcatcttccggcaacaggtgacgcccacggcgacgccgcagggagtgggcgaactgatggccggcgatcggagcagcagtgcctcggcgcagcagaagctacacctgtttggctcgctgatcagcctgcacgagttcgaggagccgcgggcttcggatcctttcggcagcagtttcaacacgctgaagagcggcaatctcatctctgatctcaacgccagctcgctgtggctggaggacgagttctacaagctgggctttcgaccgcaggacgagatcaccacggagctgtaaccgcatcacaaaactcatactcaaaacttaatgcaaactaagtattaccccggctggcggcgctagccgttcgagtctagcgccagttcagctgggggaatggagcatttgcgtgcacattccgacaggccatcatcgacttcgacaagctaactgggaggccgtttagccggagccgctaaatgcccacgcttagagcttagttagatcagttaagcaagcaaactagtcacgtaaaatcacaaacaaaaccatcaacacacaacgatgccgaggagaaggagctaatgcaaatgcaaatggaaatcgcgtggaaatgaatttagttttatggattttacaaaaatcgcaacaatcatgtaacgaacaatattcaatatacacactatagaaatactattcagataataactaagatgattagcagtataaacgcgatacttatagctatagcttatgtagacagagattataaaccttagcgaatacgaaatggataataaaatcgtgtgccttaggattgtaaaatatgtaacaatttgtattattaaccaggcgccgtcatccgaccaagtcagccaacgctaaggctcctcgtacttccagagtatgtcgggttcctccttgagcttcagctcgccatgtcacgtgtcttctgtaattgtttccgttgcggctacgcgctcgggcgccgttttcccctcgctgaccagcgtggatagctcattcgcatcatagccgatcaatagcttcaaatcgcagtcaaatttgtatgcgaatcgcttgccggacaccttggagatcatatccccatcgtaatagtagcggagagcccttgatagcttttcgtagttcatagcgggtttgtttttcttctcgccccaaaggcgtgccactcgatccgggtcagtgagcttaaattctccctcggtgcccacccactcaataacgtccgtgtgctcgcagtcggtgagtatttcgagtaggaactgccatagctgcacttgtccattattcccggaaccgatggtagtgtagtttgatggattcatggatgacgtagtactttcaacggctgtgaacgaagtagatattgttagctcatgctttggtgtaacattcacacgtctacttacaatcagagctcttgactgactgataggatttccgcataatccgctgttcaagcgaaaggctgccccctgaattggtcgatatggaattggccgacatgattcttggttgcttgggcttacgctgctcctccgctcgtttgtgcactacggacacgaaattacattcttttagcagctggaggtgggtccagaagatgttgcctggatcacggggcagcttctgattgaattcctcgtgcgtcattgcgcagagttcctggccattcatttgccagtcgctcatgttgatgccaactagttcgaactgcttgacggcccactccagccagtacgtcacgtgtgcgtgtgtccattcgttggccgcctcgggtatcttcaggcgtatttgttctcgcttaaacttgctgtccaggacccaattcaagactggcttgacatccttgccctcgacggattcctcttcggagtcttccttgtgcatgcgcttgagtggggttttgatggggctttcgctggaggaactcttctggctggccgtttccggcggcgagagctggcccaccacctcctcggccaaggcagccagtgcggcctccgtgggcttcaggacgtcggcgatgttaatgcgcttgcgaatagtttgtatctgcacgttgatctggaccaggccttctcccttgacgcattggtccacgagattcttgtgcgattccagctgcaggagagtgggggcttaggtaaacattttattacgccgcagatagactcacctcctgcgcgtcctgcagccaaaacgtgtagtaattcaggcacactcctatcttttgctcaacaagtgatctgtgggtagaaatgagggttatttgcatgactaatgggggccagtcttcgccagactcacttgagcatgctgagcggctcccggatgtccatgtgcacgatgatgatgtcgtccggctccgcctccgtctccacatcgatgctatcctcgaacatttcgctggcaatcacttcttctgcaaattgtttacaattaataattcggtgtaacaacaggtgcgtcccaattgggaaatggcatcattccacttacccagggcaccgccaacgctgaggcggcgtattagctcgtccgacaagtcattgctgctgttcatcgcggcttaaaatcgcaaataactgcctatattaacaaaatgtttttaacaaatttgtctcgtggatttattgttgcatcttcagtgtgaccgtgtacgtcgggtgtggcaataccgaataatactaagtggcgttggtacagggctgcatagtcactggccagtattgccaccaattctatcagatttcaaaactctggcggttcttttaaaagtgataaaagtttcgaaaaaatgtaaatatgaatgtaagttagcaagtctgaaatacaatatttgctttaatgatgaaaaaacttaatagcatcatatatatttaaagaaaaacatcaattgttatttagttttaaaagaatacatgattttgttatagtttttactggcaaatattttgccagttttgaactattttcaagttcccttttcctgtgtggaaattcattgatcaaaaatttctttcatcaccagctattaatattttgagcctaacgatctataaaaattagcaatctggtgacaaaatgtgtgctcgccccctcaagtgatttcctagaaatgccatcgaaattaattgaggaattcaattcgcaacaacaagtcgatgcttaagacacccacttgtggttgagtggtttgctcttcatgcgatatcttttcgccactttctttcgctgcaagactcaattggccgacacaattggccatgtttgtgcgtcggcctgactaggaagcacttgggtgttcccacaggcaagtgaagtggccaagtgctgctcattttcagctaatgctgattaaatgccccgtaacacgatcagtgggtcaaaacggcgggacaatgaatgccaattgtgctatggagcagaggacagcctcaagtgcacagagtacttgttaacacaagcgtttttccatgtaccatgtaccgagatatggacaaagacggctcccggcctgaatagtccggagttgggagcattacctcatgctgttgactcagttggcatagtagatgaacgatatttgcttgcgaatatcttgctgatgacaatgtttgattttgatttcggtattagctataagtgattca

SEQ ID NO: 13646 - DNA, 1485 bp, DROSOPHILA
tcacactgaagatgcaacaataaatccacgagacaaatttgttaaaaacattttgttaatataggcagttatttgcgattttaagccgcgatgaacagcagcaatgacttgtcggacgagctaatacgccgcctcagcgttggcggtgccctggaagaagtgattgccagcgaaatgttcgaggatagcatcgatgtggagacggaggcggagccggacgacatcatcatcgtgcacatggacatccgggagccgctcagcatgctcaaatcacttgttgagcaaaagataggagtgtgcctgaattactacacgttttggctgcaggacgcgcaggagctggaatcgcacaagaatctcgtggaccaatgcgtcaagggagaaggcctggtccagatcaacgtgcagatacaaactattcgcaagcgcattaacatcgccgacgtcctgaagcccacggaggccgcactggctgccttggccgaggaggtggtgggccagctctcgccgccggaaacggccagccagaagagttcctccagcgaaagccccatcaaaaccccactcaagcgcatgcacaaggaagactccgaagaggaatccgtcgagggcaaggatgtcaagccagtcttgaattgggtcctggacagcaagtttaagcgagaacaaatacgcctgaagatacccgaggcggccaacgaatggacacacgcacacgtgacgtactggctggagtgggccgtcaagcagttcgaactagttggcatcaacatgagcgactggcaaatgaatggccaggaactctgcgcaatgacgcacgaggaattcaatcagaagctgccccgtgatccaggcaacatcttctggacccacctccagctgctaaaagaatgtaatttcgtgtccgtagtgcacaaacgagcggaggagcagcgtaagcccaagcaaccaagaatcatgtcggccaattccatatcgaccaattcagggggcagcctttcgcttgaacagcggattatgcggaaatcctatcagtcagtcaagagctctgattccgttgaaagtactacgtcatccatgaatccatcaaactacactaccatcggttccgggaataatggacaagtgcagctatggcagttcctactcgaaatactcaccgactgcgagcacacggacgttattgagtgggtgggcaccgagggagaatttaagctcactgacccggatcgagtggcacgcctttggggcgagaagaaaaacaaacccgctatgaactacgaaaagctatcaagggctctccgctactattacgatggggatatgatctccaaggtgtccggcaagcgattcgcatacaaatttgactgcgatttgaagctattgatcggctatgatgcgaatgagctatccacgctggtcagcgaggggaaaacggcgcccgagcgcgtagccgcaacggaaacaattacagaagacacgtga

SEQ ID NO: 13647 - protein, 464 aa, DROSOPHILA
MNSSNDLSDELIRRLSVGGALEEVIASEMFEDSIDVETEAEPDDIIIVHMDIREPLSMLKSLVEQKIGVCLNYYTFWLQDAQELESHKNLVDQCVKGEGLVQINVQIQTIRKRINIADVLKPTEAALAALAEEVVGQLSPPETASQKSSSSESPIKTPLKRMHKEDSEEESVEGKDVKPVLNWVLDSKFKREQIRLKIPEAANEWTHAHVTYWLEWAVKQFELVGINMSDWQMNGQELCAMTHEEFNQKLPRDPGNIFWTHLQLLKECNFVSVVHKRAEEQRKPKQPRIMSANSISTNSGGSLSLEQRIMRKSYQSVKSSDSVESTTSSMNPSNYTTIGSGNNGQVQLWQFLLEILTDCEHTDVIEWVGTEGEFKLTDPDRVARLWGEKKNKPAMNYEKLSRALRYYYDGDMISKVSGKRFAYKFDCDLKLLIGYDANELSTLVSEGKTAPERVAATETITEDT

SEQ ID NO: 13648 - DNA, 3668 bp, DROSOPHILA
catcgttttggccacgtgggagaaatgcaacgagctgagggatcccacatacagtcactttgtggatacgaaaaactacaatgtgggtatacataatacgtactaatgaaatgtgatacgaaaaccaaaccattcttagggcttcaagatgttcttctacatcgcctgctgcatgtatgtgctctatctggtgctgttgctactgcgggcgtacaccgagctgcgctccatgccgtactttggtgagacataatgcagtgtgctccaagcctgatcttattattataatgcttaatccatttggccagatatgcgcttgaagtttctcacgctgctcatgctgttcgtcctgtccatatccatcacggtgacgacgtgtcgctttggcttcggcatcctggaggataactttgtcgcctcacttaacaccacctatcgcagttcggcgcagtttatgtgcttctacggactgcttaacttttacctgtacaccatggcgtatgtgtactcgccagatggacggttcgcccaggcggagctggctgtcaccaaggataatccggctatttccatgatcgacgattccgacgaggatgttgtctacggttccgacgaggagtcacggcgaccgctcacctctgtgggcggcggtgctggaaagaacgattacgacagcgattgatcggcgattaagaagtatccgcggcagaacgaatacccaaatgttccatagcgcaattgaagttttagtgctaaatgtgtacaaagtattccctaatataatgcataaattaacttaaaatttcaaaaaattaatctctggttgatcaatgaaactggagaggatcgaaatatgtttgggtattcatgattaagctgaattcgaaatttatgttaaaaaaaaagtataaataaacccaatagttcgagttttgttgtatgaaaagtatttacaatcgatatttaccatattcgctttttaactaattgggttctgattattttactagactgtttattagataattaacacatttcgccaggtgatttcaactcgaaagcatagcaaaaaccctctagatgccctggttgatgcctattttcgtcttggtgaggagaccctcgtcgcccatgtctgcattgtagccaggacggtacttcatgccgggagcctgtgtgcaaaggggcagaattaatgtgaaaagaaatcgaacagggaaatggaaacaccgaacttacattgaaccagacatcacgccagactttgccgtcgtcagcgctgcgcaccagctccgggacatcgaaacgcggcacattgaagtaattcatcagatcgggcttctcatggcagtacttgatacgggcttcgcaccactcggcctccagcgggaaacgccagtcgagcatcttcttgttgtgaatatcggcctcaaactggttgaagtcgatgcgttcgatatcctccaccacaacctcagtctcaccgccggctgtccagtcgtagatgagcagctcggcatgggtggagatgtccttgaggtactgctgcttgtacagctgctccaaatcgctcaagtaggcatcgctgaacacctttgactgcacctcgtagtccacattgcgtgccttgatctgcttcttcacggcatcgaccggcagatccaagtagataaccaaatgcggcttcagcagctccccgatggtgttctgtcggagctcattatacacggaacgcgcaccgcgtgacagataaccctgccgaaacatggcctccatgaagacaaagtccgagtaggggctgcgctcgaggacaacaccctggccggtgctaaggacgtgctgcagggcatcaatgtactgcgaatagcgcagcatgtacatgcgaatctggaactgggcagccagatcgtggctgggatccaggcagaagttgcgcacatcgtagcttcggcagctgggcggcaactgaggatccaacttcctcatgtcatagccgtacgaattgatgtagattaggtccagatcaactgccggatagtactccatgtccagctcctcagccagttccttggcgaactttgacttgccggccgcgatgggtccctccacacagatcaccttggagttctcgtcaaaacgcttggaggtcttgtcgaaaatagcattgaacacgctgtacttcttcgtcttgtacggatagggggcggccttgggcacccgtggtccacctcgcatcgtcttgccggagatgctgcatcgctgctggaaggcagcaggcagggcattcgtctgcgcctggagtagattgggcgactgtgtggcgcggctgacgagccgcaccagtcctacgcggaacacggcggtcattctgaagggaaaacaagggtcagtacaaaaacgaaacaagataataacaattatatctcgtccagtggcaatttgtcgtgtggttacatcacaggagctacgcaggtagtgcggtaatctctgccctagaactgcagatatgcggatcttttcgttgcattctgctggccagcattgcggcgctccatagatttacccaaattgtcggttttaatgctctatccggtggtatttactcacttttcaatctaaatatcggaagtctacccaaaaacaaatttcgggctatggttggtgttggaaaactccccgaatagggctgtcaaggtatccgttcaaatatcaaaaatgtaaaatcaaaatgtttgtctatgctttaactgcgacttttctcagaatcagaaagaatttcatatgaaatgaaatttaacccagtattttaaaaactttatataacacttacaaaataacattttaatgtataaatgtatttgttttactttttaaaaatatcgcaaagcgactgctcaacactacacagcacagctggggtgtttaactacaagttaatttacttgaaataaattcaacaatgcttttcatttgtagacagacacacaccataaactcacattgccgtgcggtgcgagttgattttttaaatttttaacttaacatattgtcacggtgcagaaacaactggtccactttccgttggtctggcagccctgaccacaacctcgctgcattttgggctcaaaagttctaacgatgaactaacgaaaatataaatcaaaatttaaggcgaaaggctccaggagaagatcgacaaatatcgagagttgtgaccattaggatcgagtaagtcctggcgttggggcccagcactgggagtgtaacccactccttacagttacgcaactgagaactaatgcgattttcctcgtgacacagattttgttattaaccaatccccagcagaaatgggcaatacagccatcacccgagtgcaaatggaggccacgaagagtgtgccggtggaccacgccaagtacatgagcggcagtggtgccccgccaccagaatgccccatgcatcagaagcatggagatgcaaaatcggcctccgccgtacccccacatcccaagatgcaggccgcttccgaatgtccggtgcagcacgacaacagcgacgttaatccgctgaatatgatgccaccggcaaaccaacagccggcggcagatcagccctttccactgcccaccgaccgccagacgtcgaccattcccaaagtcaccgag

SEQ ID NO: 13649 - DNA, 1362 bp, DROSOPHILA
ccaacaccaaccatagcccgaaatttgtttttgggtagacttccgatatttagattgaaaaaatgaccgccgtgttccgcgtaggactggtgcggctcgtcagccgcgccacacagtcgcccaatctactccaggcgcagacgaatgccctgcctgctgccttccagcagcgatgcagcatctccggcaagacgatgcgaggtggaccacgggtgcccaaggccgccccctatccgtacaagacgaagaagtacagcgtgttcaatgctattttcgacaagacctccaagcgttttgacgagaactccaaggtgatctgtgtggagggacccatcgcggccggcaagtcaaagttcgccaaggaactggctgaggagctggacatggagtactatccggcagttgatctggacctaatctacatcaattcgtacggctatgacatgaggaagttggatcctcagttgccgcccagctgccgaagctacgatgtgcgcaacttctgcctggatcccagccacgatctggctgcccagttccagattcgcatgtacatgctgcgctattcgcagtacattgatgccctgcagcacgtccttagcaccggccagggtgttgtcctcgagcgcagcccctactcggactttgtcttcatggaggccatgtttcggcagggttatctgtcacgcggtgcgcgttccgtgtataatgagctccgacagaacaccatcggggagctgctgaagccgcatttggttatctacttggatctgccggtcgatgccgtgaagaagcagatcaaggcacgcaatgtggactacgaggtgcagtcaaaggtgttcagcgatgcctacttgagcgatttggagcagctgtacaagcagcagtacctcaaggacatctccacccatgccgagctgctcatctacgactggacagccggcggtgagactgaggttgtggtggaggatatcgaacgcatcgacttcaaccagtttgaggccgatattcacaacaagaagatgctcgactggcgtttcccgctggaggccgagtggtgcgaagcccgtatcaagtactgccatgagaagcccgatctgatgaattacttcaatgtgccgcgtttcgatgtcccggagctggtgcgcagcgctgacgacggcaaagtctggcgtgatgtctggttcaatgctcccggcatgaagtaccgtcctggctacaatgcagacatgggcgacgagggtctcctcaccaagacgaaaataggcatcaaccagggcatctagagggtttttgctatgctttcgagttgaaatcacctggcgaaatgtgttaattatctaataaacagtctagtaaaat

SEQ ID NO: 13650 - protein, 407 aa, DROSOPHILA
MTAVFRVGLVRLVSRATQSPNLLQAQTNALPAAFQQRCSISGKTMRGGPRVPKAAPYPYKTKKYSVFNAIFDKTSKRFDENSKVICVEGPIAAGKSKFAKELAEELDMEYYPAVDLDLIYINSYGYDMRKLDPQLPPSCRSYDVRNFCLDPSHDLAAQFQIRMYMLRYSQYIDALQHVLSTGQGVVLERSPYSDFVFMEAMFRQGYLSRGARSVYNELRQNTIGELLKPHLVIYLDLPVDAVKKQIKARNVDYEVQSKVFSDAYLSDLEQLYKQQYLKDISTHAELLIYDWTAGGETEVVVEDIERIDFNQFEADIHNKKMLDWRFPLEAEWCEARIKYCHEKPDLMNYFNVPRFDVPELVRSADDGKVWRDVWFNAPGMKYRPGYNADMGDEGLLTKTKIGINQGI

SEQ ID NO: 13651 - DNA, 5349 bp, DROSOPHILA
tatggctagacagccatccctttcccactcgcagcgacaaacgcataaaactaacgcagcgtaaacgccgccgttgttctcatctgtcttctcgttacgttatttctttttggcagcttcagcagaaaatttatcttattttatttgtttgactgaaagccaacacacaaacggatgccggcgaaattgctgcattttgatgcttgactgattgtccccacaaaacatatacatatctttcatttgattcccctccttctgaatggtttctaacccaattacgtaacccaattcttagtaagaccagcgtaggcggccaaattgatctggcaacgctctgcgtgacatgtgccaaaagtatcgagtgcgaaggagatgactattgtaggcgtgcggaatatcattctttcattcttcttctccgaagaacgcttgacgttgccgcttcgcaagagttcgcttaagtcaaataatccaaaagcatcctgcatccaaaaaagttttagtttttgctaaactaaagccaattgtgtcttgtatttagtgaaaaagatctgaataagatatggtggtgggtgtataaaagaaaatagaaaaaaaaaattttaaatttgtgagcttgaaaatataatgcacaaagtgttgcaattgcaacgatttcaattggtttcaggttctagtgtcttattcttggcaagtgtgtccaagaagtgcccgaaaaagtgtccataaaagtgcggaatttaccaaagtaaaaatggtttttaggttaggtgtccctgaaaagttattcttggtgaagaattacttattccacgcgtgagtttttggcgaactgaaatttgtacttcaaactaccacatctctcccgaatccgcaagactaattcataataattaataattttccatttcattgaactaattgttaacaccatttttgttttaattactttttatttctatgactaatcttagatatattcattttatttaattgcagtcccaaaagtctcgccagatagcgaggaagaatcccaggccacgcaggctggatatcttgtggccagggttgccgaggccttcgcagctgcaagagcagctagcccaatcccaaccagaagcctccaatccgcaggagaagccgccgctaaagccgcaaaaagttgacctcatgacgatggcagaaggcaccgaccccatggggcatggtcaccacacgaatccgcacaatccgccccagcagccgccgcagcaccatccgcaccacctgcccctgccccatcccccgccggcaccaccgccgcagctactcaatttcaatcaccaccagcagcagtatcttccccacatgtatcctgcggcagcggcagcggcacaatctcactcccactacggtggcctgcagtatccccatccacatgcgctgcagcatcagcatcatccccaccagcaccagcatcacttgccgctggccttgagcctccatcagcaggcggctgcggcggcggcagtggctgcagcggtggccaccaaccactccaacaataacaatcaggccagcgtggccaacaataatatagtggttccatggaagcagcgcaagcgcaagaggctctcagcggtgctggacaagctgcaccacaataataataataataataacaacaataatgagacccactccaatggcatggcctgcaaggcggaaccgatggaaatgaagggggatctagccgaagatgccgaacaggatgaagatcatgatgggtccgtgcctgatgaggaagatgattccgtagatcaggatggtgatgctggcaagtacatcaagagcgagcagcccgtcagcgaggacgaggagaacgaacaggaaatggaccaagatatcgaggacatttccggcgaggatctcgagctgtcgcacagcgatgataatgaccaggacgacagccccaggatcagtatgagtcctctgcagctgcaggccgcccagagcaatctgccccaagatcagaaccagccgatgaacaaggagaatccgcttcatgtggacatcaagactgagatccccagcccctatgataggtatttccctataccatctcctctgttcggctattacctgcacaccaaatatctgaatgaggtattccgccggcgtcatgatctctatccctcgcctctgcagcacactccatcttccatagcctccgaaacggagacttcacccaatgctcaggagcgcaagagtagctccaaccacgtcttgccccacgctctgttggccaataattcacctccgccatcgctgccatcgccaccgcgcagcgaatcctcggtgactaacaatgtggccaccaccaccactagcagcaccaccaagaagcgcagcagtcccaagcccaagggcaagaagggtgagaagaagccaatgccaccgccgcaagagcgtcccttggatctgtgcatgcgcaacgaagtggagcccaagaagtacaaaaagtcaggctcgaaatcctctctagagtcccgttccgccggtatgatgccgccgccgccggctctgagtgcggccagcagtttggagagcatgagtgccctatcaccggcatcgagtagccactcgggtcacatgcccatcaccagcgctgccacgcccaaccaccagccaccacccaattccccctatgccaatgccatgaacgctgcccatgcagcggcagcagcggcggcggcagccatgatcaagatggagatgcctttgcatccgctgcaccaccagcagatgcatcactcgcaagtgcccaccaccacagtgggtgtgccggtgatcaagggcgatgtggcctcgcccacaacaaaggaaacggtcgcctggcgttacaatctggacgtgtcgcccgtggttgaggagatgccgcccggttcggatgtggcttatgtatgccccacctgcggacagatgttctcgctgcacgaccgcctggccaagcacatggcctcgcgtcacaagtcccgcaatcccgccaatgatattgccaaagcctattcctgcgatgtgtgccggcgatcctttgcccgctccgatatgctgacccgccacatgcgcctccacaccggagtcaagccgtacacgtgcaaggtgtgcggtcaggtcttttcccgctcggatcacctgtccacccaccagaggacccacaccggcgagaagccctacaagtgtccgcagtgcccgtatgccgcctgtcgtcgcgacatgatcaccaggcatatgcggacacacacgcggtacgattccaggggaggatctcgagaaggcagggaaggacgcgaaggacgtgagggcaaggagagccgcgattcgcgcaggagcaacgaacgaatcgaggagcccaactcgcccggttcccattcgctgctggacatgaagatgaacatgaacatgggcatgggaatgggcctcaatatgggcctacccatgaatccgatgagtctactgcaggaggaactgctgcagaagtcccagccgggcctaaccctgggtggacccatgccactggttgtcaagacggagagcgcctaacggtgtctgtatgcagcagcatccagaccatttatgacctgttaggtaaaatccagtccatccaatctccatttgacaggcccagcttagtgctacagaaaaatatctgaaaaaaaaatagagaaaagaaatgaaaacatattaaactagagcagtttgtacttgtaccggaaatctctgcgaagactgaggaaccttaatactacctacagtttaaataataggctaaagaaccatcaactaattttgtaaaagaggagttagagggcagcactcatatgaccacccaacgtattagaagtttaactagttctagttgctagatcctttcgcgcgtcaaatgaacccccaggagtttagatagccaggatcttcgatacagctagcaattccatgttccacacctaggctatactacactatatatagatatatatatatagatatgggtcagatccatcgtcccgatgatctgatctctcagcattttgagcaacgttgaaattactaagttagactcgctacttaggcttcataggcacgccgcattggaaaaggcattacttttgtactcctaattttaattaattcttaatttatttgtaacattactcagcagaatgtaaacttataccacaacgatttgtattaatttaattttaccttatttaatatttaatttaacttagttttaagggatgcctgcctacacaagaacacaaacaaaagacaaagaattctccctagggctcaaaaagaaaaaagaaacgaacgctacacaaaactcatttctatggaaatcttaaatctttaatggaaaagaaagacaaaaagaaacaattcctttttttgttcaacaaaaacactgttaaatttacattacctttgtaattgatttaatgcttgctcttctattatctaaactactttttgttttcatgaaatgaaataaaaacttttaagttttctttagtttataaaccatctggggattggaaacacctcacccccttccgctcccgcaagtggggacacgttaacccgtttctgcccccgggggtgggaatcacctcacctttcgtggtcgtttacatgtttcaagttaaagttgttcgttatttattataaaaagaaatgaaacaaagccccgactcccgattattgattattagttcttagctaaacgtttaaataaattattaatttatgttattctagttggttatgattagcacttagttaaaaacgtttttcacaaaataaaacaaaacaaagtctatacatgatggacaatgtcatacaaaacagaatttaaagccaacgtaatttgttattatttcaattggttatatatattattttcagctggataatttaaattgagttgcacatttctatgcttatcggatttcttttcttttgtatttcataaactctctttagtattttgatttaatcttggatttgttatacattctatcaatttagtacacacataaaatttaaattcttgcacttccataggagcttgaaaaatattcaagcatatcctttcaacggctgcccacctaatttggttattatttcactgattagcagtgtggattttttagacatacatttttttacgagccaaaaccctatactttcgccacagtttttgtggggctgagccggagacgaagtcgttgttttagccgtagtcgcagccggagccggaaactggcttacaagcttttaggcaatgggaatcgcttacaaggc

SEQ ID NO: 13652 - DNA, 3349 bp, DROSOPHILA
agtcccaaaagtctcgccagatagcgaggaagaatcccaggccacgcaggctggatatcttgtggccagggttgccgaggccttcgcagctgcaagagcagctagcccaatcccaaccagaagcctccaatccgcaggagaagccgccgctaaagccgcaaaaagttgacctcatgacgatggcagaaggcaccgaccccatggggcatggtcaccacacgaatccgcacaatccgccccagcagccgccgcagcaccatccgcaccacctgcccctgccccatcccccgccggcaccaccgccgcagctactcaatttcaatcaccaccagcagcagtatcttccccacatgtatcctgcggcagcggcagcggcacaatctcactcccactacggtggcctgcagtatccccatccacatgcgctgcagcatcagcatcatccccaccagcaccagcatcacttgccgctggccttgagcctccatcagcaggcggctgcggcggcggcagtggctgcagcggtggccaccaaccactccaacaataacaatcaggccagcgtggccaacaataatatagtggttccatggaagcagcgcaagcgcaagaggctctcagcggtgctggacaagctgcaccacaataataataataataataacaacaataatgagacccactccaatggcatggcctgcaaggcggaaccgatggaaatgaagggggatctagccgaagatgccgaacaggatgaagatcatgatgggtccgtgcctgatgaggaagatgattccgtagatcaggatggtgatgctggcaagtacatcaagagcgagcagcccgtcagcgaggacgaggagaacgaacaggaaatggaccaagatatcgaggacatttccggcgaggatctcgagctgtcgcacagcgatgataatgaccaggacgacagccccaggatcagtatgagtcctctgcagctgcaggccgcccagagcaatctgccccaagatcagaaccagccgatgaacaaggagaatccgcttcatgtggacatcaagactgagatccccagcccctatgataggtatttccctataccatctcctctgttcggctattacctgcacaccaaatatctgaatgaggtattccgccggcgtcatgatctctatccctcgcctctgcagcacactccatcttccatagcctccgaaacggagacttcacccaatgctcaggagcgcaagagtagctccaaccacgtcttgccccacgctctgttggccaataattcacctccgccatcgctgccatcgccaccgcgcagcgaatcctcggtgactaacaatgtggccaccaccaccactagcagcaccaccaagaagcgcagcagtcccaagcccaagggcaagaagggtgagaagaagccaatgccaccgccgcaagagcgtcccttggatctgtgcatgcgcaacgaagtggagcccaagaagtacaaaaagtcaggctcgaaatcctctctagagtcccgttccgccggtatgatgccgccgccgccggctctgagtgcggccagcagtttggagagcatgagtgccctatcaccggcatcgagtagccactcgggtcacatgcccatcaccagcgctgccacgcccaaccaccagccaccacccaattccccctatgccaatgccatgaacgctgcccatgcagcggcagcagcggcggcggcagccatgatcaagatggagatgcctttgcatccgctgcaccaccagcagatgcatcactcgcaagtgcccaccaccacagtgggtgtgccggtgatcaagggcgatgtggcctcgcccacaacaaaggaaacggtcgcctggcgttacaatctggacgtgtcgcccgtggttgaggagatgccgcccggttcggatgtggcttatgtatgccccacctgcggacagatgttctcgctgcacgaccgcctggccaagcacatggcctcgcgtcacaagtcccgcaatcccgccaatgatattgccaaagcctattcctgcgatgtgtgccggcgatcctttgcccgctccgatatgctgacccgccacatgcgcctccacaccggagtcaagccgtacacgtgcaaggtgtgcggtcaggtcttttcccgctcggatcacctgtccacccaccagaggacccacaccggcgagaagccctacaagtgtccgcagtgcccgtatgccgcctgtcgtcgcgacatgatcaccaggcatatgcggacacacacgcggtacgattccaggggaggatctcgagaaggcagggaaggacgcgaaggacgtgagggcaaggagagccgcgattcgcgcaggagcaacgaacgaatcgaggagcccaactcgcccggttcccattcgctgctggacatgaagatgaacatgaacatgggcatgggaatgggcctcaatatgggcctacccatgaatccgatgagtctactgcaggaggaactgctgcagaagtcccagccgggcctaaccctgggtggacccatgccactggttgtcaagacggagagcgcctaacggtgtctgtatgcagcagcatccagaccatttatgacctgttaggtaaaatccagtccatccaatctccatttgacaggcccagcttagtgctacagaaaaatatctgaaaaaaaaatagagaaaagaaatgaaaacatattaaactagagcagtttgtacttgtaccggaaatctctgcgaagactgaggaaccttaatactacctacagtttaaataataggctaaagaaccatcaactaattttgtaaaagaggagttagagggcagcactcatatgaccacccaacgtattagaagtttaactagttctagttgctagatcctttcgcgcgtcaaatgaacccccaggagtttagatagccaggatcttcgatacagctagcaattccatgttccacacctaggctatactacactatatatagatatatatatatagatatgggtcagatccatcgtcccgatgatctgatctctcagcattttgagcaacgttgaaattactaagttagactcgctacttaggcttcataggcacgccgcattggaaaaggcattacttttgtactcctaattttaattaattcttaatttatttgtaacattactcagcagaatgtaaacttataccacaacgatttgtattaatttaattttaccttatttaatatttaatttaacttagttttaagggatgcctgcctacacaagaacacaaacaaaagacaaagaattctccctagggctcaaaaagaaaaaa

SEQ ID NO: 13653 - protein, 801 aa, DROSOPHILA
MAEGTDPMGHGHHTNPHNPPQQPPQHHPHHLPLPHPPPAPPPQLLNFNHHQQQYLPHMYPAAAAAAQSHSHYGGLQYPHPHALQHQHHPHQHQHHLPLALSLHQQAAAAAAVAAAVATNHSNNNNQASVANNNIVVPWKQRKRKRLSAVLDKLHHNNNNNNNNNNETHSNGMACKAEPMEMKGDLAEDAEQDEDHDGSVPDEEDDSVDQDGDAGKYIKSEQPVSEDEENEQEMDQDIEDISGEDLELSHSDDNDQDDSPRISMSPLQLQAAQSNLPQDQNQPMNKENPLHVDIKTEIPSPYDRYFPIPSPLFGYYLHTKYLNEVFRRRHDLYPSPLQHTPSSIASETETSPNAQERKSSSNHVLPHALLANNSPPPSLPSPPRSESSVTNNVATTTTSSTTKKRSSPKPKGKKGEKKPMPPPQERPLDLCMRNEVEPKKYKKSGSKSSLESRSAGMMPPPPALSAASSLESMSALSPASSSHSGHMPITSAATPNHQPPPNSPYANAMNAAHAAAAAAAAAMIKMEMPLHPLHHQQMHHSQVPTTTVGVPVIKGDVASPTTKETVAWRYNLDVSPVVEEMPPGSDVAYVCPTCGQMFSLHDRLAKHMASRHKSRNPANDIAKAYSCDVCRRSFARSDMLTRHMRLHTGVKPYTCKVCGQVFSRSDHLSTHQRTHTGEKPYKCPQCPYAACRRDMITRHMRTHTRYDSRGGSREGREGREGREGKESRDSRRSNERIEEPNSPGSHSLLDMKMNMNMGMGMGLNMGLPMNPMSLLQEELLQKSQPGLTLGGPMPLVVKTESA

SEQ ID NO: 13654 - DNA, 4932 bp, DROSOPHILA
tacaaataacttccttgaacgataccctttcttggaattatgcgatcaaaaaacttaccaagaacctttgccatgcaaactggcattcctcctcgaactcagataagccagaggtgtgttcaattgtgggtgtcgatgagtcagcgtcgcttttcccagtagtaaccccaatctctggattgattttttgtgtagcaggtgatgatgtgcttactggtacgcccagagccacgcccatcaaatacaggagcagtgggacgccaagtaaaattcgagctgaggtcatcttgaacacttttctcgtactgcgctccgcactgccagaatcgcgaattatatggggaatacatacatatataattgcaagtactcaaaatcagctgcattcagagagaaatctaaataaaaaccgacaacgagagcgatttcttttgctctcttttctcttaagtgttgatcttttaaaagagtaactgcatttacgtgaccttgcccaccaaatatataacaactggcataattgctttatgatttgttgcaatagtattgaattaaattaatttgaaatttaagccccgtttttatacccattactcggcgggaatactaggctcgttgataggaatgtaacaactacattctagatatgtatgtgttttccacacaaatgctgtaaacaaacgttacgctgcttgcagctttttctgattaacgggtatgcattagtcgtgacacccgactgtagcgttatttcttgtttatattaaatttgtcgcaaatttacacggttatacggttatgtgtgcattgttcattttctatccactttgccaaattgaaatttattactttctcaaacaacttcccacacagcgttgttcttcattaagaaaatgtttctcaaaaaataaataagaccgaaaattaatttttgtgtgcatagccgttaagactacgatccaatttctcagaatttccccagaaagcaacacaaaccgataaggcacttgtttcatttattaaccgcgtgactcatggaatcgatgtggtgacccacacagcttacgactacagtaacaaagttataaattcgtggtttttaattgactatactatctaactaattgcatggcgcagttgtgagcctacagaatggggtagctgcactcgctggcgatgccgcagaatccacctgcattccggaggatgcgcataaagccgccctcgccccaattctgagagtacgagttcttgatgatccagtagtcgcgtccattttccgttccatagcccaccacggttaccgagtgattcagttcgccctgattgcactcctcgtcctcgtagatgccaccgctgtactgctcaaacgaaatggtgtccgcgttcatggagcacgccaacggtcccaacgtggcaatcacctccttcatcttctcctcatccccgggagtaatggtggcataatcgcgaattttcaccagactctcgcgcggtggacgtccggcggtttcgttctgacggcactgcatctccgtctgtgtgtacggatatttgttggccagcgttacaccgtgatcgcgtatgtactcgaaaccgtactcctggaagccaccgtcacagcccatgttgccgtagtcatcggcacagtccaccagattctgctgcgacagcgaggccagcactccagtccgccggaatagatgtccttcgagcgctcctgtggtggcgaacgaccagcaggcaccgcatcccacaccctggaatcccggtggcgtcactccgcccttctcgcgccaatcgaacatctcgggaagattggcactcgccggattcctggcagtcacaaagttgatatggccattcgtatatctcctgcaaggtaagtaaaacattttagtattccgttaagcaaagattaaagcaaattagtagcttacttaagtggcaaccagactacatttaaatgttattcataatgttcttaaatgtatgacaaacaaccgataagttatgaaacatttgttatggagcttcgtcgtaataaataagttcgatatggaagggttttgtttgtttccacccatttggttatagttttcgggaaaccacaaacctatggtcggaatatttgatcaattctgatttcttgattagcataaccgggaaaccaatcggcacctacgtaacgttacaaatcatatggacgacgataccgaaacccgtttgaaagttataagctgggtgataattcgtttatggccaaaaaggggacttcccccgagctctagatatgcgtaagatggtgctacttactcgccaaattcggagattttggagcccagcaaggtggctatctcctttctggtcatgtcggccagcgtattgacgcccagccggaatccggacacgccgttgtcggcgttcttattgctcagcgtgatcagcgacatcttggccgcgaagatgctctcgcgatagactcgctcctcatccgagtacaccttgcccgtctgccggaggaagtcgtcgaagttttgcacatcgcagagcttgggaaacgactgcagttgctgcaatgacacagcacccagcagggccagtcccagcgtcatctgcagccacatcgttgagcacatccgcatctggaacggtggacagcagagcgagtggaaagcgttaggtaaccacttggccaatacatagttacaccatcccatcccatctcatcgcatcccgcgaccccttttcatgccccttttcttgccacatctatctgtcaacgttaatcacttggccgcaactcgacccgttcattcacctccaatcgaaccaacctgccgtgcagatcgtgaagtttcctataagtggagccgctataaatatttatttatggacatattaaaagcaacgttgcttcctagaaaatctgcacaatttgaaaacaggccacactcaaaatctatgcgtttattcgatattaaaatgtttatccagtagatactttttattggtaaatattcagtggagtgtcttcattgacataagaaatgatgttatgtctttttgagtaatttgagtaagtacaatgtttggcaaaaccaaaataaaacaaagaaactaataaattgtttgtttaacaagcttggttttgaagaaactaaaccgtttaatgatcgcctatgcagaaatcaacattgtttctaagacaatcaaaaacataatgatcgattaaacgaataaaaaactaattattattggttttttctatcacgctgactatccgcttctgtcagcaatcgcgttaatgggtaattaatcatgcgctgtcttaatttctcaactttattcgatcttaccaaattaaatagacttttgaaactagcagagcattcgctgttcgtatttccggtctgttttacgaattcgatcaccgatgagacgtgaataattactgggtgaatgagctaatttgcatatgcttagcataattacattagtgcaagcattcgattcggatgaatttcgaaatgtatgaatgatttcgcggcttcgtctctccttttatttcctcagctcccaaattggctccatcgagggcccaaataaatcaaaatcaaatctagattaggcaaccgcaggctaagatttcactttcgttgccataaaatactgatcacatgctgtgcccggtgaaaggcgatggattcccctgtttaaaatcaaatttcgagtcgaatgtaagcaattgcagttctcttgtcttcgacggaccattatgaatcgaaaaataacaacacacacgacacaatatgttgaaaagatcgacttaatcaccttttatggatatctgggaatgatatgttcaaaacaccttccgcgttcacaaatcacaaaactattcgaagatgctgaagactcgaagaccggcgagattataagcggcgctcgacccgcacaccttggttttatagagtctggagctggaccgtgggacatatggccaaaactggatgggccaccaatttgaaacttttggaataccgacaagagcatattcatcttcatttcgacgggctatctggtttatgggtctatagctgtctccattatatgcatgcttagtaattgtcgattgcctaatgtgttggtggctataacaacgcatattaactcatttgaaacaaaagagaaaatagtcaaacatgtttttaaatagttaataattgatgagatcgaagtcacagttgtagcgcctataggattacaaatttcaatgcagcaagcaaagttttaggaaagtttttaaagcgtctctaagtagtttgtactattatatcccttgtaaataaataacactttgatttttatgtaaataatacaattacagaatgataaagatgcagacggatgaataatggtctcgactttcaataactataaattgaaattgaaccatgaagagattgattagtggccaatttatttgcatttcaattaacagattcgtggaatctgaatttgttgttgcgtctactaaaaagttcattgactgctgaaatcccttatggacttacctacatatttgcaaaatttcaagatgatccctcattactacttcgaatatatactacctgtagtatatgctagactaccgcaatggaaattaccaaacaactcacttagcacttggtttacagcaatttggccaagtcttccaacgggcctatctatctatctgtctatgtatctttccatctacgtatctatctatcaacgctgttgcaacttttatgggcgccacaaagtatgactgtgattaatcatgcctgcgctgaagacaaaacctgaagactaaacgataagttggcattagaggggcgtttacgatgctccatgggcatatgggcttgggtgtttttttctgaactg

SEQ ID NO: 13655 - DNA, 1243 bp, DROSOPHILA
cgccggtcttcgagtcttcagcatcttcgaatagttttgtgatttgtgaacgcggaaggtgttttgaacatatcattcccagatatccataaaagatgcggatgtgctcaacgatgtggctgcagatgacgctgggactggccctgctgggtgctgtgtcattgcagcaactgcagtcgtttcccaagctctgcgatgtgcaaaacttcgacgacttcctccggcagacgggcaaggtgtactcggatgaggagcgagtctatcgcgagagcatcttcgcggccaagatgtcgctgatcacgctgagcaataagaacgccgacaacggcgtgtccggattccggctgggcgtcaatacgctggccgacatgaccagaaaggagatagccaccttgctgggctccaaaatctccgaatttggcgagagatatacgaatggccatatcaactttgtgactgccaggaatccggcgagtgccaatcttcccgagatgttcgattggcgcgagaagggcggagtgacgccaccgggattccagggtgtgggatgcggtgcctgctggtcgttcgccaccacaggagcgctcgaaggacatctattccggcggactggagtgctggcctcgctgtcgcagcagaatctggtggactgtgccgatgactacggcaacatgggctgtgacggtggcttccaggagtacggtttcgagtacatacgcgatcacgaacgaaaccgccggacgtccaccgcgcgagagtctggtgaaaattcgcgattatgccaccattactcccggggatgaggagaagatgaaggaggtgattgccacgttgggaccgttggcgtgctccatgaacgcggacaccatttcgtttgagcagtacagcggtggcatctacgaggacgaggagtgcaatcagggcgaactgaatcactcggtaaccgtggtgggctatggaacggaaaatggacgcgactactggatcatcaagaactcgtactctcagaattggggcgagggcggctttatgcgcatcctccggaatgcaggtggattctgcggcatcgccagcgagtgcagctaccccattctgtaggctcacaactgcgccatgcaattagttagatagtatagtcaattaaaaaccacgaatttataactttgttactgtagtcgtaagctgtgtgggtcaccacatcgattccatgagtcacgcggttaataaatgaaacaagtgcctt

SEQ ID NO: 13656 - protein, 235 aa, DROSOPHILA
MRMCSTMWLQMTLGLALLGAVSLQQLQSFPKLCDVQNFDDFLRQTGKVYSDEERVYRESIFAAKMSLITLSNKNADNGVSGFRLGVNTLADMTRKEIATLLGSKISEFGERYTNGHINFVTARNPASANLPEMFDWREKGGVTPPGFQGVGCGACWSFATTGALEGHLFRRTGVLASLSQQNLVDCADDYGNMGCDGGFQEYGFEYIRDHERNRRTSTARESGENSRLCHHYSRG

SEQ ID NO: 13657 - DNA, 6213 bp, DROSOPHILA
cgaaaaccgccaacgtatactagcccctttatgcattcaattgagtattcaacttaagttctaatgtcggattcgccccatgaggagcaccgcttgtgcggtctggggaatcacacgctgaggtccccgtaccgcgtaatcagaaatccgcacctgctgaagtttggccagctgataaactcggagctgcggtctcagccactgtgcctctcgtgctacacgcaactgatccagctctaccggctgaagaacaacaatgcgaagagacacctggcaaatagacaggcagccagtgctattctctcgaggagcagtagtgagaaatctcatgagtccgcggctagtgtgtccacaacacaatcctcggaggagcaagaatcaaccactagcgcagcgccggcggcggcggctcaaagagcaggaagccagttggttgagtccaattcttccgacgatacacttttctccgatgactacgatcccagctcgaatctgagtttgaatgccgtgaatggaacgcggctaccgaatgtccaaccaattccgaaaaggcgccagtttgtgcatctaaatcgtgaagctatggccatttatctggcgggaactactgggggataatgtttgtttcatttaggatattttcataaattaaatttgaaataacactgttaccatctatgtaaccatctatcgatagtttccgccatgttattagcagcagaaacagctggctgagcaccagggctgcattattgtttgttagttttgctgtttggtttttaacaaatttcctggttttccctcaaaaaccctctcttatataaataaatcaagtgcaaaatgctgagtccataacaacacacgtaagtttgttggcaagcagtgagtgatttcttcgaaaagtgcaattcctgcaatctgttatgttttcacaatgacttttattcgatcttaatctaaacagtttaaagctcaaataaatgtaatcaattagcaagtattagcaaatgttaataggcgttgttgtttctcgacgtcgctgctgctgctgctgttgttgttgtttttgttgttgctggcgctggaactggtcatcgatgtcgatgaaattggcatcctgcgtgttatccttgggcagcgctgccggcgtcgctgccgcggcatagtagtttaggcccacgcccaccgccacgcccccagtgacgcctccggggggcatggtcgtggcagcctgacccattatagagctcataaaaccattggccacgacaaagtttctgaaaaattgattacatcaatgtacaaaataatttcgagcaaccccctccggcccaaaaaaaaaaaaaaaaaaaaaaaaaaaatatggaaaaaaatgatatcgtctaattgggtctgtgtgcgcataaatgtcgtaaaattaatttcgtgttaatttcatgttggccatcaattaaactagtgacatttcactaaattacttccgtttcgaaaatgcaggtataaatacccagttaaaatcctcttcacgagctattcatcaaccattaatttatgttcatttaatattatttaactcaatcaaaatcgatgatatctttgtacatatgaaacagaaaaaacgattcaaattagctaaaggggaaacccacctgtagtgctgatcgatctgagccttttcaatgcgtttgtccttggccctgcgattctggaaccagatcttgatttgcgtttcggtcaggcgcagcgtttcggccagctcgaagcgacgactcctggagatgtactcgttccgatggaactccacctccaggcgaagcgtctgctctgtgctgaaagtggtcctctggcggcgttgtcttccctccttgcgtcgcctgcgagccactgaaagtcaaatacattgatatccttacaattaatacgtgtataatatctagttggaatcagcttattagttatgtaaaccccgcaccattcagtgtgtacaataacgacatccgtcggatagcatcattttttcacagcccacccactttcgtttatgtccaacacaatggagatgttagagcgaaattaatcttacattaacaaaccatcaagttatgagcgggactaaacgttttcgaatgtggttgcgtgtcgctgcgtcagttaaacaaataattaaccactccgatccgtggtccatccgtcgtcctccctctcttgctctctccgcccgcccacctgccagaattcgtcgtcggtcgcgtttgtggtgcacattaaaagtgcatttaccacgtagtttctgttctctatgtttttttttttaccacgcttttcatttcggcaatctatgctgatccgggaaagttataacaatgccaacagctggctggccatcatcatcatcatcatcctcgtcgaaattctcggcatcatccgctctttcgagttttccattctgtcgtttgattgtttgcattcgcagtgtcgccgacgatgaagctcaaccaagcgcacattatgccccacttcatcctgcaacaacgagcacctgccacccaggaacacccaccacaaacacccacaccatggtgaatgttgcggtttagagtctaattgatgtaacaaggcgaagctgacaagttgctcggtggtgttaggatggtgggggggggggagggggggtttccccgggaaggggttgctttgtgggcgttgtaatctctagcttttgcttgattacccctagtccggatggctctggaggggcttaagctcttccctgatccttgccgaaggtttttttttttttttaaatcacgtgtgtaattcgatagccaagtgtcctttcggacggtttgttgtggctaaaaatgagtcttcctcgcttaaccctcctcgcttgctgtttgtgtttgcttttttaggtttcctgccgagctcaattacaatgctaattttttcagacacttgttatttttttgagattgaccaaaagtttggcttgtaagttagttaatttaaagatcaagtacttatagtaactaccaagctggtttagcattaaatatatcaactgttctgaatctaaaaaatgcttgcatatgtagaatacgtttctgctcgtagaaaaggtttcaaagtgtctttaactttgatttcttgcttacgaatggctaacccattcacccttaacctgcgatcattttcattagccgacgcatttccatgtttcaatatcccctcaacctcatctccgcacctggccaccttggccacctcatcaggagcaaacgaaaaagccgcaagtaaacgaaaactttcacggctcaatgcgttttaattttttcttggcattcggttattttttttccttggctaatttctttgcatttgggggtcagcagcagcagcagcagcagcagctcattgtgtggcattgcttggttgccccaccttagtttcgtttatttttttccaactgattttacataatcctggccagcgcactcggtgcgaagatgtgggggatattcaatattgcagcactgacgattaatcagtttttttttgcgtatccgactttttttttttgcagttcctgcggaaccaagttcatctgggctgcacctgcgcaggcgtgtgaaatgctcatcacttcctctgggccttttcaatcgtaactttcgaactctttcggggatcgggcggaaatgttggctcccctgggcttcagctgtccgcgatgcttgctcctgcgacgtggcgccgagcgttgggcctcactggcccgccaattgtcgggcagcagctcccaggatgatgccagcagcaaggatgcggccgcccaggaggcagcaagtggctgtccgcccaatagcacaacgacgggcactgacactcccaaagccaaagataaaaccaccaagggaaggaagcggctcagaaacatagaggtaatgttgtaagctagttgttatcattgctattataggttaaatatcagttggtaagattgtagttcattagaaagaaaggatcatcgatctagtattgtaacacaaaacttagtgtagttctatgaacttctaaaactattgagcagtattatcgaaggatccaattgttatcacaatactgaaataactttctatcctaagaggaaagtggctcaagagattgcatattatataatcgtttgcagatacctcccgagcccaccacctgctgcatgtcgggctgcgccaactgcgtttggctggactacgcacagacgctggccaagctgctgggcgacaacgatgaggaggcgcgagagattgtgctgagcaagatcaccgacccgaacctgaagatgttcctcagcctggagctgcgccagatggctaagcagcgggaggagaaggcggcggcggagaaagcagcgaagcagggaaagccaaagaaatcctcgcccccgccgtagtacaaatccccgctcacctaaatatctagttaggaccaaattcgtagtagctcaaatttactcttgtacttagtgtgtaagaactaagaaacctcaaaataaacatgtaagagttaaggttctgaagaagttattttcgtagttctaaagattctgcatagctttgcaaatattctacacattgttagaaaccattcttttttaaatgtaagtactcacgaaatgcggaaaagccggcgctgaagtgcgggtcacttgggaagccggctgggaatgcgtgtggcaggacaggattcgcagctccaccggcggcaattgctggcggcgggctcacgtagctgagtttctggtgcaccagctgcggcggatgatggtgatgatgatgatgctgctggtgctgctggctaggatgctgcggatagtccttggcgtgaccatagaaatcgtaggcgggatatgcggctagcgaggtgcgttcatcgctgatggaaatgtctggcgaggagacgcttcctccatcgctgtgatagggcgtgtcacagggcggcggcttgtgggcgtgtgttccgacgtcgatttccccattttccgaggagcgcgtttccaaatgcccgtacagacgttcgaaaaactgtcgcggcgacgagggacgttgcggcacggatagaatcgtagtgttcgctatgggatctaagctgtcactccttttgatgcccggcgagccgtcgggtgagccaatctcaactttgtgacgttgcatttcgtttgaggatgtgccgcgttagctgtccaaactaatcacttgggtaatcggcgagcgactgaagtgccacaaataattctacttccgctggtcaagcgacgcttatcctgacgtcgacgtcggcagaggaactgggtgaaaaaaaaaaacaaagcaaattacgcggcacatcagaaaattaacagcagcagcgggggcgcctaaaatgctgcttactaataataataataaaaaaaaaggacccccttcccactaaacacctgaagtgtggcctgaaacccggtttgattggctgaagtgccgtgcaattaacccctaattttacttccggccaaagtttcacttaagggtggcaagcagtgtgcctaaataagctccgcccactcttaagcaagcagtactcacgtcttcatacaagcagtgtgtgcgtacagtccctggtttagccaagtttcttacctcgccagtgctttgcgaggacaacaaccttaagagcgagatccctagaggtgggcaatcagcatttgcttcttcaatgtatttcatgcatttttcaaactaccataaacggtccgtctaaatggcaaaaagtctatataagcaaccgaatcgcgccactatctgtaattttacatagcgcgcgcgagggatcgaatcaaatcgaatcgagtcgagtcgagttcgtggattatatcagcatggataatgtgttcccaaaacttcggtgcgtaaacgtgtgctgttttgggaaagaagtatcgatgaagtgatagtgatcgaaagaacgaaaacaaaaacaaacgattacggttatgttgccaatccgtctgcgctgcgcaaccgatttgcacgtaccgttagttcgcgcagctgtcgcagccaccgaaagtgccaataaagaataataacaataaacaaagaccaacaagtggtgacgaaaataagaaaaaaaaaggtacatcccttcgattttggccaatttcgattttgtttatcg

SEQ ID NO: 13658 - DNA, 1053 bp, DROSOPHILA
atgcaacgtcacaaagttgagattggctcacccgacggctcgccgggcatcaaaaggagtgacagcttagatcccatagcgaacactacgattctatccgtgccgcaacgtccctcgtcgccgcgacagtttttcgaacgtctgtacgggcatttggaaacgcgctcctcggaaaatggggaaatcgacgtcggaacacacgcccacaagccgccgccctgtgacacgccctatcacagcgatggaggaagcgtctcctcgccagacatttccatcagcgatgaacgcacctcgctagccgcatatcccgcctacgatttctatggtcacgccaaggactatccgcagcatcctagccagcagcaccagcagcatcatcatcatcaccatcatccgccgcagctggtgcaccagaaactcagctacgtgagcccgccgccagcaattgccgccggtggagctgcgaatcctgtcctgccacacgcattcccagccggcttcccaagtgacccgcacttcagcgccggcttttccgcatttctggctcgcaggcgacgcaaggagggaagacaacgccgccagaggaccactttcagcacagagcagacgcttcgcctggaggtggagttccatcggaacgagtacatctccaggagtcgtcgcttcgagctggccgaaacgctgcgcctgaccgaaacgcaaatcaagatctggttccagaatcgcagggccaaggacaaacgcattgaaaaggctcagatcgatcagcactacagaaactttgtcgtggccaatggttttatgagctctataatgggtcaggctgccacgaccatgccccccggaggcgtcactgggggcgtggcggtgggcgtgggcctaaactactatgccgcggcagcgacgccggcagcgctgcccaaggataacacgcaggatgccaatttcatcgacatcgatgaccagttccagcgccagcaacaacaaaaacaacaacaacagcagcagcagcagcgacgtcgagaaacaacaacgcctattaacatttgctaa

SEQ ID NO: 13659 - protein, 350 aa, DROSOPHILA
MQRHKVEIGSPDGSPGIKRSDSLDPIANTTILSVPQRPSSPRQFFERLYGHLETRSSENGEIDVGTHAHKPPPCDTPYHSDGGSVSSPDISISDERTSLAAYPAYDFYGHAKDYPQHPSQQHQQHHHHHHHPPQLVHQKLSYVSPPPAIAAGGAANPVLPHAFPAGFPSDPHFSAGFSAFLARRRRKEGRQRRQRTTFSTEQTLRLEVEFHRNEYISRSRRFELAETLRLTETQIKIWFQNRRAKDKRIEKAQIDQHYRNFVVANGFMSSIMGQAATTMPPGGVTGGVAVGVGLNYYAAAATPAALPKDNTQDANFIDIDDQFQRQQQQKQQQQQQQQRRRETTTPINIC

SEQ ID NO: 13660 - DNA, 3763 bp, DROSOPHILA
acctatcagtaatcgacagagctcgtgcaatcgcaacatcatattgcaccgatatgtcgagggaaaattgaaatcgttatcgaaaatacgaggcgatagcacgcgcacgttgttttctttgaatattaggaaaatataatatgaatttaccagcgaaaatggacgtggaaaaggataagcttcgccagatgcactgcgaattcaatcccttgtcgcgttgcgacggatccgtgatgtacagccagggtatagccgtgttttcaactctagtacatggccagaaccggctaacatggtcttgccaatttcaggtgctacaggtctcataggcgcagttctcggccccatcgaggtgaagacccaaaacctgagcatagatggcagctacttggagtgtaactaccgaccaaaagcgggcctgccgcaggttaccgatcggattcgggaggcggccattcgggatgtgctggaactggccctcctgtcggaggctcatccgcgctccaagatgtccgtgcagatccaggagctggaagatcgtggcagtgtatgtttttgaatctccttcatctgtaatccttctaacaatatatatattctatcagattgatgcctgcgccgtaaattgcgcctgcctagccatgctcatcggaggcctgcctttaaagtatagctttgcggctgtccacgccatcatcaacgagcagggcgagtatgtgctagatccggaccaaagtgaaaccctccaccagcgcgccagttttacattcgcctttgattctgtagaaggaaaccttttgttgatccagacaaagggctctttcaaaatagcccagttcaatgatattgagtgcctatgcctggctgccagtgccgagatctttcagttctatcgcaaccaggttgcaaagtatcatggcaggagtgaggcgacggctaagaaggaggacgtcaatgagacgtgatgttaaaacaactgaaactacgattaaagctcattttattgtattaactgtctgctgtgaaagtcggttatgttgctcagctcgaggggcgtgcccttcagcacctgtgagttggattcctcaatgcggacggccaaaaagtcacctactccaaacgattttctggctgtggaatctccagatatgggtacatatatagaaggaactatgaccttgatattggcatcattccgaccgaaccagtgagcatcggacctcttgcttttcccttctataagtatgagctgctcctggccttccattttacgatgtagctgtgtagctccctctcggaaaacctggaccatgcgctgcagtcgctcattcttcacgtttatgggcacatcatctttgtagcgccgatgggcagtggtcttttctcgcatgctgtaggcgaacaagtaggccacgttgtactgcacttgttggataagagatacagtgtcttggaactcctcttccgtttcaccgcaaaagccgcagataaaatcgctggacagccccacgttgggcaaaaactgtctgatgtgctgcacaagttccagataagcctctctgctgtaaccacgtcgcatcctttccagaacttgggtattgcccgattgtgctggcaggtgaagttgcttgcacacattcgggtgatctctgatgacctccagaacttcgtcggagaaatccttcggatgcggcgaggtgaaacggatgcgcatgtctggaacagcttgagccacggatcggagcaatgctgcaaagggagtcccgcctgttttgggcttgtaaacagtgctaaaaccgggcactggagttgctttcagtgagtcctgttcctcctgcgcagttctgtctctgtacgagttgacattctgacccagcagggtgacctccttcacgccctgttccgccaatgccttgacctcagccacaatggatgccagggggcgagagcgctcgcgtccacgggtgaagggcactatacaataggtacacatgttgtcacaaccgcgcatgatggacacaaaagcagtgggcgattcggagtttaagcgaacgggcatcacatccgcataggtttcgtccagcgagaggagcacattgatggccgagttgccataatgccgggagatagccagtagtcgcggcaaatccttgtagctatcgggtccggcgattacatccacacattgctcctgttccagcagcttctcctttagtcgctccgccatgcaacccagcagtgtcagctgtagaggatgcctccgcgtactgcgtttgttcttcatggctcgcaggtgcttcaatcggttcctgatcctctgctccgctccatcgcgcactgcgcacgttacgagcattatgacatcggcctcctccggctcctggcatctcaaataaccattctccttcaggatactgaacaccacctccgtgtcattcgtgttcatctggcatccgtagacctcaaagtggaccttccttccgtttccattgaaatcaatcgagttcaggtacggcacactggtgtccacatgctcctcttcatcagttttcagtcttgacgcaggcttgaccgcaaaaaagtcttggaagcccggtccgcgttgaatcctctccagaaaagttgcacgtgctgccggctctgattttagttgacccgctgcgctggaggtaacggatgtcgtagctcctttcgaggcagtcgtggaggcatgccgcacttggcgaacaaatgcccggtagcttattttcatggcagttatttatttatgtaatttttatgtttctgttcaaagaagtggtattttattaatggtattacaagtggtatttttcagggctggaaagcgttgtttacctgaaacagctgggaggatgatttttattcgccatctagtggacagtagcaagaccttgtagtttaaaaactagccgcttgttgtttttaaaaaacgtgacagttttaaattgttccgctaaattttaattgatgaatttcgctttttatttattaaaactaataaatatggagttaattgagcgggtaaaaatgaaaatattctacctttaatggaatttaagtagtttttgggctcaaactgcatctcattcattgaaaactatctcttttgctatggtaaacattttgcgattctcagaaaacaaggcataattacttttggcttaaagactcttcatgccagttagggaatgcacttggcttccttccgtagttaaacactcaagcgggtttgtccagccgcacatttgaggacaggttggccaaagtcggctcagccgtaagaaattagctcggcctcattatgagcttatcgtggtcgggttaataatgcacaggtgaagacaatgcaattgcatggccaacaaatgccacgccttcgtctgctcctgattccgattccatgtctgtgcctacaatttgcggcttttgtgggtcaataactgagtaattgcattgccaacgagtgtgggccataaatatagccaaattcgtcggtcgaagtgttcacaagataatttcatcgctttaaattactttgcgatataaataatattataatacaagtaatataacattctaaatgtaactagtttcaaagaaaatgcctataatcctttgcagtctcgcccattttcgatcctcaacttggttgggcaaaaggggcggaaaaattgggagtgggagcagccgagcacacatattttgtaaacacttacaagcagaaatattttaatgaaaatga

SEQ ID NO: 13661 - DNA, 1763 bp, DROSOPHILA
aaataactgccatgaaaataagctaccgggcatttgttcgccaagtgcggcatgcctccacgactgcctcgaaaggagctacgacatccgttacctccagcgcagcgggtcaactaaaatcagagccggcagcacgtgcaacttttctggagaggattcaacgcggaccgggcttccaagacttttttgcggtcaagcctgcgtcaagactgaaaactgatgaagaggagcatgtggacaccagtgtgccgtacctgaactcgattgatttcaatggaaacggaaggaaggtccactttgaggtctacggatgccagatgaacacgaatgacacggaggtggtgttcagtatcctgaaggagaatggttatttgagatgccaggagccggaggaggccgatgtcataatgctcgtaacgtgcgcagtgcgcgatggagcggagcagaggatcaggaaccgattgaagcacctgcgagccatgaagaacaaacgcagtacgcggaggcatcctctacagctgacactgctgggttgcatggcggagcgactaaaggagaagctgctggaacaggagcaatgtgtggatgtaatcgccggacccgatagctacaaggatttgccgcgactactggctatctcccggcattatggcaactcggccatcaatgtgctcctctcgctggacgaaacctatgcggatgtgatgcccgttcgcttaaactccgaatcgcccactgcttttgtgtccatcatgcgcggttgtgacaacatgtgtacctattgtatagtgcccttcacccgtggacgcgagcgctctcgccccctggcatccattgtggctgaggtcaaggcattggcggaacagggcgtgaaggaggtcaccctgctgggtcagaatgtcaactcgtacagagacagaactgcgcaggaggaacaggactcactgaaagcaactccagtgcccggttttagcactgtttacaagcccaaaacaggcgggactccctttgcagcattgctccgatccgtggctcaagctgttccagacatgcgcatccgtttcacctcgccgcatccgaaggatttctccgacgaagttctggaggtcatcagagatcacccgaatgtgtgcaagcaacttcacctgccagcacaatcgggcaatacccaagttctggaaaggatgcgacgtggttacagcagagaggcttatctggaacttgtgcagcacatcagacagtttttgcccaacgtggggctgtccagcgattttatctgcggcttttgcggtgaaacggaagaggagttccaagacactgtatctcttatccaacaagtgcagtacaacgtggcctacttgttcgcctacagcatgcgagaaaagaccactgcccatcggcgctacaaagatgatgtgcccataaacgtgaagaatgagcgactgcagcgcatggtccaggttttccgagagggagctacacagctacatcgtaaaatggaaggccaggagcagctcatacttatagaagggaaaagcaagaggtccgatgctcactggttcggtcggaatgatgccaatatcaaggtcatagttccttctatatatgtacccatatctggagattccacagccagaaaatcgtttggagtaggtgactttttggccgtccgcattgaggaatccaactcacaggtgctgaagggcacgcccctcgagctgagcaacataaccgactttcacagcagacagttaatacaataa

SEQ ID NO: 13662 - protein, 583 aa, DROSOPHILA
MKISYRAFVRQVRHASTTASKGATTSVTSSAAGQLKSEPAARATFLERIQRGPGFQDFFAVKPASRLKTDEEEHVDTSVPYLNSIDFNGNGRKVHFEVYGCQMNTNDTEVVFSILKENGYLRCQEPEEADVIMLVTCAVRDGAEQRIRNRLKHLRAMKNKRSTRRHPLQLTLLGCMAERLKEKLLEQEQCVDVIAGPDSYKDLPRLLAISRHYGNSAINVLLSLDETYADVMPVRLNSESPTAFVSIMRGCDNMCTYCIVPFTRGRERSRPLASIVAEVKALAEQGVKEVTLLGQNVNSYRDRTAQEEQDSLKATPVPGFSTVYKPKTGGTPFAALLRSVAQAVPDMRIRFTSPHPKDFSDEVLEVIRDHPNVCKQLHLPAQSGNTQVLERMRRGYSREAYLELVQHIRQFLPNVGLSSDFICGFCGETEEEFQDTVSLIQQVQYNVAYLFAYSMREKTTAHRRYKDDVPINVKNERLQRMVQVFREGATQLHRKMEGQEQLILIEGKSKRSDAHWFGRNDANIKVIVPSIYVPISGDSTARKSFGVGDFLAVRIEESNSQVLKGTPLELSNITDFHSRQLIQ

SEQ ID NO: 13663 - DNA, 2727 bp, DROSOPHILA
caagataccctcgctgatgtccttggagctgagcacaccagcggcagcagcaccagtcgcagaacccatccagctgcccagttactacaatccgagcatcatcaatgccaatcgctatgcggagcagcagcagaagcgcaagctactgtggggctccaagaagagcgagaactcggcgaacaagtggggcaacgcgcacttctcccaggactccgacggcaaggtggcctccaagtttatgcggctcatgggtatcaagaacgctggtacgtccggcaatgacgatggcaagggcggccaggcggagtccaccaatggaagtgcagcaggcgagggaaaccgcgcagtaagaggtgctgcgccatcgggagccgctggcggaacgaaagtgcccacggacgtgcagcagcgccagcgcatgttctccaacatggagcagcagtacgagatggcgcgagccgccacacacacgatgcgtggcgtggggcttggtttcggctcccagccacgtactttctagaagggatcggaacggaggaggatcggctccctgccaggctgtaaataccatgccactcactcaactcattagtcagtcaatatgtttctcctcaacaactttttgtttgtgttgagaaaattttttgtttttttgatttcaaataaacgttgcaacagaatttatgaagtgacgtggctctctctttggatttgcttgggataaatgcgtcgttaggtagacttttagtctacactattactaagtatgctaagagtatccaactttaactacaaagttcagcggctctaatcgaagaatgcttgaatattcaataataaataaaggtatttttttttacaataaacaattttaaattttggcactctgtttagtagatgtcagttttttgccatgcaccttggcggtcggtctgcctatcgccaatcgatagctgaccaaaaacaataacaataacaaaatcagctgacgataggacgtcggatatcgataccatatcacaaactaataataaaaataataataaataagagaattaatactactagaacacaaacaaaagcatataaagcttacacatcctttattaaaacaaacagccaaattggatttaaattgtggaacgaagcaaacagaaccgcttgagtttgtgccactgccacgcaaaaaaaattatcgtttccaaaaaactaagcatacttcatccgaaattagcaatcagctagccaaaagcggagtgatctcgtcgagaagagccacgccccctatccgcccacgctgcccagaagagagcagcgaagatgtcgtggctgaacagcagtctcagccagctgaagggccaactaaccaatctggcgcaggaagttctggccgaaacggcaggacccggcgacttggagtatgagggacatcaagcaggaggtgctagcgtccaagacgccgagcagcaggccaagacagccctggaactgctggccgaaacccaggagcagaaggagcagctggacaagcggtgcgaggagaaggatcgtgaggtaaagccaactcacagtcacttttgcggcttcttcaccaatggccatccgattgcccctttcagatagccgccctgcgccgagaactggccaaaagcaagcagaaacaggaatcccagctggcagccagcacatcagctacgcgggaaccgcagttggtaagtgacgtttgatccgagggacctgcagctggcccccatgtggccatgccacatccggtgcccactccgtcttccaggaaacattgcactccggcgtggagtggtgtttgaccggctttatctttcaaataagcgataagcccagctctcgcgctctctgtttcgcttttggccacatatccctgaattaatatttaaactgcgataagctaggagtcggcactaccctagttttatctgcacttctcgcgtttacctgatgccacattgtatgcttcacacggagagaaaaatggttgcagtggcatattgttgttttccgtggcacgattacaaagcgctagaattcaccgatttctgttttgccaacaattaaaggggggtttaaaataagccaagttctcgattgcaaagaatgtactaatagtatggcagggtaagccatatttcattagagcgtcttgagctttcggattagcaatctaatgctaaaaacggttttatattaactttctcctggataaatttgaatttgaatttaaactgatttttcatttgacatccattcacctttttccccgtgcaacttctatttgatttcacattcggtggtgtttggtgtctgctatttgcctggctgtcataaatccctggtctccttttcgatcaccccatatgcctgttagccttatctaggcgtgctgctaaccctatcgctccatagccctccgttcgccaactgcttgttcaatttaccgaattatttctgattaggcaagttactgcagcgcaaccccaagtgtctgatattcccgttgaaaatgcagggtgacggggttgcatttggagccatttggtttggtcactggggcgatggagatctttctgaagcacaactgtaccagattttccatagtcaccttaaatataaaaaatatggcttttcacattgtagatctagttttaaaatactaaatgacatgcatatataaccatagcgttagatgttata

SEQ ID NO: 13664 - DNA, 662 bp, DROSOPHILA
cggatatcgataccatatcacaaactaataataaaaataataataaataagagaattaatactactagaacacaaacaaaagcatataaagcttacacatcctttattaaaacaaacagccaaattggatttaaattgtggaacgaagcaaacagaaccgcttgagtttgtgccactgccacgcaaaaaaaattatcgtttccaaaaaactaagcatacttcatccgaaattagcaatcagctagccaaaagcggagtgatctcgtcgagaagagccacgccccctatccgcccacgctgcccagaagagagcagcgaagatgtcgtggctgaacagcagtctcagccagctgaagggccaactaaccaatctggcgcaggaagttctggccgaaacggcaggacccggcgacttggagtatgagggacatcaagcaggaggtgctagcgtccaagacgccgagcagcaggccaagacagccctggaactgctggccgaaacccaggagcagaaggagcagctggacaagcggtgcgaggagaaggatcgtgagatagccgccctgcgccgagaactggccaaaagcaagcagaaacaggaatcccagctggcagccagcacatcagctacgcgggaaccgcagttggtaagtgacgtttga

SEQ ID NO: 13665 - protein, 113 aa, DROSOPHILA
MSWLNSSLSQLKGQLTNLAQEVLAETAGPGDLEYEGHQAGGASVQDAEQQAKTALELLAETQEQKEQLDKRCEEKDREIAALRRELAKSKQKQESQLAASTSATREPQLVSDV

SEQ ID NO: 13666 - DNA, 5608 bp, DROSOPHILA
attcggatgcgccaccgtcacaccgggactctatacgcgtgtctcgtcctatctggactttatcgagggcattgtctggccggacaatcgggtgtaaagttgggaaaagtaaagtttttgttttttttgtatgtatattatttctatttgggatcaggactgcctgatccatcgcaattggcaaacactcatctgtgatctctatgagcaccgcgatcgaaccatttaataccaataaagtagatacgttttaagatataatcaatcggtacaatattatttctggcagttcggtttccagaactctgtgaagtgatttttctggttctgtttaattttagagggatttctgggtcaccacttttattgaattgctgcactgtataaaaaaaatggggaaatacaaacagaatgcatttatttcagaaagatttgtcataagaaatttaaattttaagcatatgtttcagactataagttgaaaaggacttcttgggtcaccacctaggtcgcaacctaggcaagaaagtaagtatctgggtcaccactttaattagagaagaattatacaaaaaaaaaaaaaacaagattactgcaattgaaactatatatatggtaagttctaaaacacgattctgtgacacaattatactcgacttttaaaggtgtaaatatcggggtcaccaagcgcagcatagaccttacgcggtatcctttagtccataccgctcgcctgttgcttacccactcgctaattacaggctgcctttgtgctttgtgtgctctggcttctgatcgcttcggatcgttctgcgattctgcgaagtggtggaatgggaaaccggttcgccgctcagcgggagaggatcggctctgggtgctatcagctgctgggtccggcgcttcttggtcgacgtctaaatgggcctcatcggttccagctccagctccagctggggctcagaagcttggcttcagttgcttgggcgatgcgttgctgagcggtcagagccgggaaaatagccagcagattccataccgccgcgatttgtgatagccaccggtttttagctttattgactctgctggtgtgctttttgcggtgtttttttctttattttttatttttttttttcgtaattcccttggattttgttttgtttatgtggtattgaattaaattgtattgtattgtgcggtgcccgattgccatagtcaccacagtgctcgacgcactcaataaacgacatcgatacgtagacgtactactcccttatcagagaccgaaaaaaggtcgtgtcaaaggtgcgttcgataaggcggacgtcggtgtacagtgaacagtggacaatggacattgggattgcgggatgtggggatgtggggctatgtattgcatgttctacttttgatttcgtcgtgtttacaatgggcaattactgcggaaggccggaagctgattagcaatcgcatacctatttaatacaatttcatttgggccgataacaggtgatgtcatgacacttttgcattgcttcaatcggatatatatgattcagttgaactgcagacacattgacgactctctgctcaattgagcagcataattgtcaggtgttactttcgtatcggttattaccgacgtagctgcgatatcagttggcagtacacgtctttagccggtggtaaaatcccagcggcatgcctcccatgaatcatctgatctcacctggcggcgctgctggtgaaatgctcgtcgtaatcggcaaacacaaactttccatcaacacaaagtctctcaaatgaaatcaatcaagtctggcttactacaatcgagcagttcatatggagaatgcttttgtggtgttcccatattaaaaaaaaaaaaaaatcgtaaatgggtcaatggcagtggatgtggatcggtttaatcagctgaaagtcgagtcgattgaaagaaacagatctcgtttgtttttcccttaccatttcgacgagggcttcccctgttgtgaaaatgatgttttccattttcggttttgataaggctgataagcgttaccaagtagaatgggattcactaatgcttttgggaatttcagctgaccgatggcgatgatctcggcgagaaggtacttccttctgggtctcctggtgctgacaacttctgcgtatgtaacagttggggatggtatgtaggatgtcttgcggcgcgtacactagatccttgccagctggccgcatttctcgttgcagagggcgatccctgccaggtgaggtcggacataccgggaatctgcctctcctcctcagcctgcgagaacatcagaggatatttgaagtcgggcacgctgtccaccagccaggtgccgagttgtggttttggcgcccgcgaggagatcatctgctgccccaccgtcgcctgctgtgccactgagtaagcgtgtccttgtctccttggcctctgcgctctattgtcctgttttttgtcctcctgtttgtgcaccatatatatgtgtttgtgtgtgtcccgcttgtgctgtgtgcccaccgatgttgcatgccccggttaccggcgtccaacgccagactaacacctctcactcccacagtcgaggtcgtgaggtccaattccatgctacgagctccgagcgcagcagtttacccgaacccaagcgggaaccaacaccagaaccggagccactgcctccaacgaccaccgaggggaaaagggagcgggaaagtcggctggacgagaatcagaacttctttgacttcaacaagctgctaagcaccacagtaaagccgcagaaaacccacgagtccttgaagttgcccacacaggagtcgatgaagacgcccactcacgagtccatgaagatgcccactcacgagtcaatgaagttgcccacacacgaacccatgaagttgcccatccaaagcgttggagcttggggcatagctccttcgaagactcaacccattgcaagcacccagagatcttttatggaaccggagtggggccgtgagccacggattgtgaaccgtccactgaccacgcctcgatcacgaccccaaagaccgaataattccaatttcaataccaatccaagccccaataataacaacctcatacatttggtcaacgatcggctgcgggagcagggaatgcagattgagcctgctcgagaagtgcccatggtgttgcaaaccacgcccacgcccacacccgcacccacgcccacgcaattgatcgatccctttgaaccctaccgatttcggggccaggacagagacaaggatacccagccccaggaaccctggaacgatgtcagcaataatctagacgcggatccagctcccagcatcttcaatccagccgagacgcggtttgtctgagcattcttttggcatggacatcagttggcctcagccagggagccgcatgcagtctctgtctcaggtggaaaccatcgtgagcccaattttaatcgctgatataccttgtctttcgcaggccaacgacgcccaatcccaatccctcccgcgtcaatcttcccgagaaggagcgaccgtcggtggcaggtgagttgcgcattctttggaatattttatatgaaaatatctttggagatatattatatacaatatatattaaatttcctatcatctgatgatagcgtgtgagaagatccgatccggtggaaagcccctgacggtgcacattctggacggcgaacgggtggataggggcgtctatccccacatggcggccattgcgtacaactccttcgggagcgcagcgttccgatgtggtggatcgctcatcgccagtcgattcgtcctcacagcggctcactgcgtcaatagtgacgatagcacacccagtttcgtccgtctgggtgcgttgaacatcgaaaatcccgagccgggctaccaggacatcaatgtggttggtatcgccatgtgacacatggtgcgagataaccagttgaactcactcacttccattggcagattgatgttcaaattcatccggactattccggcagtagtaagtactacgatatcgccattctgcagctggccgaggatgccaaggagtccgatgtcatccgtcccgcctgtctctacacggatcgcagtgatccgccagcgaactacaaatatttcgtcgccggttggggtgtaatgaatgtgaccagtaagttgtgtgtgcgtaaactgcaggattggattgtgttcgatggtgtctttacagatcgtgccgtatcaaagatcctgctgcgggcggctctggatctggtgccggccgacgagtgcaatgcatcctttgcggaacagccgagtgccaaccggacgttgagaaggggcgtgattgcctcgcagctgtgcgcggcggacaagaatcagcgaaaggacgcctgtcagggcgattccggtggacctctcatcctggagattgacgacgtcgacggcacctactcgatcgtaggcgtaatctcctcgggcttcggctgcgccaccaagaccccgggcctctacacacgcgtctcctcctttctcgactatatcgagggtatcgtgtggccgtcgaatcgtttctgaggcgtcatttgatctgcaataaatttagtttgaacggatcggatggtgtttcccatcaaaagtgtttgataaaggtattttgtctttagacaaagttcgacacaattcagtgagtgtcattaaagaagccataagggttgttcattcagttcctcaaaatgttagaatcgattttattttatataatagtgtagtataatagtgtagtataatagtgtagtataatagtgtaatagaaattcaaacatctgaggcaactaagaggtatcataagtgccaagcactttacccactgacgttttgcagcagccctggtttcgggacagctgtcaaactatcgctgtctgcgcctcacccgctcgtacgtaaacagaactgagagcgcaaaagctcgctgcgcgcggcattgccaggtgtggcattcgaaagttgcgacaaaagctgcttactgagcttttgcagtcagctgttcgccgccgttacaaagtgctgccggcttactgcggccaaacagccagccaaacaccacccaccacccaccacccaccgacccactggccccgtccgctcgcagcaaaccagcccccgctctccccacaaggccgcactcctgcgggcagcaaaagtgggagctgcttaaatggcgctgccaggactcctcgggcttcagttggtcgcgagactgcgaagctgtcggtttgcctgctcagcggtgaaggtgcattcctaacgcacataaagtctcgaatccgttggaatttgaacacgattaccgttaggcgtttgaagtgtaccgaatcgaactaaactaaactgaactaacacaagtcccgagttcgcgtcgtgtttgtttatttacttttatttttgttacattttttttttgagtgaccaccgcccgaattcatgagtccgtcggcctgacctgaccccaaaaagttgaaacttccaccaaacagttgcaatcgtaaatgtaagtcgatctttgtgtgcttgtgct

SEQ ID NO: 13667 - DNA, 2270 bp, DROSOPHILA
agcggtcagagccgggaaaatagccagcagattccataccgccgcgatttgtgatagccaccggtttttagctttattgactctgctggtgtgctttttgcggtgtttttttctttattttttatttttttttttcgtaattcccttggattttgttttgtttatgtggtattgaattaaattgtattgtattgtgcggtgcccgattgccatagtcaccacagtgctcgacgcactcaataaacgacatcgatacgtagacgtactactcccttatcagagaccgaaaaaaggtcgtgtcaaagatgatctcggcgagaaggtacttccttctgggtctcctggtgctgacaacttctgcgtatgtaacagttggggatgagggcgatccctgccaggtgaggtcggacataccgggaatctgcctctcctcctcagcctgcgagaacatcagaggatatttgaagtcgggcacgctgtccaccagccaggtgccgagttgtggttttggcgcccgcgaggagatcatctgctgccccaccgtcgcctgctgtgccactgatcgaggtcgtgaggtccaattccatgctacgagctccgagcgcagcagtttacccgaacccaagcgggaaccaacaccagaaccggagccactgcctccaacgaccaccgaggggaaaagggagcgggaaagtcggctggacgagaatcagaacttctttgacttcaacaagctgctaagcaccacagtaaagccgcagaaaacccacgagtccttgaagttgcccacacaggagtcgatgaagacgcccactcacgagtccatgaagatgcccactcacgagtcaatgaagttgcccacacacgaacccatgaagttgcccatccaaagcgttggagcttggggcatagctccttcgaagactcaacccattgcaagcacccagagatcttttatggaaccggagtggggccgtgagccacggattgtgaaccgtccactgaccacgcctcgatcacgaccccaaagaccgaataattccaatttcaataccaatccaagccccaataataacaacctcatacatttggtcaacgatcggctgcgggagcagggaatgcagattgagcctgctcgagaagtgcccatggtgttgcaaaccacgcccacgcccacacccgcacccacgcccacgcaattgatcgatccctttgaaccctaccgatttcggggccaggacagagacaaggatacccagccccaggaaccctggaacgatgtcagcaataatctagacgcggatccagctcccagcatcttcaatccagccgagacgcggccaacgacgcccaatcccaatccctcccgcgtcaatcttcccgagaaggagcgaccgtcggtggcagcgtgtgagaagatccgatccggtggaaagcccctgacggtgcacattctggacggcgaacgggtggataggggcgtctatccccacatggcggccattgcgtacaactccttcgggagcgcagcgttccgatgtggtggatcgctcatcgccagtcgattcgtcctcacagcggctcactgcgtcaatagtgacgatagcacacccagtttcgtccgtctgggtgcgttgaacatcgaaaatcccgagccgggctaccaggacatcaatgtgattgatgttcaaattcatccggactattccggcagtagtaagtactacgatatcgccattctgcagctggccgaggatgccaaggagtccgatgtcatccgtcccgcctgtctctacacggatcgcagtgatccgccagcgaactacaaatatttcgtcgccggttggggtgtaatgaatgtgaccagtaagttgtgtgtgcgtaaactgcaggattggattgtgttcgatggtgtctttacagatcgtgccgtatcaaagatcctgctgcgggcggctctggatctggtgccggccgacgagtgcaatgcatcctttgcggaacagccgagtgccaaccggacgttgagaaggggcgtgattgcctcgcagctgtgcgcggcggacaagaatcagcgaaaggacgcctgtcagggcgattccggtggacctctcatcctggagattgacgacgtcgacggcacctactcgatcgtaggcgtaatctcctcgggcttcggctgcgccaccaagaccccgggcctctacacacgcgtctcctcctttctcgactatatcgagggtatcgtgtggccgtcgaatcgtttctga

SEQ ID NO: 13668 - protein, 654 aa, DROSOPHILA
MISARRYFLLGLLVLTTSAYVTVGDEGDPCQVRSDIPGICLSSSACENIRGYLKSGTLSTSQVPSCGFGAREEIICCPTVACCATDRGREVQFHATSSERSSLPEPKREPTPEPEPLPPTTTEGKRERESRLDENQNFFDFNKLLSTTVKPQKTHESLKLPTQESMKTPTHESMKMPTHESMKLPTHEPMKLPIQSVGAWGIAPSKTQPIASTQRSFMEPEWGREPRIVNRPLTTPRSRPQRPNNSNFNTNPSPNNNNLIHLVNDRLREQGMQIEPAREVPMVLQTTPTPTPAPTPTQLIDPFEPYRFRGQDRDKDTQPQEPWNDVSNNLDADPAPSIFNPAETRPTTPNPNPSRVNLPEKERPSVAACEKIRSGGKPLTVHILDGERVDRGVYPHMAAIAYNSFGSAAFRCGGSLIASRFVLTAAHCVNSDDSTPSFVRLGALNIENPEPGYQDINVIDVQIHPDYSGSSKYYDIAILQLAEDAKESDVIRPACLYTDRSDPPANYKYFVAGWGVMNVTSKLCVRKLQDWIVFDGVFTDRAVSKILLRAALDLVPADECNASFAEQPSANRTLRRGVIASQLCAADKNQRKDACQGDSGGPLILEIDDVDGTYSIVGVISSGFGCATKTPGLYTRVSSFLDYIEGIVWPSNRF

SEQ ID NO: 13669 - DNA, 4578 bp, DROSOPHILA
cgaaacatcgttaacttggcttttagaaacaagtgctagtggcaagtgggtataacgggagggggcgtgtgcgtgtgggcgtacggcgttgtggtctccaaacattcgtcacgcccacgccgccaacaacattcaatttgcgcacttacagaaattcgataacttgaaaatatttcaaagttcatagtttgtagaaaaaaaaaaaccaataagtagaggcggtaaactactatttactctatacctaatgtcttaaaaatcgacttctttaaattccaaaacctgcccaaaacattatttaaacgaaagatggtgtatcccttttatgaaacttcaaaaacaaagatgatcgtaatccctaaaagctgccttattctaattttgactaatttaaaaactgaaataccttaagttaagttaagttaagttaagttagtttttaccttcaaaccctactactacgaattttagatattgagacattgctgtagattaaagtttaatttatattcaagccaaggtggcccgcaattatattttcgtattgtgggtgatggaatctcttcaaaaaggcggcctaaacgagttttattggaaaattgatcgctgcccaatgctgtttcaattggccaatgcagtctgcagtgggcgcccgcaagccagcaattgattaagcgcccgatcatcgattagttggcccaacaagagcgtcgcctccgttttggagggacttggactgggcgagcgtgggcctgaaagtggcacattttcgcgagcgacagacgaaataaaaaaacgcaatcggccaaatttggggaggcgactcagctcgactcgacggcgacaacaataaacatttgaaacaacaagcggcaaataaggagaagtcacatccgcatcgagagatcgagtgggatgccagttgttaatgattatgatgatgatgacctggccaaatggttacgtgcattcgtgaattggaaacatttagttttatatcttttgcctatatgtatacacacactcaagtaaagcagctgatttacaatatgcaatggtatatctctgcttaaatctaaaaaactaacgcataaacttcttggcctggtcgcggttgacctgcttgaagtgccgctgcttggaagccgatccctcgttcattttcttgtagaatccgaaaccgccgccgcccactcgcttttccggtcgctcccgcttggccgcgcccaccttcaggtcaactacgggtggcacaaggaatccaaagcttttcgcaaccgcctgcaggtccaacgtgttcacattgaagatctgcttcaattgatgcgaatcgtatgcgcgcacatacgacttaaaggcttccttggccgactggtttaggaaatagttcttggcgatcagtttctccagctgcagtggataagaaacatacgaattaaatcaccttaaaccatagctaacaattttaactcaaagaaagagcacccacctgcagttgaatatcagctatcttctgccaggagaactcgaactcattgagcggcaccttggcggccttaaggtagcgcaggaagcccagctcctccggtcgcatcagaaggagggcgtgacccgaggtgcccgatcctctggccgttcggcccaccctgtgaatatactcgcgtggatcatctggaggatcgtactgcacaatccaatcgacttgcggaatgtccaatccacgagcagccacatccgtacataagagaatcccagattccgcgttgcagaactggaagaaggtggtcgttcgtttcgtttgcttttgtttaccgtggatggaggtcactggcagatcaatgtagttgaagagctcgtggtggtatttgacggacatgcaggacgagaagaacaccatcaccttcttcttacgattctttttgaggaacgtgaagagcacgagcagtcgcttctccgaggggcaaacaatgtacccctgctcgagtccatctacggtcgccgtgtcctggttgtcgtgaacccctacataaattggttccgacttaagggccagcttggaaagcgcttcgatgcgagccgtctgtgtggccgagaagagcatcgtctggcggcgttctaaaagattaggttagtttaaaaatacactaaaaacctttagttacccgtaactcacttggcagcagatttattatttgcttaagctcctcctcaaaaccgatctccagaattcgatccacttcatcgataatcaggcactgaaggttcttgtacagaaagtcgggcgagttttgtaaatgatccagcagacgacccggtgtggccaccagaatgttgatgcccttgcccaacttctcgctctccacctgccgattggagccgcccattaccaagccataagtgtgatggtggtgtgccatcagctctttgagcacaccgaaagtttgcatggacaactctcgggtaggtgagatgatgatcacgccggtaccattgcgtggcataaacctcagcttgtttatcagctcgacggcgggtatcaggaaggccagggttttgccggaacccgtctgggcagcacccaccagatcccgtccctttagtaggggtgtcagcgatttcgactgaatttcagtcatctcggtaaaacccatctccttaatggctcgcaatgtggcctcggacacggcgccctttaaagaggcaaagctgcgatcatccgaatctcggtaatccagtgcagccagtgaggattccacggtaaagggctcgtcgtctttagctggtttgccattctgtgccttggacttgttgggaagcaacttcgttttcttggctggcacaggttcttcttcatcttcatctgaaacaggtactcttggttaattttggttttcacagggatacagttttttagtattttatataattcagttggtttttaaatggatttcatgcctgccctgggcaacattaactcgctgcaccagagctgctcaaattcgcctttaaaaatcatcattattattggtagttagaacgaattccctaaatatcgacacttttacttaccttcctgctggtcatcatcttcactcccgctgtcaacatcctcctcatcaacttcggctacttcgtccaaatcgctatcctcatctgcctcatcctcctgctcatcgtcatctgattccgaatccgagttggccacctgaatttgttgcttttttggaggctgtttttgttgcttcttcttgggcagcggcgcctcctggaaatcctcctctaagtcgtcatctgcgggtcgaaaagtgaatcttacatatatttattaggcacacacgtttttaatcgtaccctcatccttggccacatgctttttactgagtttctccggttttttactgggtttattgccattttgtttgggtggctcctgcttttgggcgttcttgtttcccttcttctgcgagagctccttcttcatcttctcccgcttaacgatcttcttcatcagcagcttctcccgaatagacatattgctaactatgtatgctttttaatagagtttaatggttaaaaacagaattctcaaataaaatattgcgcgcacgtgttgctaaccattcaccccgaagcaaacgatattcagccagctgtgcctatcgataattgccaattcgatagttcaatgcaaaaggtgtgaccctatttgtaaacaaattttcaaccgtcttttgaggataagagaagcaaaagcgtttgcaaaacgtattttatatccattgtacattgctatcttcaactatgtgacttgtgtattacgagttaacaatattttttgtagactatcttatgataaggaaatgtgaattcccattttgaatggaatacgtcaatcacattttcttataagatcgtacaattccgcgttgacacatattaatttagtgtgcgatttttatgctctgtccaaccttggaataacatgtgaataattacaataaaggcacatctttgtcgctctccagcacattaattactagtatcgtaacaaaatgcatataaagtgcatataagtgaatgcgttctagtgcgacattatctgctccaccctcttgcgcagatcattgcgaccacaatcgcccagggcgcgacacagacgaagcagaaagtgcttgggatcgtggcaatcatcctcttcgatgagctgcagcagtcgcagaatctgggacttcaagtcgtgcgggtagcgctcctcgattgtgtccatttggccctcgccaatgcccgccgatcggcccagtcgtcgccaatagcgacccagttcctcggatattttcttaaagaccatcgttcgtttgtgatccgtaaaagcagctggggtggcatagttttggattgctgttggaggcacagcggcagctaattccgaaactgatggctgagcattctgggaagctggagcaatacggagctgctgacgaagttcctcggccaatcggagttcctggtacagattaaccggatgtccaagaatgttttccggctttgtgtaggcgctcagagcctcgatgagctgtg

SEQ ID NO: 13670 - DNA, 2172 bp, DROSOPHILA
gtttttaaccattaaactctattaaaaagcatacatagttagcaatatgtctattcgggagaagctgctgatgaagaagatcgttaagcgggagaagatgaagaaggagctctcgcagaagaagggaaacaagaacgcccaaaagcaggagccacccaaacaaaatggcaataaacccagtaaaaaaccggagaaactcagtaaaaagcatgtggccaaggatgaggatgacgacttagaggaggatttccaggaggcgccgctgcccaagaagaagcaacaaaaacagcctccaaaaaagcaacaaattcaggtggccaactcggattcggaatcagatgacgatgagcaggaggatgaggcagatgaggatagcgatttggacgaagtagccgaagttgatgaggaggatgttgacagcgggagtgaagatgatgaccagcaggaagatgaagatgaagaagaacctgtgccagccaagaaaacgaagttgcttcccaacaagtccaaggcacagaatggcaaaccagctaaagacgacgagccctttaccgtggaatcctcactggctgcactggattaccgagattcggatgatcgcagctttgcctctttaaagggcgccgtgtccgaggccacattgcgagccattaaggagatgggttttaccgagatgactgaaattcagtcgaaatcgctgacacccctactaaagggacgggatctggtgggtgctgcccagacgggttccggcaaaaccctggccttcctgatacccgccgtcgagctgataaacaagctgaggtttatgccacgcaatggtaccggcgtgatcatcatctcacctacccgagagttgtccatgcaaactttcggtgtgctcaaagagctgatggcacaccaccatcacacttatggcttggtaatgggcggctccaatcggcaggtggagagcgagaagttgggcaagggcatcaacattctggtggccacaccgggtcgtctgctggatcatttacaaaactcgcccgactttctgtacaagaaccttcagtgcctgattatcgatgaagtggatcgaattctggagatcggttttgaggaggagcttaagcaaataataaatctgctgccaaaacgccgccagacgatgctcttctcggccacacagacggctcgcatcgaagcgctttccaagctggcccttaagtcggaaccaatttatgtaggggttcacgacaaccaggacacggcgaccgtagatggactcgagcaggggtacattgtttgcccctcggagaagcgactgctcgtgctcttcacgttcctcaaaaagaatcgtaagaagaaggtgatggtgttcttctcgtcctgcatgtccgtcaaataccaccacgagctcttcaactacattgatctgccagtgacctccatccacggtaaacaaaagcaaacgaaacgaacgaccaccttcttccagttctgcaacgcggaatctgggattctcttatgtacggatgtggctgctcgtggattggacattccgcaagtcgattggattgtgcagtacgatcctccagatgatccacgcgagtatattcacagggtgggccgaacggccagaggatcgggcacctcgggtcacgccctccttctgatgcgaccggaggagctgggcttcctgcgctaccttaaggccgccaaggtgccgctcaatgagttcgagttctcctggcagaagatagctgatattcaactgcagctggagaaactgatcgccaagaactatttcctaaaccagtcggccaaggaagcctttaagtcgtatgtgcgcgcatacgattcgcatcaattgaagcagatcttcaatgtgaacacgttggacctgcaggcggttgcgaaaagctttggattccttgtgccacccgtagttgacctgaaggtgggcgcggccaagcgggagcgaccggaaaagcgagtgggcggcggcggtttcggattctacaagaaaatgaacgagggatcggcttccaagcagcggcacttcaagcaggtcaaccgcgaccaggccaagaagtttatgcgttagttttttagatttaagcagagatataccattgcatattgtaaatcagctgctttacttgagtgtgtgtatacatataggcaaaa

SEQ ID NO: 13671 - protein, 663 aa, DROSOPHILA
MKKELSQKKGNKNAQKQEPPKQNGNKPSKKPEKLSKKHVAKDEDDDLEEDFQEAPLPKKKQQKQPPKKQQIQVANSDSESDDDEQEDEADEDSDLDEVAEVDEEDVDSGSEDDDQQEDEDEEEPVPAKKTKLLPNKSKAQNGKPAKDDEPFTVESSLAALDYRDSDDRSFASLKGAVSEATLRAIKEMGFTEMTEIQSKSLTPLLKGRDLVGAAQTGSGKTLAFLIPAVELINKLRFMPRNGTGVIIISPTRELSMQTFGVLKELMAHHHHTYGLVMGGSNRQVESEKLGKGINILVATPGRLLDHLQNSPDFLYKNLQCLIIDEVDRILEIGFEEELKQIINLLPKRRQTMLFSATQTARIEALSKLALKSEPIYVGVHDNQDTATVDGLEQGYIVCPSEKRLLVLFTFLKKNRKKKVMVFFSSCMSVKYHHELFNYIDLPVTSIHGKQKQTKRTTTFFQFCNAESGILLCTDVAARGLDIPQVDWIVQYDPPDDPREYIHRVGRTARGSGTSGHALLLMRPEELGFLRYLKAAKVPLNEFEFSWQKIADIQLQLEKLIAKNYFLNQSAKEAFKSYVRAYDSHQLKQIFNVNTLDLQAVAKSFGFLVPPVVDLKVGAAKRERPEKRVGGGGFGFYKKMNEGSASKQRHFKQVNRDQAKKFMR

SEQ ID NO: 13672 - DNA, 3184 bp, DROSOPHILA
gttccatacgccaaagaaagcacatcagctcccggtgcattatgattgtaacaaatttcaaataaaactttgcattcccagttcaatttgttgtttaattattaattataactgtaactttacttcttgcttataactaaactttactgccaaattctaaattttttgccaaattttcgcatttttgaaaccatcatgaaaatgtaaaaaatggtctaaacttaatggcctgtagccaaggtaccgccttatataccctcgcggaacgcctccaacccgggatttcaccaccgatttttccggagcacccggacatatcgctatgttacaatcagtgttgctagcaactatcttccagatacaattgcgggtgctggcgcccttacaaccgcgtaggttgagaaaaggaaatcacaatagcctttagtagctgttgaattagtcttccagaaggcagtcagaagttccaggcattcgaacagcagaaccttactgttcacacgtttagaagttttaaaataggtggcttaaaattccagtaaagcatcataatatcccggcttatgtgtgtccaacatggataacatgcgctttacggacgatcccactggtgaggggcgtacaattgatggattgaatcagatcccagctgaaaaaaagtttatatggaacatacccaacaaagagtacacgtttaaactgcttaagcagttggtcaattagatgcgtttccatgtggatcgccgtctgcggtcgttatacgatcgtctagagtacatgttcgtcggtagcgatctcaacttggccaagcgccgtcttgagatgttcgccagatggcagaataaataattccacgcaatgtgaagccatataaaacgcgacgttatctaggagaagtgttgaaatgcaccagaatcttgtattttaaaccaaattccaatcacattttagcacttaattcatgcgcatttgtgtttagttcaattacataattcacttagaattcactaaactatgtttttaatgtaacatgagtttacagagtaaggaacttaagatgggggcaaaaaaaaaaaagattttcagttttcgatggcttcagatccagtcagcgcttggaggaggcttgctgtgtgctctgcacatcgccctacatcttctcgtaggtctcgctgtacggacaggtaatgcaggtgtgggtgtaggtgtcctcctcttcatcgtaggtgtccggcccgaactcgtgctcgtgaacttcgtgcgtcttcttggtgtagatgctgctgcgcacctccatgcgcagctgcttcatcttcttgttgtacttgcgcgccttgccctcctctcgcttgtcctcgcgcgcctcgtgctggcgcaccagctcctcctcgctaccccagacctccagggcgcgctggtgaatctgcagatgcagatacagcttcatctcgccccaacgtacgttgtgcggattcttgcggcttatgtaccgcagcttgggctcccgcttgtcgaaatcgcagtccttcagcaagtactccgccttggcctcggtgcgggtaatcagcgcgtagcgctcatccttgtcccggcacttgtcgcacaccgagtgtccgaagttgttgaacaaataggagtcggcgaacatgtcgccgcactccaggcactcctcgtactgcactggtatagcaatggcgtcgtccaggatcggcggggcctcctccccggacttattgaggcccgctgggcccacgcccgtgggcataacaggctgttcgagcaggaagcccccgccggagtctatgtacttggtgccctgcaccttgatcacagagcttccctggctgagcgccgcctccggatgggtgccaccctccttgttgctgtcggagattggactaccggttaggtataatcgctcgggagtattggttaatggatagcccacctggccagctccttgaatggatgcgaaaccaacttggcctcccgcaatttctgcgccttggcctggttcctttcgatccgcgccttttgggcattggtcagcttggacttcttctccgccggcggagcagattcgttggtagagacctccgcagacatggcgatttcacaagttttagttttttgtgcgcgcaacttctcagaaattttgtttataaaatgcttctttttgccgatttgtcattccacggaaatttgtttgttcagtgcagccagcttttacgcggagaaaataactgttattggcggaaatgtaaaaatacgtgaaaagagtttttttcttttacatataaataaatcaatgtcacacttctcattcaactgtaaaacaattttttagatttgtaagcactcaatttgaatgcttttagtcttagttattttatttttcgtacggtagatgggcgtttagtattttaaccgcatcacggtcacactggcggatttgtttttattttggtcgccatgcaaagtaaacaccgcaaactgctgctgcgctgcctcctggtgctgcccctcatccttctggtggactattgcggcctgctgacccacctgcacgagctgaacttcgagcggcactttcactacccgctgaacgatgacactggatctgggtccgcatcctctggactggacaagttcgcctacctgcgagtgccctcgttcacggcagaggtgccggttgaccagcctgcgcggctcacgatgctcataaagagcgcggtgggcaattcgcgacgtcgggaggccattcgccggacttggggctacgagggtcgattctcagacgtccatctgcgtcgcgtgttcctgctgggcacggccgaggatagtgagaaagacgtggcttgggagtcccgcgagcatggcgacattctgcaggcggagttcacggacgcctacttcaacaacacgctgaaaaccatgctgggtatgcgctgggctagcgatcagttcaatcgcagcgagttctatcttttcgtggacgacgactactatgtttcggccaagaacgtgctcaagtttctgggcagggggcgtcagagccaccagccggagttgctgttcgccgggcacgtgtttcagacatccccgctccgccacaagttcagcaagtggtacgtttcgttggaggaataccccttcgatcggtggccaccgtacgtgaccgccg

SEQ ID NO: 13673 - DNA, 1119 bp, DROSOPHILA
atcggcaaaaagaagcattttataaacaaaatttctgagaagttgcgcgcacaaaaaactaaaacttgtgaaatcgccatgtctgcggaggtctctaccaacgaatctgctccgccggcggagaagaagtccaagctgaccaatgcccaaaaggcgcggatcgaaaggaaccaggccaaggcgcagaaattgcgggaggccaagttggtttcgcatccattcaaggagctggccagcaacaaggagggtggcacccatccggaggcggcgctcagccagggaagctctgtgatcaaggtgcagggcaccaagtacatagactccggcgggggcttcctgctcgaacagcctgttatgcccacgggcgtgggcccagcgggcctcaataagtccggggaggaggccccgccgatcctggacgacgccattgctataccagtgcagtacgaggagtgcctggagtgcggcgacatgttcgccgactcctatttgttcaacaacttcggacactcggtgtgcgacaagtgccgggacaaggatgagcgctacgcgctgattacccgcaccgaggccaaggcggagtacttgctgaaggactgcgatttcgacaagcgggagcccaagctgcggtacataagccgcaagaatccgcacaacgtacgttggggcgagatgaagctgtatctgcatctgcagattcaccagcgcgccctggaggtctggggtagcgaggaggagctggtgcgccagcacgaggcgcgcgaggacaagcgagaggagggcaaggcgcgcaagtacaacaagaagatgaagcagctgcgcatggaggtgcgcagcagcatctacaccaagaagacgcacgaagttcacgagcacgagttcgggccggacacctacgatgaagaggaggacacctacacccacacctgcattacctgtccgtacagcgagacctacgagaagatgtagggcgatgtgcagagcacacagcaagcctcctccaagcgctgactggatctgaagccatcgaaaactgaaaatcttttttttttttgcccccatcttaagttccttactctgtaaactcatgttacattaaaaacatagtttagtgaattc

SEQ ID NO: 13674 - protein, 296 aa, DROSOPHILA
MSAEVSTNESAPPAEKKSKLTNAQKARIERNQAKAQKLREAKLVSHPFKELASNKEGGTHPEAALSQGSSVIKVQGTKYIDSGGGFLLEQPVMPTGVGPAGLNKSGEEAPPILDDAIAIPVQYEECLECGDMFADSYLFNNFGHSVCDKCRDKDERYALITRTEAKAEYLLKDCDFDKREPKLRYISRKNPHNVRWGEMKLYLHLQIHQRALEVWGSEEELVRQHEAREDKREEGKARKYNKKMKQLRMEVRSSIYTKKTHEVHEHEFGPDTYDEEEDTYTHTCITCPYSETYEKM

SEQ ID NO: 13675 - DNA, 4273 bp, DROSOPHILA
caattacggcggagttcaggatctgggcagctcacatctttgcgtggagccgatggacggcgaaagggagctgcagcggttctccaacagcagcacctgcgccgcctgtccggcttccgtgggcagtgtactccatctggtgcgaccgggcggaggtcgctgcgtcattggggttgccacgcccacgggggctgagtgcgaggcacggaccatgtacttcacgggtctgctgagtccgccgttcaggcggtttgtggagcaggagcagaagtagtcatccaggttaagttagaacaatctatgcaaataatgtataaattggatgagaagaacgcagaagtgaaattgatttcgcaagcatcagcttgtgaaataattggagcagcatggtcacactgaacacgatctgactgtacttttatgcctaagaatataccagttaacatctacccaaaacctcattgtagtaagtaaattaatataagaaacattataaataaattttatatatttattacaattctctctgttcattcaaaagttaatagagtaaacagcgccttcaagttacgtttagttattgcataaatttgcaaatatttgcacacatgatgactttattcgctatttgttcgcataaatcaagcacttggaattgttgaaggtctcgtttcgaaacagttacatcttaagtactgctcttagttctttgatatacaaattcaaagggaggagactgtgtcattacagtttggactatgcagcataagaaactcattgctaattccgctgaaaaacgatctcctcttatatttatttatgtttaattattcataaaagcattgctcgggttttccgattatttcggatcggttgtggctctggattcaagaatctttcagagatgaaaaccggttggagagcaatctattgccgcctagtgtgtagattggactagtcacagattgggattcagttgcactggagatgctttactgagcggtcagaaccgtcgtcccagcctgaccgtttcaatccgccgcgtctgtgaccatatcggtcagattctctccgccatagccaccggttttaaagctccattgagtttacgtcgtgtgcagttttgtttttgctggtttcctcgtgttttgcttgatttattgtattgtattccttgtgtttttgtgctgtgcttccgattgccatactcggagtgatcggtgcactcgaagaacatcgaaacagcgacgtattcccttatcaaagtctggcaaaaggttgtgtcgaaggtgggttccgtggaaggttcgtgccatgagcataagtcgtacaatcatacatgtgattagcttataattactgcaagctagttcagcactcacaatcaataagcgtaagcggctctatccaaactaaacagcattctgtccttatcagaaacaaatccccaactcagatagtttaggaggttttcgatatcagctataaatacccctcgtactgagtgacagaacgaagattacagtcgccaaaaaaaaaaggtgaatcaaccgatccaacctttccatgttatgttttccgttggatggtgaaatactgccttgaagaaaaaaataatcttgagttttcctcacccacttggccctccaatgccaggagtgactgtagttcatgtctagcatctgtactcaataagttggtcaatggctgctggtttattgtaatcagaaaatcatggcgaagctcattcatttacattctccattaattgcagcgaattaagatgccattgaagtggtccctgctactcggcacttttgtgctcatcagctgctcctccgtggaagcagccgtcacaggtgagttccgatctcagccaggtcacatcaagtatttgcccgactcgaatcttgcgtttgtttcagtgggtcgggcctgcaaggtgacggataccatgcccggtatctgcagaacatcctccgattgtgagcccctaatcgatggctacatcaagtcgggagtcctgacgctcaacgatgtgcccagctgtggcctcggcgcttggggtgagatcttctgctgtcccaccaagccgtgctgtgacaataggtaatccgcgaattgcttccattgggatcacatagaaatgggttgtttgcctttgcagtaccataacaagcgtttccacaagctccaccacaagcacaaaagctccaatgaccagtggtcgtgtcgatgtgcccacgttcggaagcggtgatcgcccagcagtggcaggtgcttactcttttgatcagatcactcctagagttcctctacttatttccaatcccacgatatagcctgcaagaagattcgcgagcgaaaacagcagaggagcggcaatcaattggtcatacacatcgtgggcggttatccggttgatccgggtgtatatccccatatggcggccattggttacatcacttttggcaccgatttccgatgcggcggatcgctaatcgccagtcgcttcgtcctgaccgccgcacattgtgtcaacaccgatgccaatacgccggcctttgttcgcttgggagctgtgaacattgaaaatccagaccattcctaccaggatatcgtcatagtgagtcactgtgcttatgcattaagttatagccattctgatcgataccatatctcagcgaagcgttaagatccatccgcagtatgtgggcaataagtacaacgatatcgccattttggaactggaacgtgatgtcgtcgagacggataacatccggcccgcttgtctccatacggatgccaccgatccgccatcgaactccaagttctttgtcgccggttggggcgtcctaaatgtaaccagtgggtagcacaaaaagttccatatcctccacttccactaatggctaaccatccgcagctcgggcgcgatctaagatcctgttgcgcgctggtctggagctggtgcctctggaccaatgcaatatatcctatgcggagcagcccggttccataaggttgctcaagcagggcgtgatcgattcgttgctgtgcgccattgatcaaaagctcatcgccgacgcatgcaagggcgactccggtgggccgctcattcatgagctcaacgtggaggacggcatgtacaccatcatgggcgtcatctcgtcgggattcggatgcgccaccgtcacaccgggactctatacgcgtgtctcgtcctatctggactttatcgagggcattgtctggccggacaatcgggtgtaaagttgggaaaagtaaagtttttgttttttttgtatgtatattatttctatttgggatcaggactgcctgatccatcgcaattggcaaacactcatctgtgatctctatgagcaccgcgatcgaaccatttaataccaataaagtagatacgttttaagatataatcaatcggtacaatattatttctggcagttcggtttccagaactctgtgaagtgatttttctggttctgtttaattttagagggatttctgggtcaccacttttattgaattgctgcactgtataaaaaaaatggggaaatacaaacagaatgcatttatttcagaaagatttgtcataagaaatttaaattttaagcatatgtttcagactataagttgaaaaggacttcttgggtcaccacctaggtcgcaacctaggcaagaaagtaagtatctgggtcaccactttaattagagaagaattatacaaaaaaaaaaaaaacaagattactgcaattgaaactatatatatggtaagttctaaaacacgattctgtgacacaattatactcgacttttaaaggtgtaaatatcggggtcaccaagcgcagcatagaccttacgcggtatcctttagtccataccgctcgcctgttgcttacccactcgctaattacaggctgcctttgtgctttgtgtgctctggcttctgatcgcttcggatcgttctgcgattctgcgaagtggtggaatgggaaaccggttcgccgctcagcgggagaggatcggctctgggtgctatcagctgctgggtccggcgcttcttggtcgacgtctaaatgggcctcatcggttccagctccagctccagctggggctcagaagcttggcttcagttgcttgggcgatgcgttgctgagcggtcagagccgggaaaatagccagcagattccataccgccgcgatttgtgatagccaccggtttttagctttattgactctgctggtgtgcttt

SEQ ID NO: 13676 - DNA, 1474 bp, DROSOPHILA
cggtcagaaccgtcgtcccagcctgaccgtttcaatccgccgcgtctgtgaccatatcggtcagattctctccgccatagccaccggttttaaagctccattgagtttacgtcgtgtgcagttttgtttttgctggtttcctcgtgttttgcttgatttattgtattgtattccttgtgtttttgtgctgtgcttccgattgccatactcggagtgatcggtgcactcgaagaacatcgaaacagcgacgtattcccttatcaaagtctggcaaaaggttgtgtcgaagatgccattgaagtggtccctgctactcggcacttttgtgctcatcagctgctcctccgtggaagcagccgtcacagtgggtcgggcctgcaaggtgacggataccatgcccggtatctgcagaacatcctccgattgtgagcccctaatcgatggctacatcaagtcgggagtcctgacgctcaacgatgtgcccagctgtggcctcggcgcttggggtgagatcttctgctgtcccaccaagccgtgctgtgacaatagtaccataacaagcgtttccacaagctccaccacaagcacaaaagctccaatgaccagtggtcgtgtcgatgtgcccacgttcggaagcggtgatcgcccagcagtggcagcctgcaagaagattcgcgagcgaaaacagcagaggagcggcaatcaattggtcatacacatcgtgggcggttatccggttgatccgggtgtatatccccatatggcggccattggttacatcacttttggcaccgatttccgatgcggcggatcgctaatcgccagtcgcttcgtcctgaccgccgcacattgtgtcaacaccgatgccaatacgccggcctttgttcgcttgggagctgtgaacattgaaaatccagaccattcctaccaggatatcgtcatacgaagcgttaagatccatccgcagtatgtgggcaataagtacaacgatatcgccattttggaactggaacgtgatgtcgtcgagacggataacatccggcccgcttgtctccatacggatgccaccgatccgccatcgaactccaagttctttgtcgccggttggggcgtcctaaatgtaaccactcgggcgcgatctaagatcctgttgcgcgctggtctggagctggtgcctctggaccaatgcaatatatcctatgcggagcagcccggttccataaggttgctcaagcagggcgtgatcgattcgttgctgtgcgccattgatcaaaagctcatcgccgacgcatgcaagggcgactccggtgggccgctcattcatgagctcaacgtggaggacggcatgtacaccatcatgggcgtcatctcgtcgggattcggatgcgccaccgtcacaccgggactctatacgcgtgtctcgtcctatctggactttatcgagggcattgtctggccggacaatcgggtgtaa

SEQ ID NO: 13677 - protein, 394 aa, DROSOPHILA
MPLKWSLLLGTFVLISCSSVEAAVTVGRACKVTDTMPGICRTSSDCEPLIDGYIKSGVLTLNDVPSCGLGAWGEIFCCPTKPCCDNSTITSVSTSSTTSTKAPMTSGRVDVPTFGSGDRPAVAACKKIRERKQQRSGNQLVIHIVGGYPVDPGVYPHMAAIGYITFGTDFRCGGSLIASRFVLTAAHCVNTDANTPAFVRLGAVNIENPDHSYQDIVIRSVKIHPQYVGNKYNDIAILELERDVVETDNIRPACLHTDATDPPSNSKFFVAGWGVLNVTTRARSKILLRAGLELVPLDQCNISYAEQPGSIRLLKQGVIDSLLCAIDQKLIADACKGDSGGPLIHELNVEDGMYTIMGVISSGFGCATVTPGLYTRVSSYLDFIEGIVWPDNRV

SEQ ID NO: 13678 - DNA, 3036 bp, DROSOPHILA
ttttcagttcgccgttcttcgcccgatgttccaaggaaaaatcatcatactcgtgcacgcacgcacccacacaaatacaagaacgggcccatatgttgggcgacgttgcccggcaaatgttttttttgttgtttactttctgggttttgacggtgcggtcagctgtttcaaaacaaatcgctcggtgttaccagctgacttcgctcatcggccactaaataacatcggctcacgcgaaaatcatccgaataatactgattcgagaatagcgcgttattcaaaggaaatcggttttttgaaaagcgttaatatttgttgatatcgtcgtggattgatatttagaattagggattgcttaatcgtatagatatttattacgatttacattcattgaactaaattattgttgataaaaaaatatgtttgtgtttttaggccccgcattctctatactttatgtcgaacaaatcaagtcaatcataacattaaaactatggccttgacttgcattgttaactgccctattcgacatgactccccaaaaagaagtacaacttaattctttaatgcaacccaacgcgtcagcaactcctgaaggctgccgaataaaaagtgcattgaactggggcctgggaaaggacaacaaattcggcatttgtctgggaattcaacacgttgccaattcacaaagcagtgggcaaaaaaaaagtgaatagtacacaaaaaattcgaaggcaaaagggtaaatcttgattccggaatcagaccggtgagaaggaagccagtcctaattgcatttgcagccgcacaatcgagtggtttcttgataagtcatcctcatcgacaagggatgcagtcgcagcacgagagattgcaaatttttcggggcttatgcagcggtttttatatcgttttttggcatttcacttatgattaatggagacaggcaaaggggttgaaacagaacagtcacatttaattcccggcgatcgccgctggatcaaatgtcaattatcacgaacacctcgtagttgctggcctccacgtcctgaatgatttgcatggccgagtatgtgattgccttcacttcggtgccctgcggatgtttccccagctcaaatggttccccgtaacaatggcaggaaatctcgaagttttccacatcgaacttggtgatctccagcttcttgcacaccagatacggttcggcagagaacaggaacagcagctcgtccagaaagtgaaagagtaagctctccagatcatctccatgcgcttcgatttcaaagcactgctccacggacacgtaatccagttcggtcatatatccaaacatggccactccgcactgttcgaacgcctctttcagcgacgatccccatccgtggattctgtcaaatgggaaggattccaacatcatccgtttatattaagtaaattaattatgtctattgtagccgtaagttataatttatatacaaaactgctgccttttagtggcgtagtaaaagaattatttatgatctactacttaataatagtcttgttgttttaagcgatagtagtataatataaaagtcagaaaaaacttgcattacatataatcttcaaaaaagcagatacatttgacgtttaaaaagccgtattccctaactatgaacataatacataggtttgggaaaatatgaaaaattataatggctttaaaatatgtataaattaaaataaattctttttcagaatgtttgctatatctcaaattctaatacgaaagcgcttattagaatctagtttatacgatcatctggatttttcattcacaaatagcgaaccaccctactccacatggctaacgggcacacttgttgtttttgttgttatcttactcactgaacatccgccgtgtgatccaggtctgcaacgcaatgtgatgaaatatttagcaacagattattctcctgcaaatcgaagaactactcacactcgtacttcatctccggcagcaggaagttctccctactgaattccacctccattattgttagttatagctaaagttaaagtaaaattcgcggacaaaaactataaacaaaccagcaaccgcttagtgtgaccatctatgcgcaggggaaaatacctactgaaaggaatataccgagctccaataagaaattgttaacatacaaattacagaaaatactgagctcaaaccgggaaatgttaacatacaaattttaataaaatgtataaaattgtttgtaagaaatatttgggttttatttaataaagagtaaactataaattataaagattgaattataagataaaagtttctatcaagcttttaaattcgaaattgttaaaaatatctaaaaatacctaaaggcttcatttatttttaactttgtaatttaaaaaacttgtaatttaaatatgcatgtcaaatgggaaggattccaacatcagaagagaagaaaaataaaaataatgcttcctcctttaataaagtgtttacaaaatgcttcccacggcccttttagttaaaaaaaatatatctaaaaacgttacagaacgaaagaaataaaattgtgctaaaggctgtgattgtaataaaattaagtaattttgagcaaaattaaagcagaatttccagtttatgcccaccatttgttatcgcacttaaagtgctacaaagtgctggcgcatgttttcagcccagttttgaatttctgtaagagcgaccttgtcctttcattaaatcgcaatcagccataacaactgaagctgcaaccttgtattttcatttgccaaaagaaacagtccacaaaatcttcttctggcctaccggcagcattgccgtcaatcgttacgattgtcaatcacgtcgcttgatttattcaatcccatgaacttgagcgctggctgtgagtacttgatttcatacttgaataatacccattgacggacatgggattgtctaataaatattgcctcattaaattcagatcacttttcaaccagcggtgatgggttatt

SEQ ID NO: 13679 - DNA, 471 bp, DROSOPHILA
atggaggtggaattcagtagggagaacttcctgctgccggagatgaagtacgagtacctggatcacacggcggatgttcaaatccacggatggggatcgtcgctgaaagaggcgttcgaacagtgcggagtggccatgtttggatatatgaccgaactggattacgtgtccgtggagcagtgctttgaaatcgaagcgcatggagatgatctggagagcttactctttcactttctggacgagctgctgttcctgttctctgccgaaccgtatctggtgtgcaagaagctggagatcaccaagttcgatgtggaaaacttcgagatttcctgccattgttacggggaaccatttgagctggggaaacatccgcagggcaccgaagtgaaggcaatcacatactcggccatgcaaatcattcaggacgtggaggccagcaactacgaggtgttcgtgataattgacatttga

SEQ ID NO: 13680 - protein, 156 aa, DROSOPHILA
MEVEFSRENFLLPEMKYEYLDHTADVQIHGWGSSLKEAFEQCGVAMFGYMTELDYVSVEQCFEIEAHGDDLESLLFHFLDELLFLFSAEPYLVCKKLEITKFDVENFEISCHCYGEPFELGKHPQGTEVKAITYSAMQIIQDVEASNYEVFVIIDI

SEQ ID NO: 13681 - DNA, 8767 bp, DROSOPHILA
aatttcatttgttttttgtaaaatgcggttgactgtggatctgtcgcatttgaacttggcacaaatttcctttttgtccactttgttggtcactaactcgattatttgaagcttttcctttagtgttagtccaacgacacgctttgttttacccattttaataactttgtgtcataagaaacaaaaacacaaaaatcacgatcaaagcaaaaacaaaaacggacatgcgcagatactgaaacgagttggcattcttgccatcttttagatatgcaaaaatgattcatagatggcgcagctaactttgatgatattcattgaaattggcaaaaaaaaacagctgatatgatgcacttaagttaaaaaggctgttatctgcgatgcagcaaacgtatgaattttcgtacaaattttctattcacacaaaaaaatggaaaaataatgcagatatcttgccgatgcagctaactatcgatgcagctaagcgaattatactgtagtaatcattttagttttttgcagatgtgattctaaatttgaaatagttatctccatataatatttatgagatataaaaagaataaatattatgtgctgcgaagtagaggcgtacgcaatcttgtttttcagacatgatctggaataaaggagggaaaactcttctaaaaattttggaatataacaatttggaaaaatggaaccatttttatatgtcttcccgattccacggacaattgaatttaaataaacataggcactcattattgctgcttatataagtagcataccacagaaaatacaattatctcaccattaagctaattgccaaaaataaagtatctgttagtacatatttgttgttttcatattttgttgtcgtttaagcaatttatttgcataaaacagcaaacaaattcaaaaagtgcgaacatcgagtacacatcgattggcactttcgattactactatcgccgccattaatcgcatacctcccatctccacacagctgttttgttaaacaaaacagaattattcgccaattgtttacaaaaacactcaaaaagagtctaagcaaacaattggcaagcaagtgaagactggctagtctcagattaaattattccataagtgatggacagccaggtaagtgggcaaatcgagcgggacgtacccttgcggctagttgatgtccggtggttagatagtaactactactacgtcgcctgtgagtgtggcaaaattatcgcttcacagcaattagtcgtacttatcaatgcgcccattgtgctaaatctaaatatgcgagcaataccgtgtctccaatatttaagcactgtcgcagagtgacgtaattacgctgcgggggcgttgtcttttctctctttttcaacgagataataacctgtgttttattgcctgtcgcaggcaccgatcgatgatctactgctggacattgtagacaatgcttggcgcatggaagttctacccttcgaccagattctagtgccacgcgaaaagctacccgatccagaggcggacggcggtgattcacacctgacggtcagcgagcaggtgagtacatttgggattttattgccatatctgtatacttctatggtctgaactcgaacaggagcaaaagtggactgatctggcgttgggctcgctggcaccggacgcagccctcatcgatcaactgaacatcacctctatctaaccaaggaccgtgagtccacgggcgagtgccaccgcctcgccaaccaacctattagcaccacaagcccaactcctaacaccccgacaacatgactagcaacaaccaaaacaatagctcaagccaccagcacctacactccccctccaaactaaccgaatttgcccgcaatttcgaagacaagccggaatcgctctttggccgagtggtaaacaagatccagaatgtatacaaccagagctacaataccgtcaacgatatatcaagtgggagcagcagcagttcctccacgcagccagtgcaagtggtgggcaaatcacagttcttcagtgactcccagacttccaccgctgagattgccgatgtggaaacctctagccagagctcagttcgcccccagccacccaccacgctcagcataaggaccaatagtgagacacgtggcacaagcacctccagcaataccgctgcagaggactccgaaaccagcgaccgcgtcgaaacgctgccgctgccaaccagcgaagcgaatcaggggcgcaccgtttctaacgtcctcaaacacataagcaatattgtggccacaaaaaacaataacgtgagtgaaagtcataataccattatcgttttaaaaatttgaatgattcactggaactttaccacaataaaatatttctgttgactcattttttttagctttataagacaaattcctacatttcatttcaggatctgcgaaactacaaggacacggagctgcagcgcttttggatgcccgattccaaggctaaggaatgctatgattgctctcaaaagttctccaccttccggaggaaacaccactgtcgattgtgtggccaaatattctgctcaaagtgctgcaaccaagtggtgcctggcatgataattcgctgcgatggcgatctcaaagtgtgcaactactgctccaagatagtgctcacattcctgaagtcctcaagctctgagatgggacaggatatgcaggagctgcagcagcacttaagtaacaaactggaagtacaagatagtggcagctcgcttgcaaaacatccccagatgcaaagggcaccccttccgcgtaagacatcagtgggctatcaagaggagcgattcagttcgcatccaacttacacaaccctttccatcgacgatcgcaagaatatcctgcagcagtcaaattcattaattaccctgcacgaggaaatgcagcgtgatctgcctgctcaaaattgtggtcagcgtctgattgagtttctcaatagtaataataaatcagcaaacgaggtgcaggcggtggccatactgaatgctatgctagccgctggtttcctcgagccaatcgtacccgatcccgagcaaatggacttcgattcgtcgctacactataagttctccaaaagcagcagttcggatacctcccgaacgatgagtccgcaatttgaggcgaatccccatgcggaaccacaacctccaaagtcaatggatcaatcagctgaagaaaaggagaaggagctagaaaatgaactggaaaacgatcgatgctataccacagcaacttctaagcttcttgcctcctattgcgaacacgaagagcagctactggcacagatgttgcgcgcacataatttggaccaggaatgggacaaggtgcttcagatgctttgttccacggcagcgaatcacttcaagccagagcattgtagtaacgatctcatggacatacgtaactatgtaaactttaaaaaggtgccgggtggcagacgcaaggactcgaagattgttcatggagtggcattctctaaaaatgtcgcccataaagatatggcaactcatgtgccctttcctcgcatactgctgctgcagtgtcccattgtgtacgagcgtattgagggaaagtttgtgaccattgagaccgtgctgctccaggaaaaggaataccttcgaaacgtttgcgcccgcattatgagcttcaagcccaacgttgtgcttgtccacaagaatgtggcgggcattgcccaggaccttttgagatcctatgaagttacccttgttctggatgtaaagctttcggtaatggagcgtctgtcacgcaccctgcagtgcgacattgtcagttcaattgagtcgaatataaccatgcccaagctgggctattgcaatgatttttacatacgcaactataatggcaaaacgttgatgttctttgagaagctgaccaatccccggggatacacctgtctcctcagaggtgggagcaatgctgaactgacgagggtcaagcgggtggcatcggccctgctctttgcacgctacaactggcgcttggaaatgtcattcctgctgaacgagttcgcccaaccacttagtccaaaaccttcgatattcgactccaaggaaacaagccccaaaacggaaacggaggcagaacttcgatctaagcgaccaattattttagagcgcaagtccgaggataagatcaccaccatcgtcagcgagaatgtgtctgatttcacggatccattgcgtgcatcacaagccgaagccctgtccacttcgccttgtgctccacccgtggttgaggcgctagctgtggaaccgcgttacgacaacagattccgcacggcactcagttccacgctgctctctgtgagtcccttcctgacatttcccctaccttatttggaaacggaacagggaaggaaatgcaagctgcgtaagctgtttcccgcagagctatacttttccaaacaatggtcccggaccggattggagaggccagatagcatgggagacggcgaagcagggaaatctgagccaggaaacaaagagaaccagatgcagctacttccagcccatgattttgtgctgatgaagatcacagcacctgctagcagtcgagacattcagtcgaagctagctgagttccgctcctttggcggtcggttacccaagggcaaggctccgagtaagcaaacaatccgattcatctataaatcattgtcattaccactcatttatcccacagtgctccgaccgaaaaaaaagaacgccgaagtgatccagcgaccgcagaaggtcagtgaggagcaactgtacaaggatgcccttgatccgcagaaccatcaacgtctaccggtgctcttctgcagcttccattacaatcccaagggcgtttcgtcgttctgcaagctgcccatgctgctggacatgaagttctacgggcaatatgacatcatgctggagcagttcctccaacgttactgctgtctttttaactccatgtgcccgtcgtgcaatctgccgatgctgggtcatgttcgtcgatatgtacactcgttgggttgcgtacatgtctacctaaccgaggacctaacccgttccgaccccacgcgtatatactttacctcctggtgcagcatatgcaatgccactacacccactattccgctttccgatgccgcaaagtgcctttccctcgccaagtaccttgagatgcgcttccatggccacgcctacaagagacgacctccttcgacggacgcagaacaaggtggcactgtatgtgaacactcattgcatcgtgattatgtgcaccacttcagtttccgcggtgttggcgccaaattccaatatacgcccgttgaggtttgggagacggatcttccttcgttgactgtgcaactggatttgccgcaaccatttcaaagtgcccaagtccaggaggaaattaaaaacttttcgataaagggtcacgaggtttacaacaggattcacgagcgtattgctgacctcgccaccgaggaagagaactcaccactggtgcagcatctgaaaaccatgctcacgcatgaccagtttatcttcaagcagaagattgagatcgtacacacactgctcacggataacagggctactgcctacgacactagcgatgctttggccatggcaagaagagctctggcagagagcattgagctgtggggaccgcggttgcaggagatcgagaagctgaccgccaagcaggcgcatcacatcgactctggaaccatctgcacggaggaactaagaccggaacaggttcagactgcagattcttctaaagttaccacctctagtttgccaaaggagaatgatcccctggagtgtccaagcgaggacactgaaactggcgcatcaaacagtcagactgttttggacaagaatttctctattgaccagatgttggcctctaccgttaacgtttactcggataaaaagtctataaggaagattcttacccagcttctgccatctggtaatcaggttaaccctttgcagtcgccatttccggcacaagatcatctgacgcttccattgggcagtattcccattcacgtgagagaaaccgatctcagttcagtgattgcatacagtttgacctcgatggattatcaaaaggcaatagacgaggcggaggccaactccaatgctgcccattcaagtccgcagttaaagcgaaaaattccattagcggaaagcgttagcgacgccgaagacagtccaagcctttcgcgtacttcgagcaacacaagtgccgctcccaatgcatcggttccttctccagctaccgcggcctccgagtcggaggaaaaaagcaaggaacgcataaagcagccaccgagtccgcatatcacactggcattccaagatcacagctgccagttccagtgtaagatctactttgcccgcgagtttgatgcaatgcggtcgaagagtttgaagcctcccaagctagacaaatccctgtaccgccggctggagaagagcaagatgcgggaggagctgagaatctcacagagtcgcaccgggtccgaaatggagctggttcgcaaacccagcgacgttggtgcgcctcgaaccactgaggatgattccaatcaggaggaggacgctaggatagcattggcgcgaagcctttgcaaaagtgtccaatgggaggcgaggggcggtaaatcgggatcccggttttgcaagacgcttggtaagcttaaagattacaaataaatatgagtttaaaacttattcactttgaatgcaaccagacgatcgtttcgtgctcaaagagatgaactcaagggacatgaccatctttgagccatttgctccgaaatactttgagtacatcgacaggtgccagcagcaacaacagcccacattgctggccaagatctttggtgtcttcagagtcagcgtgaagaaaaaggagtgggtattgttgtattgtatatactccagttctgtaacttacgcatttttaatactagttctttcgtggagcgttctgtgatggtcatggagaatctgttttacggctgcaatattgaaaacaaatttgatcttaagggctcagagaggaatcgcttggtggatcccagcaatcagcaaggtgaaattgtcttgctggatgagaatctggttcagagtaagtctgttttccatacaaacactaataaattgtttaaatataatattactttgttacagtgtcctggtcaaagcctttgtatgtgctgtcccatagcaaaactgtcctgagggatgccatccagcgagattcgtccttcctggaaaaaaacctcgtcatggactattcacttttggtgggcttggacaagaaaaatggcgtcttggtacttggcatcataggtttgtctcatcttatccctttcaatgtctggaataatttgacgttccttttgatagattacattcgaacctttacgctggataaaagagtggaatccattataaaaggatcgggaatccttggaggcaagggaaaggatccgaccgtggtcaatccggagcgctacaagcagcgctttatcgatgcgatggatcgctatttcctcacagttccggatcgttgggagggcctttccaaggtctaatccccttcacccacccacacacacacacacacacacacacacaaagtgcacacgttagttaacttaacatagctatagacgcaataaagtagacgccaatccaactcaattcgatttcaacaaccaacactctgtcagccagcatttccgactccgcaggcaaattgatttggccttgacccgcatccgcagcccggaagccaccgctgctcatgacaattgaaagccatgtacttcggagttgcgtgccaggcgaaaaaggaaattattatcatgatggagaccgcgtcgcgaaatgaaatcgttaagaggcgagtaaatcaggcaaatgtgcccattggagtctcataagcatggtttcattagcaaggcgtcaaaatgccgcgaattgggttaaagaactcaactctgacagctgcagcgggtggccaaaatcggaatcaaaacaacataacaccatttcatattcaaatcaactgcagctggcaacttttgatttcccaaacagcaggagcatgagaaggaggacacaaacggccggattgcatgtggcagcacttagagctcaactcaaaatataaaatcctcacattgttgtaatccccccagtgacaccttaagtcagtcagtcgccgtgggaaaatgttggcgcagcagaagcgcactggagttacggacgctgagggtggcaaagtggcaagttggccaggtggaaatgtcggaaagttggcgtgcgaaaactggctaacttcttggtggcgcgcactgccaccattcagttcggatttacgatctgagcggtcaagttgtagtgcggcgagctgcgcttaaatggcgccatttgcggttcggtggcaacggagggactggactactggactagtggtcagccactggccaagggtgtgccgcaacatgagtgccagctacaaagttttcccactgcacggagactcaataaatgtttaattagagtgcaaagcatacaaaagcaggaaatcaactatggcaattgcctacgactggaagaccaacgatgtgtaaggagctaagttggttcccaactattttgggatataacaaatccactagctaatagtct

SEQ ID NO: 13682 - DNA, 5994 bp, DROSOPHILA
acacagctgttttgttaaacaaaacagaattattcgccaattgtttacaaaaacactcaaaaagagtctaagcaaacaattggcaagcaagtgaagactggctagtctcagattaaattattccataagtgatggacagccaggcaccgatcgatgatctactgctggacattgtagacaatgcttggcgcatggaagttctacccttcgaccagattctagtgccacgcgaaaagctacccgatccagaggcggacggcggtgattcacacctgacggtcagcgagcaggagcaaaagtggactgatctggcgttgggctcgctggcaccggacgcagccctcatcgatcaactgaacatcacctctatctaaccaaggaccgtgagtccacgggcgagtgccaccgcctcgccaaccaacctattagcaccacaagcccaactcctaacaccccgacaacatgactagcaacaaccaaaacaatagctcaagccaccagcacctacactccccctccaaactaaccgaatttgcccgcaatttcgaagacaagccggaatcgctctttggccgagtggtaaacaagatccagaatgtatacaaccagagctacaataccgtcaacgatatatcaagtgggagcagcagcagttcctccacgcagccagtgcaagtggtgggcaaatcacagttcttcagtgactcccagacttccaccgctgagattgccgatgtggaaacctctagccagagctcagttcgcccccagccacccaccacgctcagcataaggaccaatagtgagacacgtggcacaagcacctccagcaataccgctgcagaggactccgaaaccagcgaccgcgtcgaaacgctgccgctgccaaccagcgaagcgaatcaggggcgcaccgtttctaacgtcctcaaacacataagcaatattgtggccacaaaaaacaataacgatctgcgaaactacaaggacacggagctgcagcgcttttggatgcccgattccaaggctaaggaatgctatgattgctctcaaaagttctccaccttccggaggaaacaccactgtcgattgtgtggccaaatattctgctcaaagtgctgcaaccaagtggtgcctggcatgataattcgctgcgatggcgatctcaaagtgtgcaactactgctccaagatagtgctcacattcctgaagtcctcaagctctgagatgggacaggatatgcaggagctgcagcagcacttaagtaacaaactggaagtacaagatagtggcagctcgcttgcaaaacatccccagatgcaaagggcaccccttccgcgtaagacatcagtgggctatcaagaggagcgattcagttcgcatccaacttacacaaccctttccatcgacgatcgcaagaatatcctgcagcagtcaaattcattaattaccctgcacgaggaaatgcagcgtgatctgcctgctcaaaattgtggtcagcgtctgattgagtttctcaatagtaataataaatcagcaaacgaggtgcaggcggtggccatactgaatgctatgctagccgctggtttcctcgagccaatcgtacccgatcccgagcaaatggacttcgattcgtcgctacactataagttctccaaaagcagcagttcggatacctcccgaacgatgagtccgcaatttgaggcgaatccccatgcggaaccacaacctccaaagtcaatggatcaatcagctgaagaaaaggagaaggagctagaaaatgaactggaaaacgatcgatgctataccacagcaacttctaagcttcttgcctcctattgcgaacacgaagagcagctactggcacagatgttgcgcgcacataatttggaccaggaatgggacaaggtgcttcagatgctttgttccacggcagcgaatcacttcaagccagagcattgtagtaacgatctcatggacatacgtaactatgtaaactttaaaaaggtgccgggtggcagacgcaaggactcgaagattgttcatggagtggcattctctaaaaatgtcgcccataaagatatggcaactcatgtgccctttcctcgcatactgctgctgcagtgtcccattgtgtacgagcgtattgagggaaagtttgtgaccattgagaccgtgctgctccaggaaaaggaataccttcgaaacgtttgcgcccgcattatgagcttcaagcccaacgttgtgcttgtccacaagaatgtggcgggcattgcccaggaccttttgagatcctatgaagttacccttgttctggatgtaaagctttcggtaatggagcgtctgtcacgcaccctgcagtgcgacattgtcagttcaattgagtcgaatataaccatgcccaagctgggctattgcaatgatttttacatacgcaactataatggcaaaacgttgatgttctttgagaagctgaccaatccccggggatacacctgtctcctcagaggtgggagcaatgctgaactgacgagggtcaagcgggtggcatcggccctgctctttgcacgctacaactggcgcttggaaatgtcattcctgctgaacgagttcgcccaaccacttagtccaaaaccttcgatattcgactccaaggaaacaagccccaaaacggaaacggaggcagaacttcgatctaagcgaccaattattttagagcgcaagtccgaggataagatcaccaccatcgtcagcgagaatgtgtctgatttcacggatccattgcgtgcatcacaagccgaagccctgtccacttcgccttgtgctccacccgtggttgaggcgctagctgtggaaccgcgttacgacaacagattccgcacggcactcagttccacgctgctctctgtgagtcccttcctgacatttcccctaccttatttggaaacggaacagggaaggaaatgcaagctgcgtaagctgtttcccgcagagctatacttttccaaacaatggtcccggaccggattggagaggccagatagcatgggagacggcgaagcagggaaatctgagccaggaaacaaagagaaccagatgcagctacttccagcccatgattttgtgctgatgaagatcacagcacctgctagcagtcgagacattcagtcgaagctagctgagttccgctcctttggcggtcggttacccaagggcaaggctccgatgctccgaccgaaaaaaaagaacgccgaagtgatccagcgaccgcagaaggtcagtgaggagcaactgtacaaggatgcccttgatccgcagaaccatcaacgtctaccggtgctcttctgcagcttccattacaatcccaagggcgtttcgtcgttctgcaagctgcccatgctgctggacatgaagttctacgggcaatatgacatcatgctggagcagttcctccaacgttactgctgtctttttaactccatgtgcccgtcgtgcaatctgccgatgctgggtcatgttcgtcgatatgtacactcgttgggttgcgtacatgtctacctaaccgaggacctaacccgttccgaccccacgcgtatatactttacctcctggtgcagcatatgcaatgccactacacccactattccgctttccgatgccgcaaagtgcctttccctcgccaagtaccttgagatgcgcttccatggccacgcctacaagagacgacctccttcgacggacgcagaacaaggtggcactgtatgtgaacactcattgcatcgtgattatgtgcaccacttcagtttccgcggtgttggcgccaaattccaatatacgcccgttgaggtttgggagacggatcttccttcgttgactgtgcaactggatttgccgcaaccatttcaaagtgcccaagtccaggaggaaattaaaaacttttcgataaagggtcacgaggtttacaacaggattcacgagcgtattgctgacctcgccaccgaggaagagaactcaccactggtgcagcatctgaaaaccatgctcacgcatgaccagtttatcttcaagcagaagattgagatcgtacacacactgctcacggataacagggctactgcctacgacactagcgatgctttggccatggcaagaagagctctggcagagagcattgagctgtggggaccgcggttgcaggagatcgagaagctgaccgccaagcaggcgcatcacatcgactctggaaccatctgcacggaggaactaagaccggaacaggttcagactgcagattcttctaaagttaccacctctagtttgccaaaggagaatgatcccctggagtgtccaagcgaggacactgaaactggcgcatcaaacagtcagactgttttggacaagaatttctctattgaccagatgttggcctctaccgttaacgtttactcggataaaaagtctataaggaagattcttacccagcttctgccatctggtaatcaggttaaccctttgcagtcgccatttccggcacaagatcatctgacgcttccattgggcagtattcccattcacgtgagagaaaccgatctcagttcagtgattgcatacagtttgacctcgatggattatcaaaaggcaatagacgaggcggaggccaactccaatgctgcccattcaagtccgcagttaaagcgaaaaattccattagcggaaagcgttagcgacgccgaagacagtccaagcctttcgcgtacttcgagcaacacaagtgccgctcccaatgcatcggttccttctccagctaccgcggcctccgagtcggaggaaaaaagcaaggaacgcataaagcagccaccgagtccgcatatcacactggcattccaagatcacagctgccagttccagtgtaagatctactttgcccgcgagtttgatgcaatgcggtcgaagagtttgaagcctcccaagctagacaaatccctgtaccgccggctggagaagagcaagatgcgggaggagctgagaatctcacagagtcgcaccgggtccgaaatggagctggttcgcaaacccagcgacgttggtgcgcctcgaaccactgaggatgattccaatcaggaggaggacgctaggatagcattggcgcgaagcctttgcaaaagtgtccaatgggaggcgaggggcggtaaatcgggatcccggttttgcaagacgcttgacgatcgtttcgtgctcaaagagatgaactcaagggacatgaccatctttgagccatttgctccgaaatactttgagtacatcgacaggtgccagcagcaacaacagcccacattgctggccaagatctttggtgtcttcagagtcagcgtgaagaaaaaggattctttcgtggagcgttctgtgatggtcatggagaatctgttttacggctgcaatattgaaaacaaatttgatcttaagggctcagagaggaatcgcttggtggatcccagcaatcagcaaggtgaaattgtcttgctggatgagaatctggttcagatgtcctggtcaaagcctttgtatgtgctgtcccatagcaaaactgtcctgagggatgccatccagcgagattcgtccttcctggaaaaaaacctcgtcatggactattcacttttggtgggcttggacaagaaaaatggcgtcttggtacttggcatcatagattacattcgaacctttacgctggataaaagagtggaatccattataaaaggatcgggaatccttggaggcaagggaaaggatccgaccgtggtcaatccggagcgctacaagcagcgctttatcgatgcgatggatcgctatttcctcacagttccggatcgttgggagggcctttccaaggtctaatccccttcacccacccacacacacacacacacacacacacacaaagtgcacacgttagttaacttaacatagctatagacgcaataaagtagacgccaatcc

SEQ ID NO: 13683 - protein, 1809 aa, DROSOPHILA
MTSNNQNNSSSHQHLHSPSKLTEFARNFEDKPESLFGRVVNKIQNVYNQSYNTVNDISSGSSSSSSTQPVQVVGKSQFFSDSQTSTAEIADVETSSQSSVRPQPPTTLSIRTNSETRGTSTSSNTAAEDSETSDRVETLPLPTSEANQGRTVSNVLKHISNIVATKNNNDLRNYKDTELQRFWMPDSKAKECYDCSQKFSTFRRKHHCRLCGQIFCSKCCNQVVPGMIIRCDGDLKVCNYCSKIVLTFLKSSSSEMGQDMQELQQHLSNKLEVQDSGSSLAKHPQMQRAPLPRKTSVGYQEERFSSHPTYTTLSIDDRKNILQQSNSLITLHEEMQRDLPAQNCGQRLIEFLNSNNKSANEVQAVAILNAMLAAGFLEPIVPDPEQMDFDSSLHYKFSKSSSSDTSRTMSPQFEANPHAEPQPPKSMDQSAEEKEKELENELENDRCYTTATSKLLASYCEHEEQLLAQMLRAHNLDQEWDKVLQMLCSTAANHFKPEHCSNDLMDIRNYVNFKKVPGGRRKDSKIVHGVAFSKNVAHKDMATHVPFPRILLLQCPIVYERIEGKFVTIETVLLQEKEYLRNVCARIMSFKPNVVLVHKNVAGIAQDLLRSYEVTLVLDVKLSVMERLSRTLQCDIVSSIESNITMPKLGYCNDFYIRNYNGKTLMFFEKLTNPRGYTCLLRGGSNAELTRVKRVASALLFARYNWRLEMSFLLNEFAQPLSPKPSIFDSKETSPKTETEAELRSKRPIILERKSEDKITTIVSENVSDFTDPLRASQAEALSTSPCAPPVVEALAVEPRYDNRFRTALSSTLLSVSPFLTFPLPYLETEQGRKCKLRKLFPAELYFSKQWSRTGLERPDSMGDGEAGKSEPGNKENQMQLLPAHDFVLMKITAPASSRDIQSKLAEFRSFGGRLPKGKAPMLRPKKKNAEVIQRPQKVSEEQLYKDALDPQNHQRLPVLFCSFHYNPKGVSSFCKLPMLLDMKFYGQYDIMLEQFLQRYCCLFNSMCPSCNLPMLGHVRRYVHSLGCVHVYLTEDLTRSDPTRIYFTSWCSICNATTPTIPLSDAAKCLSLAKYLEMRFHGHAYKRRPPSTDAEQGGTVCEHSLHRDYVHHFSFRGVGAKFQYTPVEVWETDLPSLTVQLDLPQPFQSAQVQEEIKNFSIKGHEVYNRIHERIADLATEEENSPLVQHLKTMLTHDQFIFKQKIEIVHTLLTDNRATAYDTSDALAMARRALAESIELWGPRLQEIEKLTAKQAHHIDSGTICTEELRPEQVQTADSSKVTTSSLPKENDPLECPSEDTETGASNSQTVLDKNFSIDQMLASTVNVYSDKKSIRKILTQLLPSGNQVNPLQSPFPAQDHLTLPLGSIPIHVRETDLSSVIAYSLTSMDYQKAIDEAEANSNAAHSSPQLKRKIPLAESVSDAEDSPSLSRTSSNTSAAPNASVPSPATAASESEEKSKERIKQPPSPHITLAFQDHSCQFQCKIYFAREFDAMRSKSLKPPKLDKSLYRRLEKSKMREELRISQSRTGSEMELVRKPSDVGAPRTTEDDSNQEEDARIALARSLCKSVQWEARGGKSGSRFCKTLDDRFVLKEMNSRDMTIFEPFAPKYFEYIDRCQQQQQPTLLAKIFGVFRVSVKKKDSFVERSVMVMENLFYGCNIENKFDLKGSERNRLVDPSNQQGEIVLLDENLVQMSWSKPLYVLSHSKTVLRDAIQRDSSFLEKNLVMDYSLLVGLDKKNGVLVLGIIDYIRTFTLDKRVESIIKGSGILGGKGKDPTVVNPERYKQRFIDAMDRYFLTVPDRWEGLSKV

SEQ ID NO: 13684 - DNA, 5902 bp, DROSOPHILA
atactgtttttcaattttaaataacataatttcaagtagcgtaaaaaggttaataacatcattgttaaaaaggtgaccacacacacagttgttattgcattagccctaaattatcctaatgtccaagtctaattatatgtttatactaattctggaaatttgacaacagctgccacacaaaaacatgcaaatttttggtaattgctttgttttaaaaatattcagttgtttcaaaaaaaaaaaaatcattgctttccttggttgttcgtagagtgcgcacttatcggcattcgctaagaattgctctctttggactcccaacgactgcgatttgagttttttaaatatttttttcttgttaataatgcctgcacccgaatccaaaaagtaagcaacataagtccgagtatttggatcgacaagagccgaacgaacgcgagtggatggatcggcgctactaaggcactgaccgagtgcgatgttagtaccgccccagtacctcctcctcctcctcctcctcctccaccgctagcccctcctcctggccagacacaccgcaaccaccagcccccccccctcccccctttaatccaatggatcggcggcatacaaaacgcggcgatcggcctcccgtgggcttagtttgtgagacgctcccgaggcgacaagtagttgatagcgaagatcggcgaaaaccggcaggcaaacgcaactgcacgcgctgcagcatcaaaagcagcaccatagatacaaggcagtgaaaagaatatcccaacggaaaatatatcattacattttcatgtttattttaacttggggaaaattcggttcggcaaacaacaagcggcgttggtaaagaaagagcagagaaagaaaaacgtgtcgccgtccgtcaaaagtgaagcgctcccatgtgctgttgcattggcaattgaaaaaacataaacagaaaatagaaacagaatatagaaaatatatagataaacacagccactgcaggaaccacaatcaacacaaaaagaaaaaaagaaaaaattaatatatttcgacctgtagtcgagggcgaaagtgaaagtgtacatctcttatctcccacctctgcccatagtgaatgcacttcagcgaagctacaacactgggttcctaagcccccgaatcgtatcagaattcaaatccgcagatctgtgttttttgcacgagttcaaaaatagattgcacagccgaggaattcaagttcagtggcacaggcagaacctcccgagcaatctgaacatttcgtttgcgtggggtcagtcgtctgcctcatacaacatcctcaacatcatcatcatcatcgtcttcagagtctgcgacaaacgaaaagattttgaattttgaatagcccaagtaaaagtagaagtagcagctagcatcatgactcaatccacggagaatccggagaagaatcgcgagctgatcagcgaggaaagcatgaaggatctgctcaccaagcagctggaagtcgttggcagtggcggggcatttgtgtggtaagtgggatgcactgcgagaaaagtctacaaagttgagtctactttagttgaaagtgtggttttataatgatcagctatttttgctcttagaatatctacttttattataagatataatattatatatatatatagtctagtttaaatttagtacttccatttttaaaagtaaataatgggagcagctgaaaattgaggttacaacttttcaacgattttattcggatcaatggaataaaggagtcatattgctgccataatttgatccaagttgaggaagtcacttttcaactcaactcgaatcacgttccacttgacccagttcataatgaatgcagtgaaccagcttttagaaggctaagtttttagaattcgttgacattactcagggtggtgcacttttctcccctgacttagctaatacagatttaattggttttttctgcttgattgatcgctctgattgagcattgattgaatgtagctccctttttagccacaaactggtcagcacaatttcatctaaaatcaattattttagctttaagctttgctatgctgggccaaaggggcttcctggtgttaattttaggccgggatcgaagacgactcaccatccagctgtgcgtggcttccaatcgaggggccaacggtcatgtgagtgctcgtcggtatgaacggtatggcatttaaatatagcacggaaatctggcctatcagtgcgcatacacattgaatatgtgtagtaatacatttccactaggctcaatcgtagttgataaggcactttgtgaatcgaaatcgggcgatgggcgattaagtaccggttccattacccagatcgctacggggacatgaaaccagtccgtcccatctgatatgatcactgggtagactgagtagaggacgttcaactgattcactggaggaagtcctactaccaactgacttgaatgctgatgatattcgcggaactttacgtcgcttagtgggtgggggagtcacgtgaaaataaaaaatcggatggatatgtaaatattgtgcacaacgttccggttgcccgatttgtataatgattaacgacgatactgccgttcgcacaaaacatacatatgctctctggcgaatcttaaactgccattaagtgattatgtgatcagcatacctagttcataactaccgaatatttcgcccacaaccttcacagctttgtttttacaccgttgttgtgatcgttgtcattatttgcattccgatgagcagttagttagccaagcggtgtcaatgtgccaccaattcgattggagttgcgtgttgtaaacaatttatccggatacgagatagagtatctgcgaaaacaatctaacaattagcagtgaagtgaaatatacctaactggtacttaagtacttaaatcctctaccccttctcagggcgatcttcttcctgtgtgtcactcccaatatactgaacggattccatgtgtcatcctatacgctgctgggccacctacccgatgaccagtggtgcggcattccggagctgcaggacaccaactggacacacgcccagaagcgggagattgtcgccaagggattggattcgggcggttgcaccgtgtgggactggaactatggccacctggccaagatgtcctacgaggcagccctgaactataccggccatctgacgcagatttccccgccggctgaggtatcctgccgtgtaaaggggcaacatgagttcgcccatcccgagaccaccttcgttgcggactgggatctcacctgcgaccggagcatccagcgtacctccgcccaggtttccatatcgttgggcaagttctgcggatccttctcctttggcatcctggccgacaagtgagtcattgcaaagcttcttgatatgggttaaatcaatgtctaatctttggttaccctgcagatttggtcgcaaatcctcattcaccctgggcgctgccttctttattgtgggcagcttcttctgtaccttctcgccctggtacagcctcttcctggccggacgtttcgccctaggagcagcctcctctggtctgttctatccagcatttaccatgagtgagttcgtaactatgtactatacttctttaattagtttctgcgttattattttagtcgtggagaacatctgcttgaagcatcgttcctggatgtccattgccttctcagcgtcctatccggtgggcatgatcatcctggccattgtgggctacgtcatccaaccgtggagacatctgcaactggctctcaccattccttcgctgctgctcattctgaactgctagtgagtgctcccaatcccgtttatattcatcaatccccctaaccgagcacttttcccctcagcctgatgagtgagtcaccccgctggctgatcacgaaccaaagatatgatcgcgtctacaagattctcttcagacagcccagccattaccaaattcagcccgccgttgcagccccatctcaagtcgccagcgataagaagtcggtgagtgcaaagtccctgaaacatatgtatacctatatgtttgcttcagtgaatctgattgctaagtggagtgctgatgaaatgctctaccattgtagctggagcccgaagagggattctcctttggacagaaactcaagaatggtcccctgaagtccatcatcgagctgtatgccaactccaaggtgcgcaggatgatctttgcctcgtatttcatgttctgtgtcacttcgctgagttactatgtgacgggtaagttcagtccataaggattctcatatctatggtatatcacttaatttctcctgcagctctcaatgccgccaatttgtcggtgtccagatacctatacattataggcaccggtctggtggatataccctcctatctcgtccctgtgataatgctgcgctttacgggccgtcgcctcaccaccatgttcctgttcctgtggaccggcgtgtccttgctgcttgtccttgctgttcccgccggcagcaccacctggatcgtggccttcgccatgctgggtcgctttggtattagcgccacctactccgtggtcacgctctacacagccgagctgtatcccacccagataagaaactcggctttgggaacctgctccaccttcgcccatgtgggctccatttcggcaccgtatgtggtcgatgtccttggagctctgggctggtacattccaacaacgatttgcggctgctgcgttctagtagctggcctactgactctcacacttccggaaacgggaacgggtaagctgtccgacaaagtggagagcagtgcgtcctccactccgacggagccggccgagaaacagtgatgacagcaataggttaagttccatttccacgactaaactgattaactactttttaaggtatacgaacataggtattacgacccaaaaacttctgtacctccaactgactttcgctatttaaattgttttacaatccgaaacactttcaaaagaaaaacaattattggttgaaatgaaagtgttctaaagaaaagacaaaactgataaaaaaaagtcgtgaaaatggttagttagtctaatgtaaatctagctatatatacctacagtaattaggcgtaagtttgttagtttctgctattcctgcattgtttaagtaaatattcataattgtttttctgtttgatatcgcataataaatatactatttatatgtatgtgatcgccagagatctaggactgcatcagtagttggacccaatcgtaatagggcctggtcactgtatagatgctgggcattcccggtatgccgcaagtgagtccgtgcgataccaggccgtagatatagtccttgccgccatatgtacagattagcggaccgcttttaattggaaacaattaattgggcattgagcttgttagaaacttatccctggcttaccctgaatctccctgacaggagtcctgattgttgccaagagcacacaccgtatttgccccattctgtggcgcccagatgtgtcctataatatcgcggcatttttgattatcaattacgcgaacttccgcctcgaaaagtctcttctgacatggtccagcgtgatgggttgctccatagccaataatgcgacaggattctatgcaaactagggattagtatcgcactcaattcggatgctgattaatcataccattttggtccggtttcatgccatgtggcggaagttgagcgtattgtaagccattgccgaaatcactccagtaacgacgtttcatataaagcagagctatatcattccgaaagttggatctgccataaacgataatctgtactattacaatc

SEQ ID NO: 13685 - DNA, 2126 bp, DROSOPHILA
aaccacaatcaacacaaaaagaaaaaaagaaaaaattaatatatttcgacctgtagtcgagggcgaaagtgaaagtgtacatctcttatctcccacctctgcccatagtgaatgcacttcagcgaagctacaacactgggttcctaagcccccgaatcgtatcagaattcaaatccgcagatctgtgttttttgcacgagttcaaaaatagattgcacagccgaggaattcaagttcagtggcacaggcagaacctcccgagcaatctgaacatttcgtttgcgtggggtcagtcgtctgcctcatacaacatcctcaacatcatcatcatcatcgtcttcagagtctgcgacaaacgaaaagattttgaattttgaatagcccaagtaaaagtagaagtagcagctagcatcatgactcaatccacggagaatccggagaagaatcgcgagctgatcagcgaggaaagcatgaaggatctgctcaccaagcagctggaagtcgttggcagtggcggggcatttgtgtgggcgatcttcttcctgtgtgtcactcccaatatactgaacggattccatgtgtcatcctatacgctgctgggccacctacccgatgaccagtggtgcggcattccggagctgcaggacaccaactggacacacgcccagaagcgggagattgtcgccaagggattggattcgggcggttgcaccgtgtgggactggaactatggccacctggccaagatgtcctacgaggcagccctgaactataccggccatctgacgcagatttccccgccggctgaggtatcctgccgtgtaaaggggcaacatgagttcgcccatcccgagaccaccttcgttgcggactgggatctcacctgcgaccggagcatccagcgtacctccgcccaggtttccatatcgttgggcaagttctgcggatccttctcctttggcatcctggccgacaaatttggtcgcaaatcctcattcaccctgggcgctgccttctttattgtgggcagcttcttctgtaccttctcgccctggtacagcctcttcctggccggacgtttcgccctaggagcagcctcctctggtctgttctatccagcatttaccatgatcgtggagaacatctgcttgaagcatcgttcctggatgtccattgccttctcagcgtcctatccggtgggcatgatcatcctggccattgtgggctacgtcatccaaccgtggagacatctgcaactggctctcaccattccttcgctgctgctcattctgaactgctacctgatgagtgagtcaccccgctggctgatcacgaaccaaagatatgatcgcgtctacaagattctcttcagacagcccagccattaccaaattcagcccgccgttgcagccccatctcaagtcgccagcgataagaagtcgctggagcccgaagagggattctcctttggacagaaactcaagaatggtcccctgaagtccatcatcgagctgtatgccaactccaaggtgcgcaggatgatctttgcctcgtatttcatgttctgtgtcacttcgctgagttactatgtgacggctctcaatgccgccaatttgtcggtgtccagatacctatacattataggcaccggtctggtggatataccctcctatctcgtccctgtgataatgctgcgctttacgggccgtcgcctcaccaccatgttcctgttcctgtggaccggcgtgtccttgctgcttgtccttgctgttcccgccggcagcaccacctggatcgtggccttcgccatgctgggtcgctttggtattagcgccacctactccgtggtcacgctctacacagccgagctgtatcccacccagataagaaactcggctttgggaacctgctccaccttcgcccatgtgggctccatttcggcaccgtatgtggtcgatgtccttggagctctgggctggtacattccaacaacgatttgcggctgctgcgttctagtagctggcctactgactctcacacttccggaaacgggaacgggtaagctgtccgacaaagtggagagcagtgcgtcctccactccgacggagccggccgagaaacagtga

SEQ ID NO: 13686 - protein, 570 aa, DROSOPHILA
MTQSTENPEKNRELISEESMKDLLTKQLEVVGSGGAFVWAIFFLCVTPNILNGFHVSSYTLLGHLPDDQWCGIPELQDTNWTHAQKREIVAKGLDSGGCTVWDWNYGHLAKMSYEAALNYTGHLTQISPPAEVSCRVKGQHEFAHPETTFVADWDLTCDRSIQRTSAQVSISLGKFCGSFSFGILADKFGRKSSFTLGAAFFIVGSFFCTFSPWYSLFLAGRFALGAASSGLFYPAFTMIVENICLKHRSWMSIAFSASYPVGMIILAIVGYVIQPWRHLQLALTIPSLLLILNCYLMSESPRWLITNQRYDRVYKILFRQPSHYQIQPAVAAPSQVASDKKSLEPEEGFSFGQKLKNGPLKSIIELYANSKVRRMIFASYFMFCVTSLSYYVTALNAANLSVSRYLYIIGTGLVDIPSYLVPVIMLRFTGRRLTTMFLFLWTGVSLLLVLAVPAGSTTWIVAFAMLGRFGISATYSVVTLYTAELYPTQIRNSALGTCSTFAHVGSISAPYVVDVLGALGWYIPTTICGCCVLVAGLLTLTLPETGTGKLSDKVESSASSTPTEPAEKQ

SEQ ID NO: 13687 - DNA, 3748 bp, DROSOPHILA
agttcgtcatgatatacaaataagaagagatatatgtagtatatgaattaacatcgtgggcgacgagataagaaacctttaacattaatacagtatataagtgtccgattcttgcttcttgtaaaaattgacatttgttttgatatcatctcttgtgtacattaatagttaaggccacgcccgccagccctgcgtatgatttgatttgatttgggatccgacttcgctccggattcttatattcttgtttcttgtttcttgtgttttttttgtttggacgtatcttcttatttgaatggtttaggtaatacataggcatctacgattaaactacttgttttgggccaataagctcaggctacagctccgtgatttatgtctaattaattgatcttgattggcaattgttcttccatcctccaccattgcacaatccttcttcttgttttacagatagagagagaggtttagatttaaatagagagcctgttgtaatttcgtatcgtattttgggcattcttctacgatacagagtttcataattatgtctagagtaattcgaactggagaagtgctcgctcctcgcaatacgttgtataaaatagttatatatagtctgccatagcttaggtcaatcgtagggtaatcaatggtatagcttaagtgtacagtaaaatcgtagttagttgtcctatgatagagagacaatgcgttaagtttcctgcttagtaactctaagcgagtgtggcctagcttatgaacgagcttactaaagagtgtcttgattcttgagctttagccgcccaaagagcatctaaatcaaagagaattttagacattagtaattacacataaacaagtacttcagacgtagtgcatcaatggcgagtaatatatgcgtatatggatatattcgtggcaagacgtatttgaggtagctcttatgcatagaccacattcaaaagaaacgactaatggcgggtacggctactcacccaatctagcggcgatatttgctgttggcactgcctccagtggccacggagccattggatacgccaacagccttggccccagttggcggcggaacgcttccattaggcggcagtggtccagcgttgtagcccgtatatgctggtggttgaggagtgtctacaattagtagctgttcaaaattacatgtctttaataatggattatacctacggtagctgttgggcggacctgccgagtaaggattcatgcggtttgcattcatattgttgtgcttggatggtccgcctccgtagttttgctgatagccagtgccgaaatttggttgtggtgttggctgttgcgaagactgctgctggtgggatggaggagctgcacccggcactgggggcggcatgttccagttacctggagccgtcggcggtggtccattgtgacccatgggtggtggcactgctccaaccggcggcacctgttgcactggtggaggacaaccccactggttggcgtgccactgctgggcacccggtggtggcggtggtggtgcattccagccattttgttgcggcggcggatatggaccccagccgttcatctgctgcggcggtggctgctggtagtagggcggcatagccggcggaggtggtccccagtagttgaagtttggtggtggagcagacataggcgccggtggtggctgttgttggtaggggcccatggcctgttgtggcggcactggtggtcgaaagctaggtgcctgcatattgccattaggtggctgctgtccgccaccctgctgttgctgctgctgattgagcgacggcttgatggcgttggccagcccacctggctgctgtttctccttcttgtccaggttataaatggacttcttgacgtccacgtgaacgtacttaatcgcatgttgctttttaactaaacgggatgaaggttcataattaatatcaatctaatatttagcattttagcttttatgcttacggatagccttatccactgcatcgtagtcgtcgaactcgacgaaggcgaagccgcgacgcttgccagtggttttgtcagtaagcaatttaacggagactacattcccgaattggaggaagtattcacgaaggcattcctcatcgtggttatccttaagaccgcctacgaacagcttcttcacggatatattggtctcgcgcgattcgcgttcgggacggggcagagcacgcttggcttccacagttctggaagcgaaaggcctcatggtatagatctattcttggtacgatatgatcccccaccaagtctatactcacttgccgtcgatgatgtgcggacggttctcctgggccctgtcgaccatgagagactttgtgtaggtgatgaagccgaagccgcgagatctcttggtggcagcatcgcgcatcaccacaacatcgaccaccttgccccactggccgtagaacaacttcaggttctcctcggtggtgtacggggccagcccgccgatgaagagcttacgcaagtgctccagctcgcatatgtcctaccggtgcagaggtggtaagtgggttagccaagtgggttggcatgtggtgaagggtggtatgtgtgaagggaaacaaatataggtgcgtcacttgccaagccgcatacatgcacagaaaggtacgcgtatgtacttacatcttcctcgcgatctgcaagcacaatcacatcggcggactcgtccgataggggctcatccttcaccattgtgttagcaaattaattatcactaaatttaaccgaaattaagaaacgaaaacgaccagtttgcacgtcgaacggttgaagcgaagtgaaaattgtgctgtcaggaagcgaatcattgattcgatacacccactctctctgtttgttatcgataagttggttaggggtattcttgaaatttctaaagtgccaagtttctttactatcgtaataataaatacatacacgaattggatatgcgatagctgtcaaattgtaatatagtttttcagaagcaaagcgaaaaccgccaacgtatactagcccctttatgcattcaattgagtattcaacttaagttctaatgtcggattcgccccatgaggagcaccgcttgtgcggtctggggaatcacacgctgaggtccccgtaccgcgtaatcagaaatccgcacctgctgaagtttggccagctgataaactcggagctgcggtctcagccactgtgcctctcgtgctacacgcaactgatccagctctaccggctgaagaacaacaatgcgaagagacacctggcaaatagacaggcagccagtgctattctctcgaggagcagtagtgagaaatctcatgagtccgcggctagtgtgtccacaacacaatcctcggaggagcaagaatcaaccactagcgcagcgccggcggcggcggctcaaagagcaggaagccagttggttgagtccaattcttccgacgatacacttttctccgatgactacgatcccagctcgaatctgagtttgaatgccgtgaatggaacgcggctaccgaatgtccaaccaattccgaaaaggcgccagtttgtgcatctaaatcgtgaagctatggccatttatctggcgggaactactgggggataatgtttgtttcatttaggatattttcataaattaaatttgaaataacactgttaccatctatgtaaccatctatcgatagtttccgccatgttattagcagca

SEQ ID NO: 13688 - DNA, 1416 bp, DROSOPHILA
atggtgaaggatgagcccctatcggacgagtccgccgatgtgattgtgcttgcagatcgcgaggaagatgacatatgcgagctggagcacttgcgtaagctcttcatcggcgggctggccccgtacaccaccgaggagaacctgaagttgttctacggccagtggggcaaggtggtcgatgttgtggtgatgcgcgatgctgccaccaagagatctcgcggcttcggcttcatcacctacacaaagtctctcatggtcgacagggcccaggagaaccgtccgcacatcatcgacggcaaaactgtggaagccaagcgtgctctgccccgtcccgaacgcgaatcgcgcgagaccaatatatccgtgaagaagctgttcgtaggcggtcttaaggataaccacgatgaggaatgccttcgtgaatacttcctccaattcgggaatgtagtctccgttaaattgcttactgacaaaaccactggcaagcgtcgcggcttcgccttcgtcgagttcgacgactacgatgcagtggataaggctatccttaaaaagcaacatgcgattaagtacgttcacgtggacgtcaagaagtccatttataacctggacaagaaggagaaacagcagccaggtgggctggccaacgccatcaagccgtcgctcaatcagcagcagcaacagcagggtggcggacagcagccacctaatggcaatatgcaggcacctagctttcgaccaccagtgccgccacaacaggccatgggcccctaccaacaacagccaccaccggcgcctatgtctgctccaccaccaaacttcaactactggggaccacctccgccggctatgccgccctactaccagcagccaccgccgcagcagatgaacggctggggtccatatccgccgccgcaacaaaatggctggaatgcaccaccaccgccaccaccgggtgcccagcagtggcacgccaaccagtggggttgtcctccaccagtgcaacaggtgccgccggttggagcagtgccaccacccatgggtcacaatggaccaccgccgacggctccaggtaactggaacatgccgcccccagtgccgggtgcagctcctccatcccaccagcagcagtcttcgcaacagccaacaccacaaccaaatttcggcactggctatcagcaaaactacggaggcggaccatccaagcacaacaatatgaatgcaaaccgcatgaatccttactcggcaggtccgcccaacagctaccacactcctcaaccaccagcatatacgggctacaacgctggaccactgccgcctaatggaagcgttccgccgccaactggggccaaggctgttggcgtatccaatggctccgtggccactggaggcagtgccaacagcaaatatcgccgctag

SEQ ID NO: 13689 - protein, 471 aa, DROSOPHILA
MVKDEPLSDESADVIVLADREEDDICELEHLRKLFIGGLAPYTTEENLKLFYGQWGKVVDVVVMRDAATKRSRGFGFITYTKSLMVDRAQENRPHIIDGKTVEAKRALPRPERESRETNISVKKLFVGGLKDNHDEECLREYFLQFGNVVSVKLLTDKTTGKRRGFAFVEFDDYDAVDKAILKKQHAIKYVHVDVKKSIYNLDKKEKQQPGGLANAIKPSLNQQQQQQGGGQQPPNGNMQAPSFRPPVPPQQAMGPYQQQPPPAPMSAPPPNFNYWGPPPPAMPPYYQQPPPQQMNGWGPYPPPQQNGWNAPPPPPPGAQQWHANQWGCPPPVQQVPPVGAVPPPMGHNGPPPTAPGNWNMPPPVPGAAPPSHQQQSSQQPTPQPNFGTGYQQNYGGGPSKHNNMNANRMNPYSAGPPNSYHTPQPPAYTGYNAGPLPPNGSVPPPTGAKAVGVSNGSVATGGSANSKYRR

SEQ ID NO: 13690 - DNA, 3581 bp, DROSOPHILA
acgtgcagtgcaaatagttgatgcaaatagttgatgcgattcggccacctgaaggacatacatatgtacgaaccacactgctcaagccacatatccaatttaccatctgagatttacccaacaaatatagaacctgtggccagggtcgatgcttggttagatgagcagcaaatgcaaccacttacaataaacgccaaacaatatgtaaattctaaaccataagagattcaataaccgtagaattgttgtgagggattcagtactcgggagattactgcaggaatatttctagttatggttcgcaaaaacacgctgaagatatgaaatggtatagggcttgttcaaggcttactgttgccacccccttcctaccaaaagatttgtatagtaactataaatgccccaacaatacccattatgcattgtaaagaagcggtgtgttgtccacttcgatgtactcagatatcaatgaatgtaaacatattgattacataaaaacgttcacttagtgcagcaacttgcgataacctacaaatgtatttgttaaattaaatactatatacatatatattatatatatttacggattgtatgtgtaatacgaataatgcgccctgttaaatgcaacaaggagatagggatctcagcaaatatacaagtataaattaatcatttagagttcgtgtgcgttataaaacaaaaaggtagtgaaagaaacataaaacaaaatttactcatttaaaacttaatgatcgatttaaatagcgaacccagccataaaatcggcttgaacatttgcgaaacactattgtaatagataaactcctcaagcaagattctcaactggacagcccctcaagaaataataataaatacatatttttaaaaattaacccaaaatcactaaggtattctctttgcgttagtagcaatatttttgcgtgtatttaaaaggtgacaaacatttcatctgaaaatgtactcggtacaatatcttatcatctagtttttaaaaaacattttttttgtatttcttctccttgcttatttttgtagtcgtttcttcttttgaaaactctggagctaaattaggtcgttgtttggttttccactcttctacagttagatcactccactgatttatgcccttcttgaaagattccactcccaattcgaactgctcattgtgttcctgaatcgctttccaattgtcgcaaaatatagttcggcgtttttctgtttctttttcatcttgatatttcgcaccgaaatcaatctgtaataaagatatattcattcaaattctcaaattctatttacattgcaagccaaatattaccaaaaactttttccatgctgcctgacatgtattatcatccctcttatccttagatatttttgtagtagcttcaactttagaaaactctggattaaaagcaggtcgttgtttgtttttccactcctcaacggtcaaatcactccactgatttatacccttcttaaaagaaatatttcccaaatcgaattgaacattgtgcttatgtatcgacttaaagttgtcgcaaaatacatttcgtcgcttttcggtttcagtatcatcttgataagacggcttaaagtcaatctgcaattgataaaagcaactttaataaaaattctttaaatacccaaccatatcttaccaggaacttctcccaagccggctggcatatgatattatcattatctatttcggatgtagatgtagtggcttcttccttacgaatctcgggagcaggactagatcgttcctcaatagtatgatcagtccactgatttatgtccctcttgaagggctctgcccacttttcatactgcacattgtgctccacaatcgccctccagtttgcacaaaatacattgcggcgtttctcggtttcatttgcattcttatactgcgctccaaagtcaatctgtaattcatatcatacatattaataccaagttggttttaataacctagctaatcttaccaaaaacttttcccatgcagcctggcaattgactttgtctcgctcctcctttgatgattcactagcgatttctggcataactttgggagtttgtttctctttccactcttcaaaggtaagatcactccactggttgatacccttcttgaagctgacaactcccaaatcgtatttcaaattgtgatcgcgaactttttgccaattttcgcagaatatatcacgtcgcttttgccgttcgtagtcattatcgtagtgtacatcaaagtcgaccttggagtgtatacaaataacttccttgaacgataccctttcttggaattatgcgatcaaaaaacttaccaagaacctttgccatgcaaactggcattcctcctcgaactcagataagccagaggtgtgttcaattgtgggtgtcgatgagtcagcgtcgcttttcccagtagtaaccccaatctctggattgattttttgtgtagcaggtgatgatgtgcttactggtacgcccagagccacgcccatcaaatacaggagcagtgggacgccaagtaaaattcgagctgaggtcatcttgaacacttttctcgtactgcgctccgcactgccagaatcgcgaattatatggggaatacatacatatataattgcaagtactcaaaatcagctgcattcagagagaaatctaaataaaaaccgacaacgagagcgatttcttttgctctcttttctcttaagtgttgatcttttaaaagagtaactgcatttacgtgaccttgcccaccaaatatataacaactggcataattgctttatgatttgttgcaatagtattgaattaaattaatttgaaatttaagccccgtttttatacccattactcggcgggaatactaggctcgttgataggaatgtaacaactacattctagatatgtatgtgttttccacacaaatgctgtaaacaaacgttacgctgcttgcagctttttctgattaacgggtatgcattagtcgtgacacccgactgtagcgttatttcttgtttatattaaatttgtcgcaaatttacacggttatacggttatgtgtgcattgttcattttctatccactttgccaaattgaaatttattactttctcaaacaacttcccacacagcgttgttcttcattaagaaaatgtttctcaaaaaataaataagaccgaaaattaatttttgtgtgcatagccgttaagactacgatccaatttctcagaatttccccagaaagcaacacaaaccgataaggcacttgtttcatttattaaccgcgtgactcatggaatcgatgtggtgacccacacagcttacgactacagtaacaaagttataaattcgtggtttttaattgactatactatctaactaattgcatggcgcagttgtgagcctacagaatggggtagctgcactcgctggcgatgccgcagaatccacctgcattccggaggatgcgcataaagccgccctcgccccaattctgagagtacgagttcttgatgatccagtagtcgcgtccattttccgttccat

SEQ ID NO: 13691 - DNA, 1331 bp, DROSOPHILA
agatgacctcagctcgaattttacttggcgtcccactgctcctgtatttgatgggcgtggctctgggcgtaccagtaagcacatcatcacctgctacacaaaaaatcaatccagagattggggttactactgggaaaagcgacgctgactcatcgacacccacaattgaacacacctctggcttatctgagttcgaggaggaatgccagtttgcatggcaaaggttcttggtcgactttgatgtacactacgataatgactacgaacggcaaaagcgacgtgatatattctgcgaaaattggcaaaaagttcgcgatcacaatttgaaatacgatttgggagttgtcagcttcaagaagggtatcaaccagtggagtgatcttacctttgaagagtggaaagagaaacaaactcccaaagttatgccagaaatcgctagtgaatcatcaaaggaggagcgagacaaagtcaattgccaggctgcatgggaaaagtttttgattgactttggagcgcagtataagaatgcaaatgaaaccgagaaacgccgcaatgtattttgtgcaaactggagggcgattgtggagcacaatgtgcagtatgaaaagtgggcagagcccttcaagagggacataaatcagtggactgatcatactattgaggaacgatctagtcctgctcccgagattcgtaaggaagaagccactacatctacatccgaaatagataatgataatatcatatgccagccggcttgggagaagttcctgattgactttaagccgtcttatcaagatgatactgaaaccgaaaagcgacgaaatgtattttgcgacaactttaagtcgatacataagcacaatgttcaattcgatttgggaaatatttcttttaagaagggtataaatcagtggagtgatttgaccgttgaggagtggaaaaacaaacaacgacctgcttttaatccagagttttctaaagttgaagctactacaaaaatatctaaggataagagggatgataatacatgtcaggcagcatggaaaaagtttttgattgatttcggtgcgaaatatcaagatgaaaaagaaacagaaaaacgccgaactatattttgcgacaattggaaagcgattcaggaacacaatgagcagttcgaattgggagtggaatctttcaagaagggcataaatcagtggagtgatctaactgtagaagagtggaaaaccaaacaacgacctaatttagctccagagttttcaaaagaagaaacgactacaaaaataagcaaggagaagaaatacaaaaaaaatgttttttaaaaactagat

SEQ ID NO: 13692 - protein, 439 aa, DROSOPHILA
MTSARILLGVPLLLYLMGVALGVPVSTSSPATQKINPEIGVTTGKSDADSSTPTIEHTSGLSEFEEECQFAWQRFLVDFDVHYDNDYERQKRRDIFCENWQKVRDHNLKYDLGVVSFKKGINQWSDLTFEEWKEKQTPKVMPEIASESSKEERDKVNCQAAWEKFLIDFGAQYKNANETEKRRNVFCANWRAIVEHNVQYEKWAEPFKRDINQWTDHTIEERSSPAPEIRKEEATTSTSEIDNDNIICQPAWEKFLIDFKPSYQDDTETEKRRNVFCDNFKSIHKHNVQFDLGNISFKKGINQWSDLTVEEWKNKQRPAFNPEFSKVEATTKISKDKRDDNTCQAAWKKFLIDFGAKYQDEKETEKRRTIFCDNWKAIQEHNEQFELGVESFKKGINQWSDLTVEEWKTKQRPNLAPEFSKEETTTKISKEKKYKKNVF

SEQ ID NO: 13693 - DNA, 12788 bp, DROSOPHILA
gctttttgagccaaaaaaactaacacagctttagaacttcgtttaattcggcccccaatgggaagcagcttaatgagtgttgttaaatatcaattttagctagcaaattccaaagttattgttatatcactttaaaaaatatatgaaaataataacaagtgtttctaacaattaagtgttttcagtgtttactttaactataagctaatattaatttattttaaataaagaattatcataaattactttagtatgcgataaatcgtgataaatatatcgtgatatgattgcgtgatatttgcttcgtataaactcatcatgtaaagctaatgattgattagttgtacatatatttttatagaagccccttttcatatcttaactttgatcaatttcagtgtactcaaactcatcgtaacgtacccatttaagacacccaattcccgctgccaattcccaactgcaattttgcaattccgacccatcgtgggtggtacggggcattcagtttcgccattgttgatatcgttgttgttgctgaggcaacaaaacacttttattttttgtgttgttattgcagtttttgttgttgttttgcttggccagtttcaagtgtaaattaatttatgaggcacgccatggagccggcgcccgagttgcggtcaccgacggccccctcaaaaccgcccatgaacgttggtgaggggggcggttagtggggaaatgtcaggccgagtgtgaaatttcatatttgaatactcgccaaaacgttgacaaatgaagtctgcataattggctaacatttggtcacggagtttgagtgccttttatgaatttgaatacacgctagaaataatctgatttattggcatggaagtcagacagatatattcatttttgcttatggtgaattagaagagaagtagtatagtaacttccatattgtattcctactttagcaatgtaagcatgtttaagtttaatacgttgttaaagcaggaatgtggaattattttagaaacccatgtttttagtgtagctatgaaacaaacggatacaatttgcgttgatttaactcacctttcagtgtgccgatgaaaaacagagcggccagcaaactgagatggccaaacatgttgattgttggcggatttatgtttcgaatggcttcctgctccttctgatatctgcaatggtagaagatgaaaaaaggaatgaatatgtaaataatcatttattgcagcagacgcgcccgtgagccagtcgctataagtgacagcaatttgtttgattgtttggtctgcataatagagatatttctgtgagagtagggggtttcgagtagggggcccaaccctggaaaaaaaacagaaaaaaacaagtacggaagaacgccagatgtcacctgtgatcagttacctgttacctgtaaccagtcaccggttcactgtcatcattcaaatgtcattttcctaaagggggcgggccacaaattgccgattgacacgccacctgacgctaatcaaaactacacatgcacttttgggggccaggggccttcggttcgttttccccctccccgcagcaattaagcttggttttgtgttttgggcctgctaaattttcattactgtggccattgtctgacccaggaactgggggaatttgaattcgatttggagccattggtaagcccacgttctccacacaattccccttttccaatcgctcgatgattgtcatcgtaggtgtgactaattgttggtcatttatcttctttgctttcttctcgaatttgattttttctgtgttcctctggcctctttgtttttcggttttccatggaagtcatgaataatttccgttctaaatggaaaggctgggcttttcctttcttcccgtcttcttgtgtgtctctaattgatagataattgaaggtcttggtgggcaaaggcgaggactgatcaattggctgtatataaggcaccagatgaatgaatccccctgcttgagtgatgtataagatggacttaagttgatcatgcatggtaatttcatcgatgggatgatgtcacttcgggattgattggctacgtagtctttaaaaggctttaatggatatatgagtaaacactgatttggttttctaaatcatattttttttctacaaaaggttggtattttgtgggcagatagaatattattgtcatttttctgagttaagtttaaaatttgcaaatcgatcactttcgattaaaatataatcttataattaaaattgaaacatttaactataaattgatttagttatcaattcataaaataacacatttttggacaatttattaaattgtatgcagacaaccaatctatgtataccttcaaatacgttgcaatgtgtcatgtgctaccaaagagatatctaaaatctgtgacaccaagtttcatatataaatctcatgtgggtcactaaaactttttgattgacaaatgcagaagacatttatggtgcggatagaataaaatcaaataaattagagcctcgaatgactgtcagaaaattgtttgcatgcagatgtaagcttgggcaattccaccaaagtgaactccaactagaatctgactatccggtctgtaatgtgacttgcatatccgtgtatcttttgtatccttctatctgggttccccttatccgcttcctttgtatctgttcgctgccaccgtaaacaagtcggcaaagaccgactgccatgggcaaccgccccgcccccaatggcaggtggacttcccgcccccctagacaggtgcacaaaacggagccctaacatagtcacacacgtctcattttcccttcgcttttcgctcctgcttatacacatatacatatatatatcttttttcggttgctggcaaactaatttcaaagcaaatgcgatactgtcgcaagtgactgagaccactccccagcctgttgttgggtttcctccggtggttcaggtggttcaggtggctcaagttgggagtggtgcttgtatgtcactctgtcagcgatacccttactcagatgagtccttggtgacctcaagtgttggtaaaagtcgaggttagattcttattcgtagggggtttgatataaaaatggtatgtgcgaacaaattgtttaaatatttgtctgaatcatttagttttgacaggtaaagcattcaacatttatgtttattttgtatgaaacataattcttgttgtaaatttatgtgtataaactcgtcgttatattttttcagtgaactggaacagaagtctaatcacaaaaagggatctttaactttaagacactcatgtgctttcatttgtgtctgctcatttacgtaattttcccataaagtggcgaaaagtgtaatcgaaggaatgagtagaaagtattgctcgggaaaataaaatggctcaactgcactaacaatcagtaattagattgcaaaatgtatgggcaaaaataaaattggaattttttttcaatggaaaaatcatttgaaagcagaaaaaagggaaatgtatacatttccttgtgacaaatgctcattacggtcgaagctcgaaataagacaaaaggaaactccctactactcggaaaatagacgaatcatactcgacaactttcgctttttctctatcgaggtttgcaccagctccgagacctttgcaccagaattgtgtgaaaattctatggaaaatgaaaagttaccttattctccacccctgccattttgcccttggctatggaaaattgaaaagttatcaattaccgttccattttgagtgattgagtctcccaatatacgcccactttgaaatgaaagtctagcatatgccaaaaatgctttgtttttctcggttttcctccgcccatcttacattttccgagcttctttggctcaggttacaatttcatggcccagggcgaatggaggtaattgaattttggtttttggccaagcggctgataaagtggggatgacgaataatgttcaaattaccaaacgaaaaaaaaattccttagctggattaaggtagtaattatttgaggttattgctagctaagagtcaaaatcgtagaatactgttgatttgaatacgcttttgttaactaattatatttactcatatatatttattatatatttatatatatattatattttggtaacttttcgtagtactgaaagatctgaaagatgcatctttataacttgcaacaaatcaaatccaaagccaaatgctaatacaaattatcccaaaacaggggcacttaattcgattcacccactgaaccacttgacatgattgaagtcagatcaaattgcccaaataaaaaccaacataattacgatgatgggaattaattaaaaagttcgtacaataaatcccaaaaattatttatatcgatagggaaacgcaagaattccattgcgaggccaaataaagaggaatgtgttttttagaatctattatgtttgtgtgggagggccacttgccgcgttgccaaatcgatttcaaaacttcataaacaacccgggcaaagaatcccccttcggcaagatttgagaaatctacgctcgaccaataaactgaaaacaacaaaatcagcgccacagagaatccaaattcataaacaacaaagctgcagtttgtgcgccttaatttgtttattttgtgctaaagagcaacacgcatcgagtgccataaaaaatcaacaggcagcattaaacaaaaaaacgcgtagtggcaggggcaaacttacagaatttataaactgtgcaaactatggccgagaggcggccataaaaaaggcaaaaacggagtcgaaagggaatatttatgcaaacgtcaattgggctgcaattgaattgagccacgaggcatggcgcataaggaatgaaacatgaggcacgaggcacgtactttcagatgcctcatcgaaaagcgggatctgtgaaatacccattgcgaaaagagttgttctgggtatggtttgttttagtgaacatctaaccatttatgaacatgttgatatggaaaaaatagcgatctaatttatctaattttaattattgcaacgttttcatatatcacaaattgtattgatatcaatctatcaaaaatgaaggcatctaaaaaatacatttatacgtttacctatgtttagctgttaaaaaatgaatgcctttatgttttaaattgcgtttattatatgtactttgggtaaaaactaaccctgcctttgtgataccaaattgcatataattaaaactagccaataaatgtcaccattcacattgtttgtcgttgaatgtagcaattttaattgcctgctaatttccaacacagagcatttccaattcgttcgatgagctttcgtttgtatcttttattagatactcctccgtctgccctctaaattgatatacaagtcagacaacgtgacgtatgagtgatgatgcgtgtgcgtctcctttgcaccgccccctcatcaccacccaccatgtaaacattcaattcgatggtagcagcatatgattgccatatttgccatagcgccagttccgaaaagtgttcgataaatgggaaattaggttgcaacgacgccggcgccaattcaaaaaaaaaaaaattttaaaaatacaatcggaaaacgaaaagagttttcactggcacttgtttatggccgtagaaaccacttgaggctgtttggaaaatccccccttttctcccaccccttgcctcctttaatagccagcgtttgattgactgacgagcgaacgagttgaatgattgcctgctgcacatattgatttgcatctactggatcgcccatttgccgtaatttgccttacacaatgccataatttatttgattgatatgccatatatgcgcacagtgtatatgtgtcatctctccacatatatatcgcatgaattttaaaattatttgccttggcttctcgccatttgtttgccgctaatttgactgtcaatcaatcggtgaatgcaaaagttttttctgggccatataaatatttttccgtttgtaaattcgctatatataaatacacaattccccatttgttcggtaaaatttgccgacgttcattgtttgatttcagttatgttcagcatacagattgggacttaaaatcaatattattttctggcattaagcaaataatacttttaatttttttatctctctttacatgaaatggatcactttgttttaggcattgtttgcctatcaattattcatacatatgataatattttttaacgcttcgtactatgtcaagtgcttaaagtctaaaagtgagaatcaatggaaattaatgaaaatttgcaaaattcagataaaagcttttgaaaatcaacctaactttcttgttttatttagaatacgtaaaaaatcataagtcattttcaatcaattccggaccgcccactttatgcatacatttttcattacatttcagagttgtatatttttaataaattctataaccgatttccatggagagtagagggctcaaattaattgtgagacattcgagagcaggagtcaatttccaaacaaattttaccgaagaagccaaaacaatgattttatttaacttgggccctggccatctcaattgggaatatgccataaatttacagaaaaatggaaaacaggacaggaaaaatacgatttaactgtgaaaaatttatatttgtgtgtgtcttcactttttggcccgtagcacagtcgtcatcatcatcgccttggccatcatttattcatgacaattttgcttctctcagctgcatcctagaaatacgtagtgaaaacggagtcacaactatgccggttgcttttaggtgaattttcctgcaaatgaaaaacccactcatcgataatgcagacgaaaaaccgcagcgaaacaggggttgaggaaatgtaaagcaattttcatcccataactgagtaaggaatatgcctttattttttggccagacaagcacagttggagtttggtttttggggcagagattcccattctgaagcccaaaaaaagcgtattttccataacttcagctagttgacagggggaagcccaaaatttaaactgtgcaaatgagttggccacaaaatgtcagttacagacacctcaccaaacttttttccccttttacgaaccgcaaacgcgacgaaatttttgggggaagaaaacgcatagaaggagttggttaacgttttcttttccccccatcgtgcaaataaaatcaatcaattttcggtctggcaagtggcagtagcaaccagtggaagcagcggcaaagcagttttctaagtgctcttccgacaccgaaatctatttgccaaggtgatgacaaaaagtgtggagacagggagtggaaaatgggaaaagtattgctgatggcgacgactggttatatgttctttaggagatccgtagaaaagcaggatgcgctcaaattattagttaaatagtgctaaaggtgattgttgaacaattgggaacaaccaaaaatttggctatcggtttacaccactttattaatccttttgtaaattaactaaaacatttcaaaatatttttctttaagttacttgaatactttgtatttactgaaatacaacattactatgatctttatatgtgcttacgtatttggttcattaactagaatatacttttctgtgctcacatcgataatttactgtattcaaactgttcccattgagacgatactccttaataagtcatcgatttccatggcagtcgatacagacccactttcgagtacggttccgtaattaatagaatcaactggagagcaaaccctcaagtgttgaatgatttagcaggcccttcccccgcctctatctgatttcaccagcggaaagcggcgttgaattttcattaacaaaaaccgcaatgggaatgggaacacagagttttcgagccctgtgtcgatttctgtgtaatgcccgaaaataaaaatcaatcaacacgttcgcttaatagaccatcgactctgtgctcagatgtaaatgtatctgcaagatacatcttcgagtataagtattgcacaaagacaaattgcttttgtctctaattttaacacgactttgacgggctcttcttctctcaactttgccttaatttgtttgccgtgggagtggaaaaatgttcacacggttaagatttttttttttgtctttaattttgtctatgttttgcttgagttcggtctggaattgattggcgcacgttttgcgcgtggctaagcaaaaaagggaaaacataaataaatacaaaggaaaactttactcaataagcaaaaaaccagcgagagtacaagtacacaaattttttatgggggctcctcacgaaaaatgcatttcgaaaaatttcacatttacatttggggtttttcaccgctctgctttatcttcttcgggttcaatctttattgaatgtctgcccggcgtctccaacttcttatattttttggaggcaacagcactttgtgggtgcttaaaacagctgacaggccccactgacagattgatgtatgttgattctcccttctgccggctccctgcctctggtgaatattttccacactcttaatgaaaatatttctgtttgtgctattttcatttgactttgcggcctgttcgaagatttatgtctttggcgggattttcgcccgtctttaacctgagttaatttttattggggaggctaataggacacgcacctaagtcgttgacgtttgggcctcatttgacatattttctcttagacagagtgttttacacatttcggatttgcttaactaaggaaaaggtcaatatcggcattaaagcatttaaatgaaagccaagcgaagtgatcgacatcttaggactagtaccaattttgcatctatgggaaacttcaagggaaggatccaaagatgccctttgggaaaaataatacttttgactgactgcatcgatatatttaatacatagaaacagcgtggataataataataatccaatattatcagtttctcagataccagcagcacctattattttacttgacttcatagcagtcgaaattgtattattaggtgtctctggagtgttatatttatacgaatagattattaattttcacttaattttatttagtattttttaagtatctgttaatatttcaacctttaacttttccctaagcaaatatatttttgttactctcaaacctatataaagaacattctcatatgatcaacaaagcctttgttaatcaacagtttaaagaaatattccaatcagtttcgaaacttaagcctccgatttatagaacaatcttaagctaaacttcccctcagattaaaccgtttagacagttgtaaatttattcaaatccattgacagttgcatgatatattcccgccaaggattttgccaattttaaacccattttccgccgcacccaaaaggcaaagcaaaactggatgaacgcataaacaaatatgccaaaaacatagtaaaaaaattgtgtgcaaaatctcgcgcgctttcggaaaaataaacaaagctaaaggaaaacccacaaaaaatgatttggatccatttgctgacccaaaaaaaggagcgcaaaaaggatagcctctggaggtggagattgccggtagcttgagggggcgtggcagtcacccagatggtgggttttattgtttatcttagtgagaaaatatttgtttatttgcacaaagactccttttttgttgttcacttattttacgttttgcataaatatttttacattccgaaattggtattgttttatttcgtcgtgctgcacttactttatatgacttttttgaaagcctctgatttttcttccttttcaagatgccgattaagttaaacacctttatctcgatcacttggttttgttttactgctgttttcccgctgtttatcagctgctttcgatcatatttcgtttgaaaacatcttggaaacgatttttttaaattccaactgttaaacttatgcacttttcaatccactaatccacgagtggtggacttagggggttttgtggggtttctttgctttgttgttaaatttttttgttgaccggtcacacgcactctcacacacagatgacactcagggcaacagtaccgttaatccaagcgtccgtgacctgcgatccgttacaatgctcgcgtcgaaatagactaaacgtatctttcagatacattcgctttccgtttttcgtgtccagacgaaaccgttcgtgtcgtgggaccgaagttgcgacgatgcccgccgacagcacacgaagtagcgccctcttgtggattttatgtgtaacctcagtcttatacggcttaacagtgttctaacagcacaaattcgatgcaaaatttctgaagaggagaatcaaacagaaacatgcaatatcttcgcatggaacacgttcaggtttgaatcaaactagggagaaaaacaacgaattatcaaagtatttgatttttatggttctatatatttaattttgatatatttatattggaatcggaaatggaaaagaactaacatcaaataattcgacgaaataaacaaattcgattttactttaattagtggaatgatgtaaataaataaatgaacatatgtttatagagaaaaaaatatttcttacttttgaacgtagcattgaattaaatcgatttatgcctctcgatgcgtactttaaggtggaatatggaaatcctgcatcaccggccagaacagctccaaatattgaaatccttgctttcgcattttcaatccaaattctactaagctactcctccgccaaatagcattgaaatacaatgaaatttgtttttggaagattctgaatttttgtatagttccagttcttggaaacctgatcaaatgtcggcaaaatgtgggtggttagttaatcagttagcaaataaaccagtgccaacttggcacaaaaaccagtcagttgacagtgtcagttataatatctacctacttcaaaaacgtgtgggtagacgcagggcagggataatgagaaaattatgatacgattgactttgatgaatctttgagtataagccggtaatgaatatgtatatactgaacaaaaatttgttaaactatacaagcaatacattaacttttattcacattcaatttcaaattagtcgtatatatagggaaatttttcttatgttgactaattgtttaacgaaaaggataccagtcttgctacaagtccgatcgatcaagcatgaacatgaccgacaaaatatttgtcctgccgttttatgacctcactgataaacaggtagtccttatgggttgtttaagaaacacgcacagcactaggtagaaatgcagatgttcttatttacttacaaacaaaacaatgaatacgaaaagcgataaaagcgagtctttcaagaaaaagtactcttttaaaaacgaagtgacaaaaagatatttttattaattgataaataaagcgtagtttataaatattataaatatatataaattatttgtacagaataggggataaacatcttacatttcttacttagttcaagttcctacaagaatgaaaatccaacgctggtgcataaactcagccacttaatgaagcaccttcgcaaccggtgccccaagaaccgaggcgattgccatcttgcccccgaattccccattgagacatgccgcaagaaaatctcctgaccatatctacttataatgtaaatagcggcacgcccataaaacaatttgccccgtcttacaaataaccctagcaaaaggcagcaacaaatttaacatttaattgtattaacaggcccagacatacaagaaagggaggggcatatataaatatctaaggggcatgggtaatcccaggcaaaaccaaatccggacgcgtgtccagtttgttgttgtttgcttagacagtttagggcccgcacaaagggccaatacaaaaaggggctataaggctaagaaaacaagccgagaaggccgagattggaacaggaaggagagatagggagggggaggagtttcccgctttgattgatgattttatgacattgtttactcgagtgatgatgagaagagtaagcagatagccggccataccatcctttgtgtcctttcaagacggtgtcgagtgaggctcgctcctcggaccctcctaataatttccccagcccccacgacactctctcccgcttttatggtccttccccggaatgctatcaatcttttgcttattagggataatattacaattacttgtaagtgagataagccccagggcagccgagagtccttagtcggagctgggactcggatttatccgggctcgcctcgggttaagtgctcaagtggtctcgctttgatctcgggatgtgtgcgattgtgttgtgtaaacagatatcagttcaagtgaagaagtcaaatgattgacaagacgagtaggaaaagatcttcaaaaggaatagtgctctcttcgtggaagaacggattcgaggcgcctggggtgactgttctgaaagaaacatgccgccacctagactcaaattcattgaatttcaaaattgaaaactacattttttagaacttcaatatttaatacatatacaaatgctaaatatttttattcatagtatttggtttt

SEQ ID NO: 13694 - DNA, 625 bp, DROSOPHILA
atggcaatcgcctcggttcttggggcaccggttgcgaagaacactgttaagccgtataagactgaggttacacataaaatccacaagagggcgctacttcgtgtgctgtcggcgggcatcgtcgcaacttcggtcccacgacacgaacggtttcgtctggacacgaaaaacggaaagcgaatgtatctgaaagatacgtttagtctatttcgacgcgagcattgtaacggatcgcaggtcacggacgcttggattaacggtactgttgccctgagtgtcatctgtgtatgttttcaaacgaaatatgatcgaaagcagctgataaacagcgggaaaacagcagtaaaacaaaaccaagtgatcgagataaaggtgtttaacttaatcggcatcttgaaaaggaagaaaaatcagaggctttcaaaaaagtcatataaaatatcagaaggagcaggaagccattcgaaacataaatccgccaacaatcaacatgtttggccatctcagtttgctggccgctctgtttttcatcggcacactgaaaggtgagttaaatcaacgcaaattgtatccgtttgtttcatagctacactaaaaacatgggtttctaaaataattccacatt

SEQ ID NO: 13695 - protein, 182 aa, DROSOPHILA
MAIASVLGAPVAKNTVKPYKTEVTHKIHKRALLRVLSAGIVATSVPRHERFRLDTKNGKRMYLKDTFSLFRREHCNGSQVTDAWINGTVALSVICVCFQTKYDRKQLINSGKTAVKQNQVIEIKVFNLIGILKRKKNQRLSKKSYKISEGAGSHSKHKSANNQHVWPSQFAGRSVFHRHTER

SEQ ID NO: 13696 - DNA, 3046 bp, DROSOPHILA
taaagggctcgtcgtctttagctggtttgccattctgtgccttggacttgttgggaagcaacttcgttttcttggctggcacaggttcttcttcatcttcatctgaaacaggtactcttggttaattttggttttcacagggatacagttttttagtattttatataattcagttggtttttaaatggatttcatgcctgccctgggcaacattaactcgctgcaccagagctgctcaaattcgcctttaaaaatcatcattattattggtagttagaacgaattccctaaatatcgacacttttacttaccttcctgctggtcatcatcttcactcccgctgtcaacatcctcctcatcaacttcggctacttcgtccaaatcgctatcctcatctgcctcatcctcctgctcatcgtcatctgattccgaatccgagttggccacctgaatttgttgcttttttggaggctgtttttgttgcttcttcttgggcagcggcgcctcctggaaatcctcctctaagtcgtcatctgcgggtcgaaaagtgaatcttacatatatttattaggcacacacgtttttaatcgtaccctcatccttggccacatgctttttactgagtttctccggttttttactgggtttattgccattttgtttgggtggctcctgcttttgggcgttcttgtttcccttcttctgcgagagctccttcttcatcttctcccgcttaacgatcttcttcatcagcagcttctcccgaatagacatattgctaactatgtatgctttttaatagagtttaatggttaaaaacagaattctcaaataaaatattgcgcgcacgtgttgctaaccattcaccccgaagcaaacgatattcagccagctgtgcctatcgataattgccaattcgatagttcaatgcaaaaggtgtgaccctatttgtaaacaaattttcaaccgtcttttgaggataagagaagcaaaagcgtttgcaaaacgtattttatatccattgtacattgctatcttcaactatgtgacttgtgtattacgagttaacaatattttttgtagactatcttatgataaggaaatgtgaattcccattttgaatggaatacgtcaatcacattttcttataagatcgtacaattccgcgttgacacatattaatttagtgtgcgatttttatgctctgtccaaccttggaataacatgtgaataattacaataaaggcacatctttgtcgctctccagcacattaattactagtatcgtaacaaaatgcatataaagtgcatataagtgaatgcgttctagtgcgacattatctgctccaccctcttgcgcagatcattgcgaccacaatcgcccagggcgcgacacagacgaagcagaaagtgcttgggatcgtggcaatcatcctcttcgatgagctgcagcagtcgcagaatctgggacttcaagtcgtgcgggtagcgctcctcgattgtgtccatttggccctcgccaatgcccgccgatcggcccagtcgtcgccaatagcgacccagttcctcggatattttcttaaagaccatcgttcgtttgtgatccgtaaaagcagctggggtggcatagttttggattgctgttggaggcacagcggcagctaattccgaaactgatggctgagcattctgggaagctggagcaatacggagctgctgacgaagttcctcggccaatcggagttcctggtacagattaaccggatgtccaagaatgttttccggctttgtgtaggcgctcagagcctcgatgagctgtggcatattgcctgatatccggcgcagtggctccacattgtactccgatagttcgtccgctcgttccaggcagtcaattaaatcctcgatggttcgtatgcaatccgatctgcgtcgcgaaccaatctcttcgacaaaaattagtttcaactgctccacgttctcggtgcatccatcaatggcgatttgtttgaggctgtcgtagctccagtgcctgcctgcagtcattgtgactaatttacagagacggtattttcagcggtcttaagttcccaaaatgtatcaacgcaacttcactccctgatgtagtatgaccgtatggccaaacatttccttacctgttatcgatcagcactgaataggtgtttgagcaaaatgagcaaaaaaatatcaaatactatttccatacaacttaaaaaatttaaaataagctttaaacttgcaccaccttgcatgtttgggatctattagtgagaccgttacatagccattcgataacatcgataacagatggcacgcaccatccctagttttgatagatatatatttatgtttttgttacttttactgaagcaactaatgataaacgcaaacgtgtagacgaatggaaatatccattaacgttttcgtattcctcctctacactctggtcttgatttaccttcagcatttcgttaacaagtacacagagttcgtccgcagcctctaaatgttgggccttcagtcatacgccagttcctcggatgaagaatcggaccatgcggacgccgccacagccaccacgaattcagagccctccgctcccattccggatcacctgctgcccgtggacaagacacactcgctatccaagtccattgctgtttgtgcggcgccaacggtggttccccttggagcatcggccgtgccccgaactctggatcccacgctcaaggaggtaacctacaatccgcgctatgaggagatgtatgctccggtaaaaggtccggagcatccggacctcaccatgcagcagcgcgctccgcggaacaccctagccggctacgtagagaaggcccacatcaatgccttcgaatttgagaaccagcgacgcacctttcacacctacggctacgcattggaccccagcgtagacgatcaggcggacggccagtcttttgtgggtgacctgcagtctgcgtacgatgacaatggcaagacggtatttgagccgcccaaggcaaagaaa

SEQ ID NO: 13697 - DNA, 1046 bp, DROSOPHILA
atgactgcaggcaggcactggagctacgacagcctcaaacaaatcgccattgatggatgcaccgagaacgtggagcagttgaaactaatttttgtcgaagagattggttcgcgacgcagatcggattgcatacgaaccatcgaggatttaattgactgcctggaacgagcggacgaactatcggagtacaatgtggagccactgcgccggatatcaggcaatatgccacagctcatcgaggctctgagcgcctacacaaagccggaaaacattcttggacatccggttaatctgtaccaggaactccgattggccgaggaacttcgtcagcagctccgtattgctccagcttcccagaatgctcagccatcagtttcggaattagctgccgctgtgcctccaacagcaatccaaaactatgccaccccagctgcttttacggatcacaaacgaacgatggtctttaagaaaatatccgaggaactgggtcgctattggcgacgactgggccgatcggcgggcattggcgagggccaaatggacacaatcgaggagcgctacccgcacgacttgaagtcccagattctgcgactgctgcagctcatcgaagaggatgattgccacgatcccaagcactttctgcttcgtctgtgtcgcgccctgggcgattgtggtcgcaatgatctgcgcaagagggtggagcagataatgtcgcactagaacgcattcacttatatgcactttatatgcattttgttacgatactagtaattaatgtgctggagagcgacaaagatgtgcctttattgtaattattcacatgttattccaaggttggacagagcataaaaatcgcacactaaattaatatgtgtcaacgcggaattgtacgatcttataagaaaatgtgattgacgtattccattcaaaatgggaattcacatttccttatcataagatagtctacaaaaaatattgttaactcgtaatacacaagtcacatagttgaagatagcaatgtacaatggatataaaatacgttttgc

SEQ ID NO: 13698 - protein, 239 aa, DROSOPHILA
MTAGRHWSYDSLKQIAIDGCTENVEQLKLIFVEEIGSRRRSDCIRTIEDLIDCLERADELSEYNVEPLRRISGNMPQLIEALSAYTKPENILGHPVNLYQELRLAEELRQQLRIAPASQNAQPSVSELAAAVPPTAIQNYATPAAFTDHKRTMVFKKISEELGRYWRRLGRSAGIGEGQMDTIEERYPHDLKSQILRLLQLIEEDDCHDPKHFLLRLCRALGDCGRNDLRKRVEQIMSH

SEQ ID NO: 13699 - DNA, 4736 bp, DROSOPHILA
tttaaaagatttcaaagtttgttttggtaatgagcgatacaagtaaataaattgctttagcttttgcttatcctcaattgaaatctttgattaatttctttggttttcccaatcattttaggtcctggagttggcaggcaacgcatcgaaggacttgaaagtgaaacgtatcactcctcgccacttacagctcgccattcgcggagacgaggagctggacagcctgatcaaggcaaccatcgctggtggcggtgtcattccgcacatacacaagtcgctgatcggcaaaaaggaggaaacggtgcaggatccgcagcggaagggcaacgtcattctgtcgcaggcctactaagccagtcggcaatcggacgccttcgaaacatgcaacactaatgtttaattcagatttcagcagagacaagctaaaacaccgacgagttgtaatcatttctgtgcgccagcatatatttcttatatacaacgtaatacataattatgtaattctagcatctccccaacactcacatacatacaaacaaaaaatacaaacacacaaaacgtatttacccgcacgcatccttggcgaggttgagtatgaaacaaaaacaaaacttaatttagagcaaagtaattacacgaataaatttaataaaaaaaactataataaaaacgccaatcatgttatttccaaaaaaaaaaaaaaaaaaaaaaaaaactagacgagatgtttgcgcttgtgtcgatgaatgtaaagaattgcaactacatagatggtaattaatttcagctgtaagaagtacaagtttttcataattgtgagaaaagtgcagtagtatcgcttaaagttcagttttaatcagggcatttagcagctcgaacccaatgtatttgtaagcccaataaacgtgtaaatgcctagagcaaaatatcacaactgtagcttttcatccgaaagataataatgaatagactgacctgacgtttttcaaaatgcgtattatttcaaagaagttgttatatatttcattgaatagcgagcatttacacaattaactgctaaattagacatttttcggattaaggaagcaagtagtaactacctattgcatactacagaagtggatatggaaaatgggctgtgtcctaacccagaagatggggctgagcccgctggacgtcgtcgcaacgctccttgaggtcctcgggatccagctccaggcaggcgccccactccaccagggtgatgcgatggtccttgttggagtcgcaggactcgaggaagggtgcgatgcagtgctcgagactgaccagcggagcacggatggggaagagctcgtggcgcgagacggagcgatcggtatcgccgtccaggtcgcaccacttccacacggcggcgttcgaccagcgacgcgagttgttggtctccgcctccagctccatctgcatgtagtgctcggtcagctcgtcgcgctcggccaggtcgcgcatcacgttgaacagccagtcgcgcatgcgcctggggaagtccttcaggtcctcgccctcgcagctcctgggctcgtggcaagcgccgtagtagtcgatgtgcatgtgcgcgttgtccggattggtgcagccgggctcgccgctgtcgcaccagcagcgctgctgatacacagagcagtccgacggccaggtctcgttggtattggtgcagaccaggcggcgagtgtccacctcctccgggcactccggaatgcacacgcatttgggcttctcgtcgtgcatctggcagatgcgaccggctccgcagctcatcgtttcgcacagatccacctcgacaacgggattgagtagattgtgctgcacttcggccagcttggtggcaatctcattctcgcgctcaatatccttgatctgcgaatggaattcagttagtgcattaagtgtgatttgtggtttgacttgcggccacatgccttgttcttctcctccagcaggcgcaggaactcctcttcgttctcatcgatgtcggacaggtcgaggtcctcatccagcagatcttcggaaaactccgtagaggcctggacgtggctcacagccagcaggcccaagccgagcagcagccaaagggagcgcatctcgaatggcgatctcaactacagggattgcaagtaaagcatctttaaaacacctttttcttctctttatatttaaactatatatttggaactaaaagtgcctttataaatagagtacattatcaagtcattgcgattgtgaaaacccaaattacattgagattagctgtggccctggcccaacttccgtttcaaggattggtttgcgactgtaccgtgtgcgctgcgtcgttactgtactccactggcgatcttgtaaccaccaaacaacggggtggttttacatgcacatctcgtgcggcgtctttttgctcattgaaaacaattgaagaagccgcaaaaatcttgcagggttcaaaaggtcaacgcgaatgtggcgcgcagatacagatgcatttccttttatgggcaattttatttatggatctttagatcttgtggaacaacaaagccaactcattgatggcggaagatgactactgcagatctggagtttttaaaatagaaacaaagtcgggggaatggataaaatctcagaattttcaatgtttgcttttcatttcctgctgcctgctgcaaataagcatttttctcgctttttgcaaccgcaaatttgaaatatgtttgaatatttcagaatttggggcatgttgaacacatgttgagcagttcaaatcgtttatgaaatcatctatatatgcagatgctcccattaatgcgaatatacctgattaaagctgaccttaatcctattgctaaacacacacacaggctaaactcaagccgaattttcgtaatcatttcaagatgtcgccccagttctatgctcaatcttagtacatgtgctatatggcatatatggcacatcattggttgcccaacgacacagttggcttatcaggttccagcccgacttggccccaccgccgcttatcaggatcggtcggtcgcttccgttttgggtagcacaagcaagatgtgcttaatcgtcgcttttgtgccgctgaacatcaagtcaaatgcgcagctatgtatctggcaattgagaaatgtatacgcgatctcgcggaatggagcttccaggaatatccgagagtgggatgctgctgcagtgcattccacatgttgcacacatatatatctatgtatacaatgcaatatatacttccacatgtgtttgtttaattatgccgacgaaactagaaacaatgacgtgatgcagtgtccaagatgcaatgtttatgcatcgcgaatgaaagtggaccaaaagcagatacaatctacttgaattggcggaagtgcaattcacagttgaccttgcaaatcactggacttacttttgcttctcagttctgaccaattaacgaactgatttcatcgaaaataaagtccaattgattgactatttgccaatgagcaaggaacattgaacttgagcaactcgagccagagctgagcttgcagaaatttgaggaacaagcaaagtatctgtatctgcatatgtcacacacttgttttgttaatccgattacgacactcaatcctttgtttcactctgcgtgagtactcactgtgcgttcaatgaaaaagtgtttcccttcaaatgtctaatcgcgttggcggatggcaggcgactgtttgcctgtggaaaagcttcggaatgattacggatcgccaaagtggagcatggagcactgcctgcccatggttttggtgtcgcctccaacgtgttggctcccaacatgttcgcttggaataaaaacactgattgcttcgattttggcagctcttttttattggtttcttgcttttcaacacataaaataaatcgtgtcctcttctacgtacctcatagtttatgggaaacttgagccttggtcttttgaaataggccactccagcgttgctccgggggtttattttttttttggaaaagaaataggttgtttgcttagaaaagcgtaataaagattcgataacaagatacacataagttagaaacttaagagcacttataaaaactctagtttatcctagatgagatccgttactaacttaccttacgaattaactttgtctcaagagtattttgtagagtagagtatgtttaaaattagagcgatatttgtttgtatctagaatggcataacggtaactaaatatagtttatgctatcgctaaagagaaagagacttacatatcgtcagctaaaacaaatacatagtgttgtttttaatttgtatttatttaaaataaatatgcgtatgggttttcatagagttcggttaagtgataaattgtatctcgataatgcagcataacgaatcttgcaaattgtggactagacctctcttatttcagtactgcattatatataaagatcaattcaaagcccttggcgtgcacaacagcttaataataggagagagtcgagaataaatcgtaagtctagttaatccgaaagcatatacattttcttcgcatttttttcgggtatatacacttctttgagttcgtcatgatatacaaataagaagagatatatgtagtatatgaattaacatcgtgggcgacgagataagaaacctttaacattaatacagtatataagtgtcc

SEQ ID NO: 13700 - DNA, 1121 bp, DROSOPHILA
cgcgattagacatttgaagggaaacactttttcattgaacgcacattgagatcgccattcgagatgcgctccctttggctgctgctcggcttgggcctgctggctgtgagccacgtccaggcctctacggagttttccgaagatctgctggatgaggacctcgacctgtccgacatcgatgagaacgaagaggagttcctgcgcctgctggaggagaagaacaagatcaaggatattgagcgcgagaatgagattgccaccaagctggccgaagtgcagcacaatctactcaatcccgttgtcgaggtggatctgtgcgaaacgatgagctgcggagccggtcgcatctgccagatgcacgacgagaagcccaaatgcgtgtgcattccggagtgcccggaggaggtggacactcgccgcctggtctgcaccaataccaacgagacctggccgtcggactgctctgtgtatcagcagcgctgctggtgcgacagcggcgagcccggctgcaccaatccggacaacgcgcacatgcacatcgactactacggcgcttgccacgagcccaggagctgcgagggcgaggacctgaaggacttccccaggcgcatgcgcgactggctgttcaacgtgatgcgcgacctggccgagcgcgacgagctgaccgagcactacatgcagatggagctggaggcggagaccaacaactcgcgtcgctggtcgaacgccgccgtgtggaagtggtgcgacctggacggcgataccgatcgctccgtctcgcgccacgagctcttccccatccgtgctccgctggtcagtctcgagcactgcatcgcacccttcctcgagtcctgcgactccaacaaggaccatcgcatcaccctggtggagtggggcgcctgcctggagctggatcccgaggacctcaaggagcgttgcgacgacgtccagcgggctcagccccatcttctgggttaggacacagcccattttccatatccacttctgtagtatgcaataggtagttactacttgcttccttaatccgaaaaatgtctaatttagcagttaattgtgtaaatgctcgctattcaatgaaatatataacaacttctttgaaa

SEQ ID NO: 13701 - protein, 304 aa, DROSOPHILA
MRSLWLLLGLGLLAVSHVQASTEFSEDLLDEDLDLSDIDENEEEFLRLLEEKNKIKDIERENEIATKLAEVQHNLLNPVVEVDLCETMSCGAGRICQMHDEKPKCVCIPECPEEVDTRRLVCTNTNETWPSDCSVYQQRCWCDSGEPGCTNPDNAHMHIDYYGACHEPRSCEGEDLKDFPRRMRDWLFNVMRDLAERDELTEHYMQMELEAETNNSRRWSNAAVWKWCDLDGDTDRSVSRHELFPIRAPLVSLEHCIAPFLESCDSNKDHRITLVEWGACLELDPEDLKERCDDVQRAQPHLLG

SEQ ID NO: 13702 - DNA, 14974 bp, DROSOPHILA
gcacacgagaatcgcccgcacttgtatttcgtggaatttctttaattcgaactccaccgacctcgcactattgctctgtattttgtattttcgcacttttcattcacgaaatgctggggcacataatttcgccttgcacagtattaggtatcggcaattcactgtggcctctatttgacagcgatgattttccgcacgacgaacacactcacaattccaattcacggcgaccgcggcaacgatctcaacgtttcgaaatcgcgtgaaacactgccagccgttacccttgttgtatacgcgattttcggtttagcgcgttttccaactctgttcggtcgttttcgaactctgtcttttgaccgcttacagaactctgttagtgccggctgttacactagcgcgccacctatagcagagctcttcgtttaccaacacgccatgaagcccaatactgaatcctcgcgcactaaaaacggatattccatttgtaaaaacttttatatgagcataatgtcattagcaaatattacattctggatcacttttttttcgaaaaatttagaaaatataataaaataatggcgctattattgtgtcgatttcttaatgacataggaaatatttttatgtaatcattgtccaagagcatctactttccatgcaatcaagcataatcatttccttgaactccccgcctaggtgataaatactaactaactacaaatactaggagctgctgtaaaaccaatttaaaccaattttaaatatttcgctaggatctgctttttggggtttggcttttagaaacgcaagtttcaagtttaaagatagtgcgccatacttgaatatcgtaaattgcaagcagtgctacgttttactgctttccgagttggcgggcgcattaaaatgcactgctttcccagttggcgggcgttttaaaacatgcagacaagtctgctaactactcatgggtaaaatgatcaaaatccaaggaatggatcacatatttaaaattcaacttggtgtttaaaaaaatctttgaaaagatgcataaaacagtacagtctttatactttattaaaaataattaatataaaaaataatatttaccaaaaacattcaaatgatgattcaaaattgcttagttaaaaaagaagttagcaaaaaacacttcttgtgaccatggcaaacttcaccttatttaaattcggcttgaaaaacttaaatattcagtttaattgaaacagtagacattcggttttaaaaatttattttgtttattttaaagtttccttcgtttttgtaatatttattttctctttttttcatgtgtttgtttttggaaagaaagaaaagtacctaacaagtgtgttttctcttataaaaattaaacgtacaattatacagtggtttcggcttgttgcggttctccttcgtttatttattgatttttttttacaattgtatgatttgcatttgtttgttgcttttatctatcgtttagttaaatatataactactaggagagagtttaaataattatttatgtacttgtagttgactctgttaagtggttggttgtttgttttgtgggatgatttggcttctatgaataaactgctattgggcccatgtgtgtgtttacagtttaaattttataacaataacaaattatgatacatagttatagctttaataatattataattaaaaatcaatcgataaatccaagcaaatgaagagaagaggattctgttgcatgcgtcactaaaacaggaaccaaagccatcttgttgggggcccaggagtgttctcttcctcttctactactgctccatattaatttgaaatgtcttcgatatattttacaatttgaaattgattttctttttattgtttaatgttgattggctttacaactattttgttttataatttaaaattatataagtgtgtgtgtgtgtgtgtgtgttggtattatttttactaatttacagacagttctagcccaaaaagttgtttgataagagggaagtattcgcattttttgtgtgttatccaatcgtttaaatagtattcctgattctttttgctttcttttaaaggctaaaattaaaatttgcttataaaatgtggctcttcttgctacgacttctccctatttctctcgtgaggctgagtttttgtaaagtagattttgtgttttcgttttgtttcgcttaaattagtttgggttataaatttaaatgtatatatttttacgcttaaaattgtacacacaacttagtttcattaagttttgctgattcgcttttttttgtgttttgtttttggattttttgtggcttctagtatttgcaatcaaataatttaataatttgctggctggctttgtatctttttttttcttttgccatttgtatataatttaaaattataaacacccccagaatcccaattttgtagacatgtgtgtgtgtgtgtgtgtgtggttgtgattgtgttcgtggacgtctcctcttagggtccataggcatccgaaccgaagtcaaacagccgatcgatgccctcgttcgcgttcagcgcatacggatagtcattgtcgtccggcggattgatggacacaaaggcgatatcgttgctgaagtctgtaaataagaatgcaacacattactgaatattccggcattactaaatgttctgcagttcggggctgggctggctgcatatgattttacattgggttatttgacgatttcatctggacaaccataaaataggagagagagagagagagagctgagagctgatagagcgagagatgttgtggatgcatgtttgaaattcacgccagagctgaatctcatggtgctacagaatttcaatttcaaaatgaacaatttgccctggagcggtcagtgttgtcagtgcagacccacgagaattcagttccaaaatgaatttgacacgaggacgattgctgacgaggcggcgggttttatgtcgatatatatacatatatacatttatgcacaattatttaatattattagtatatggttaccgtttcgttgttagcacagtgtgaaagtaaaagttgtgaatgaaacacaatgataaatgttatatatagggttgtcggttgggtggtttactttttgtaaatttatttacatatacatatatatttaggagttgaagtgcctataatatcactttcacttcaatttattttgccctgcttttttttggctctttttccatttgagttaggaattcgattaaacgcaaatgaaaataaaatcaaattggcaattttgaactgattctcgttggccgaaaggttgtaaaaattaaacaaattaaacaaattgaaaaatttaaaataaatataggttcttttttggaatcgacccatgatttcgcttaatgttgcttcgaggatttcgcactcagcaagaactcagactgtgatgcggcttttaagtacacgcgggtcacagagaaagttcttgacaagtgcgcctcacatagatctaaatgcatcgtaggcacctcagttagctgcgtatctttaaatatttactacaaaaagagttacaggcggatgcaaaatgatcatgaatgaatgttcggcgggcggttgcaggcatgatcggttgcaaagatatgtacacatgttgcaaagtatctttcatctttgtatacctttgccaatacgttacaactattattttaggcgcttagctgctcaagtacttacagtccgagccaatgtcgttgaagagagcatcgaggccctgcagcgtgacactgctgctgttgctgttggcatcgcagtcagccacgccgggcggcaggctgttgcggtcatggctgtacggctgatggggatcagcgttggcgccagcgccagcgatgctgccatagccgccgccgccgccaccaccgccgctgctactgccgttgttgctctccgcgacggcagcgaattgcatctgcagtgagcttgctgcggccgatcgcgatgtggcagctgtcgtatctgctgttgcagatgttgtggttgcgccttccattgcacaattatacatgggcacatcgctgcgtcgctgactgctgccgtagcctattgtgggtggttgggatttgctgttgttgctgctgctatggttgctgtggttgctatgattgctgtggtttctgttgttatgactattaagcgtagtggttgctgttgttgagctgcctgcggcaattgctgcggctgctgcctcccgacgccgcttggtgggcgttggaggcgaggattctgttaagctgctgaacagctcctggatggagggctgctggtgctgctggaactgatgggtccggaccacaggattcgtcagtgtcggaaccagctggttcagctccacgtccacatcgtcctcctccggctgctgtagcaactgttgttgttgctgctgctgctgctggttcagattatgatgctggcccatcgcaatatcacaaatgttattatattcaggctgggactgcttggcggcttcctcaatcgatttgctgaggttgcgagccgagcggtagggcgtttgaactgcaatgcgaaaatgaaattaattaaactatgtactttgaagaggtatgaaaaacataattaaacacatcctacttgctactggctttaaaaatgctttacatatagttggcaagttataaaaaaaaaaaaaccaaaaaatgcatcatatttattatattaaatctttgatcggcatttaactcacataatcccttggtgctcatggcatcgatattgttgaagagcggatcgttcagtcgctggttggtcaacggatgcagtcgtgtggaggtggccgtacggacgcatcctgcaccgggtgctccaacgtagccggcgcccggcgcgattggcgaattttccggtgaggtgtcatggcagaggaagacgttgatctccccgctattctccgccttcacgtaaatctcgcgcggcaattttgtgttgggcagctgagaagaaaatcacaaacgaaaccagattactaaccaaattccaaatgtcgctatatatataatatatatacaataataaataaaataataataaaataaataatacaatatatacaataattaaataccgataaatggcaaatgggggaaactaacgttcaaattgaaggggagcggttgaaattttaaagcggtcgccgaccgctcggcagcaaaagagaaacacaaatgaagcgagcctcagaatgagcagcgtttttttttttttgccgcacgcgtatttttagaaatgatattttgcttttcgctgtttcgcgccccctgtcgtctacttttattttattttatttaattttttatagccccccttttgcgttcttgttatttcggcaatcggttattggcgttgccagcgggcttgcaacatatacaaaactttggcagttctgtgtggcaaatgaggatctcctctggaggttcaactatcgggggaaatccataagcacaaatgctgccgcgtctgcacagaaaatagtgcgagcgcaagttcatttagcagttcaaggcgagcggatacattaagcattgctatatttttataaatagtgcggcatctagaaaaaccgagcaacaaaagcagcggcgattggagaacttcggcggacgaggccacaaatttttacttgatatcaaatggaaggtggccagcagggacgacggatgggcgggattccatttcgcctgtcgtgtctgccgttgcgatggccttctataaataagcgccacgtttaatggcatgcagacgctaagaagaagcaccgattactagaaaaaagcagagaaaagctaggaaaagctctgacgtagacaatgtatatgagaactgcacagagagatatgagccgttcgtacagaaataaaagatgggtaggatcgacagatttcgattaagtgctaatgcacttgaattaatattcttcacaccttgcataaaaaaaaaactgtcagttgacaagtaagcaatactctcttggtttcttcacggcctatatggttgtcgctaatcgaatactcaccacaagcttagcctctggcggcgccttgatcacgataacgatctgatctttgaagagatccacgttgagcaggtcgttctgcgtgacgtaggccatgccgccggagttctccacctcctgggagatctcagccagattctcgcgcatcagatcgatggccttgttcagctcgttctcctgttgctccagccgcaacgaatccgcttcgatgtgacgggaacgctcctggctgaccatcgactgcccgcagcgccactggatgttgttcttcgacttcttctccaggatgttaatgccttcgaggacattggtaatgtcgtagatgcgccgcttctgaacgtgcaatcgattggaggcctcgttcagatccaccacgccatccggtgactcctgcagcaggtccacaaactttttggtcagtattcccagcgaggtgtccgcccgattgcgatctccgctcgaggaactgctggccaccgacgcagccaactgttgctggggcgtcgacagcgaaaaggggtgatgcgatgccggcttggccacccgctccaccacatcctcgtccagttcggcatccgcgtcgtggcgcagctggtggtggctgtgccggagctgctggggcgcactgctagccgtatgcttctgatacaccgtctggtggtgggcgctctgcttggcctgcttcttcgggtgaatctcatcgctgacggcgtgtggccgacgtttgacctgaaatggaggataaaaggattaaagagtgttatttactgaaacgaattcctttctttgcttttttatatcaataattttctgttattgatgtattattagctatatatcacataaaactccaactgaccttgtaataatttgtgatatcgttggatttgccggtcgccttgcgttgctgctgattttggtggtggtgctgctgctgcagttgctgctgcgtgtggcccgccgttgccgccgccgctgctgttgccactgcccccgtgttgtgccccttgtccagactgatgtagacatgatcccgcaggtgggctgccacgccgccgttgctgttgctgtcgctgctgctcaggacgtgatcgtagtccaagtcgacggactcgttcttgatcacaatgttgttgttgttgttgatgctggtggtgccgccgtgcagatcgtagttgagtctgcgggccaccatcgtgtggccggttgtcccgctcccgccatagtgttgttggtgctgctggtggcgctgggtgttgctgctggtggttgtgtggctactgctgctgttgctgttgttgatgggggcaacattcacaaagaacttggacatttcgctgccggttctatcgtgattcctcggcgattctccgcctgactcttactctctccctctctcttctccgctctctctctcctctctctctctttgctccgtgtatatatcttctgtatatattctataaatatgccgattctgttaggttcgcctcagtcggcaatcgctggcactatattgtagcatacttttaagcactgccttcgaaaagttgccacccagtcggaatttccagctctcgagtcgattgacttattgtactgcctgtttctgtttatcgctctctatcttcctctctttgcagcttgcgcttatcaactaaattagcacctaaggattcttcacatctgcaagagaacaaacaaagaatagataaggttaaatgcgttctgtatgtgtgtgcgtgtgttttatttatagctagattgacctgctttcttgcaattttatgcatttggcacattaaacttttgatctgtctcttatttttgtccagtcgggcgcaacaacaaattaaaatgcgcaacggacaagcgaacgggcgattgtttgtatgtggaaatgcaaataaatacgaatcgaaaggtaataccaaaagaaaaaagtttcgcgactatagaaaaaaaaaaaaaaaaaacaggactgaaaaggagagtaggtaagcggaaaaccggtaaagaacggagacttttcgacgtcttttttatggtcaaaaccgtgccagccaacttccataataacagacataaattgcaatagactgataaacttttcgcttcagtaatagattctcacatcttttcgaccttctatgaatgtacttaggaatcatgggcacttgcaagattgtgacacgtaaacgtactcttattattgattaaaatagtttttttccacaaaaatgttttgtggtctgcatgtacatattttttgacattcaaaacatctgttatttacgattttgaaaggcaactaaccacataaaatcagatgataagtaaaaatctgaaaaacaggaacaaaattattgttaaaccaaaaatgccaagctcgaccgaaccggattcaagtgttagaataagggaaaaggggaaactgtccgctctgaagcatgccgaaactatttctgatgccaagaggaagacgcgcttaggttcgcgcacaaaatgtcaataaactcggcataaaatattaaacaatcaatatgtgtgtggaagaatcacaaggcagaggcaacaaacgcaaaagagaagccaaaagataggaacaagaaaaaaccatcgggcaaagaagaaaataacgttattgccgccgcttggctctaaccgcttttggcaaaataccagcctaagcactgtaagaaactaaggtatatggcatataatcgagataaaattatatcaaatatatttttgttaaatgtgatatgaaatttctttcgcactgccatccatattttaaatatttaaaagcaatcaaataaaatatatgtaccaacgtttttcgcagtgtgtctacctgtcacctcttgtccaccaagcccgactttaagttcattaggggaattctggccccattcgcaactaaagcgagcatgaatggaagacgacaacaaattaaaaagctcaaatgagcgtaaaaagaagactgaaaacaacaacaggcaggtaagaacggcaattagcgctgctcgccctgcatgcaatgttaatttgcataacagaaactgttagccaaacagtcaagccaacgggtctgagtttagcgaaatagatagaaacacaactccgcgagctgataattattctaaaagttgcaagaaaacacccagggaatgataaagtaaagtgagccagagaccgctaaaatatcgcatggaatttgctgaaatttgcaaaaaaaaaaattggaatgacaaacgcgccaggtagacagactatcgaaattggcattgcacagtggccttggagcacgcaaatcgcttttaaaatttcacccacttgaaggtaactaaaaccagaaactgcttatcttagatatttattctttcgctgagagtaggaatatacgtaagcaatcttggtaattagtatatattataatatcccattatacgcaagcatttaaatagatctcaaaccgtgttcccgacttcttccctctttctttcccactatatcgctaactctgttccactcaattgcagtcgcgttggcggcaacttaatccctctccctttttcgctaccatttctacattgaccaaaagctttgcactgattcttcgtgcgtgtgttaatgtgtttatgtgtgtttaagctaaaaaaaaaacggtatctgcttacagacgaatgagctcaggtaattcaactcctatacatggaaatcgtatactctctctctctttctccctcccaaagaaatgctaaaatcatgtgggccagacaaaaggcgaacgatgaaagaggaagagtgggggaggtgtaccaaaaaaaaaccaggtaggtctcgccgattgaaatttccaatttaaatttcttttgatcggcacgcaaaatgcgaacaagtagctcgaaatattttgcatctaaaattacagtgggacgtataaaattactcaaacaacacaatttaacaagaaaaaacagggagggcggattagcaagccttgagatcaaacaaataaaatgcagaataagatcaagccttacttttaaagggttatacaatttgtgggtcttcaaatacatgcgatatgatggccttttgaggccctaaaattgcatcattacattacattttattattatgcaggggttacgaaggggacatctctatcttatcaacagtaagaaattgcttcacagcttgacacagcgtttttatttaatggatagttaaaatgtacacgtaattacaaattaacaagctcactcatgattctgtcatcactatttattatactacaaaacttgttagacgcttttcaagtttctccaaacaatagccactgaaaaatgtatttcgaagataaaatatctttatctttataataacaacttctaagtgcacttgtcagtcatctctgcatacatttatctaactgctgaaggcgaagcacaaagcgaagcaaacagagaaaaaataacattatgcaaacagggaaatgaacatgaaaatacgaagcggccagtggaatatcgtggaaaatgtggcctacacggcaaagaaataacaagtttttctttatttttcattgtttccttctctttttcctatctctacgtttttcaatcaacattggcgcaacagagcggagctacaataaaacctagaatagcttttccttgctttgcttttgctttgcccgtacaacatttgtatgactgataaagaaaaggctagaaaataaaacgtacacattatgtagtggccgagtaaataattccgttgggggttttcagtgggcggggaggggtgtttgacgggggagggaggcagccaagcgactcagggcacgcaatgcgacttttgatagcgctgccgcctcccctcccttcaccttttcactgccactactctgctctcacgttctccgtgttaatttcgaattagtatagcaacaataaccggccgcaaggtgtagtgaagattgttaaattaacggatctttactctttataacttaaatttagtctgcccccgaataataaatatgcccaattgcagacatgaaatctcaattcactaattaataaaatattagctaaaatcccaattcgaatgcaactaatggctggtatttaatttgcagccataactgtattcctctggcatgccaatttaccgttattaattatgaagatcatgcatttacatggctattaattatatacgttgttatgtatgcagactcacgcacacacaggcataagcacaagcacacgaaaacatacatatgtatgtacatgcatgctcactaacacccacacagataccaagagctaataaaaagtttcgctttctttttgcacatcattttgcatgcgcagtaaaaaggcagggacaagtgaaataaatacaaataaataatgtgcgagtgtgcaaggtgttaagcaacaacaattgcaatagagggaaaaaagtgaatcaaaagccagaaaaagaggaagaacacgaattttgtgtattaagcggcagtccagagagagaaagagagagtctcccacggtgtgtgtgtgtgttggagggggatgctgctagggaaaagagactgagagtaaaagccggcctgaatccgaataacagctgttactcacagacacaatccacatggaacatctctcttcatctttttgttgttgttggtcccatggatgcttttttctagccggttttattttctctatcatctttatttcatttggtcaattacacacacttggcttctttcttatgaaccgcaaggaccgagacagaaggcagccacttaattgcacacttacagaaatgaaataaggtaatagtaatataaaataaaacggctgtaagcctcgccttagcttttttcgtttgagaaagccaaaaataattgccaactggccaagtcaagaaaaagagaacgagtaaaagagaaggcggctttttgtccagggagaggcgcacaaaatgcgtcgcaaaatatttcgcccacagaaaactgcaaacataatgaaagcccgggaaaggaaaaattattgcgtgggtgtggaatatcaatgccggcaaggaaagcagaatgaattccagggaagtcccctttgcgtttcatacaccaaaattttgtacataatgtacaaaacttcatttcgcctggccatttacgcgatgacgcatttagagccaatcgaatattgtgtactcacaaggcctgataacaggggccacacataatgtacacactatgtggtgcagtcgtcaagtacatgcacagattaaagcggaaaactgttgatgcaagtccaattaacccgacgaaactggtagaagtaaccggcaaattcaagaccacagaaaatattaaagagacaaatgatctgagattttaaaacatttagatcactttaatttgtaaaacaaacacattacctaattattacatgtctattgaacatttcagttgatatttatgactgcagtgcagctttaattttgcattcctcagtatccacgtcaacacaaaaacgccagttagttggctaatattgtgctggacggttttacacaattaattttaacttgaaatgtatttttgtccatatcttcgaagaaaaaccacgagttcttcaaactgttacctgcactgttgtcttaacatctagtaaaatgttaatctggggggcgccataaagaaatcgccgccgactttgggcaaatagaaataaaaactgatggactccgaattttcgattcgttatctctgaaaactggagcgttgggggattgaatgagtgagcgaatgactgctattcaccgtatcggttttggaggttattagagggcttagcccaaaattgaatgattaattgatcatcaaaggtgaggtggaaactccctttgcttctttttttttgtcttgtttgaatacgcacctaaaaatggaatttttgttggttttacttgctttctatatatcacacgcaaccacaacaaattgctctgcttttttttccaccgccgcctgcttcttcttgctctttttgaatatcacacacgtttcatatttgcaaatttttcatttttttgcgggcgttttgccttttctgtcggttactttttgtattccacgtataatgtgctgctgcttcttactcgtttgactcagtctgtgtgtgtgcgagtgtgagtacgtcggtggtgtgggaacttttaactttactacgcgacgttttcgtttctcttctttattctctatatattctacgattctgtgcgtgacgtcagcagttcgagcatttgttgtagatatcacataattgttacacgcccgcacttttattttattttattcttgattttttagagcatttgctattgctactcagcgacttgaatcttttacttgcagaggcagtcttttgcggctttttggtttttctctcagttttccattttcacatttttgcggactggcgacgaaaagcgaactgaacttgggccacaaagtgtgttgtgccgtgtcttttttggagtcgccgtcgccggcaaaacgcaatccacacgcggagaaagagaatcggagagacacgagatagagagagagagcgagagagggagtcgtcttacgtcagacggagaaaacgtaagcaccaccgtaatggcacttttaataccggccacttacgcttaattagtgtattaaaccacattaacttatcaatacctcagtcttgtactcttttcagttagcttttctattttttttcggatttttccgtcgattttcccctcgtaacgtgttttctgctcgcacatgtgtgtgggggcggcagcggcaacagcagcgtcacgacgcgacaacaacactgaacgcggcgaatcgacagaacaagcaacgagccacaaaacgcacggcgtctcttgtagcggcgaatttgaggcgtcagcagctgagcgctcgcggcacgagagagtgagagcagaagagagtggatcgtaaattgagtggagacaaaactgatcaaacgatagctattcgatattacgataggttgtcaattcaaaagggaacgaatattttgggttattaatattttgcaatgaataaatacatttgagtgttaaaagaaaaatataattatttataagcgaagttaaatacctataacagcgctgttaatcacttcctgaattgttttttaaatgctacattattttacctaatatcagcttttaattaaatctttggtccaagttttatttgaagtttttaattttaaaattctgttgatataaaaactaatgcttgaagctaagagaaccacgctaattgcagcgaattagcggcaacagctgagcacgagagagaacgaatgtggagaagggggcggaaagcgaaagcgcaagagggtggaatgtgagtggcgccgcttcctactcttcacatgtggcatgtggaagccagactcgaatgttcggtgagagcggcttttgcttttggcccccaacccttttcgctctcttcggcttgccggctacaaatcggctaaaaatcgctcagacggaagtggcgacgtcgctgttaccgcacccacatcaacagcgacgccggcagagaacctttcccctcccgctcaaccaaccgcttcaccatcttctttatctttatcagttgtgtgccaagtgttgcattgcgttgcagtgacgacattgttgtagttgcagcagcacagcagcgttgccgattttcagcgccccatcaacaaggggtacactttttaaggccggaaataggcattaaatgggtctatcgcataactcga

SEQ ID NO: 13703 - DNA, 5181 bp, DROSOPHILA
cacacacatgtgcgagcagaaaacacgttacgaggggaaaatcgacggaaaaatccgaaaaaaaatagaaaagctaactgaaaagagtacaagactgaggtattgataagttaatgtggtttaatacactaattaagcgtaagtggccggtattaaaagtgccattacggtggtgcttacgttttctccgtctgacgtaagacgactccctctctcgctctctctctctatctcgtgtctctccgattctctttctccgcgtgtggattgcgttttgccggcgacggcgactccaaaaaagacacggcacaacacactttgtggcccaagttcagttcgcttttcgtcgccagtccgcaaaaatgtgaaaatggaaaactgagagaaaaaccaaaaagccgcaaaagactgcctctgcaagtaaaagattcaagtcgctgagtagcaatagcaaatgctctaaaaaatcaagaataaaataaaataaaagtgcgggcgtgtaacaattatgtgatatctacaacaaatgctcgaactgctgacgtcacgcacagaatcgtagaatatatagagaataaagaagagaaacgaaaacgtcgcgtagtaaagttaaaagttcccacaccaccgacgtactcacactcgcacacacacagactgagtcaaacgagtaagaagcagcagcacattatacgtggaatacaaaaagtaaccgacagaaaaggcaaaacgcccgcaaaaaaatgaaaaatttgcaaatatgaaacgtgtgtgatattcaaaaagagcaagaagaagcaggcggcggtggaaaaaaaagcagagcaatttgttgtggttgcgtgtgatatatagaaagcaagtaaaaccaacaaaaattccatttttagatgtgaagaatccttaggtgctaatttagttgataagcgcaagctgcaaagagaggaagatagagagcgataaacagaaacaggcagtacaataagtcaatcgactcgagagctggaaattccgactgggtggcaacttttcgaaggcagtgcttaaaagtatgctacaatatagtgccagcgattgccgactgaggcgaacctaacagaatcggcatatttatagaatatatacagaagatatatacacggagcaaagagagagagaggagagagagagcggagaagagagagggagagagtaagagtcaggcggagaatcgccgaggaatcacgatagaaccggcagcgaaatgtccaagttctttgtgaatgttgcccccatcaacaacagcaacagcagcagtagccacacaaccaccagcagcaacacccagcgccaccagcagcaccaacaacactatggcgggagcgggacaaccggccacacgatggtggcccgcagactcaactacgatctgcacggcggcaccaccagcatcaacaacaacaacaacattgtgatcaagaacgagtccgtcgacttggactacgatcacgtcctgagcagcagcgacagcaacagcaacggcggcgtggcagcccacctgcgggatcatgtctacatcagtctggacaaggggcacaacacgggggcagtggcaacagcagcggcggcggcaacggcgggccacacgcagcagcaactgcagcagcagcaccaccaccaaaatcagcagcaacgcaaggcgaccggcaaatccaacgatatcacaaattattacaaggtcaaacgtcggccacacgccgtcagcgatgagattcacccgaagaagcaggccaagcagagcgcccaccaccagacggtgtatcagaagcatacggctagcagtgcgccccagcagctccggcacagccaccaccagctgcgccacgacgcggatgccgaactggacgaggatgtggtggagcgggtggccaagccggcatcgcatcaccccttttcgctgtcgacgccccagcaacagttggctgcgtcggtggccagcagttcctcgagcggagatcgcaatcgggcggacacctcgctgggaatactgaccaaaaagtttgtggacctgctgcaggagtcaccggatggcgtggtggatctgaacgaggcctccaatcgattgcacgttcagaagcggcgcatctacgacattaccaatgtcctcgaaggcattaacatcctggagaagaagtcgaagaacaacatccagtggcgctgcgggcagtcgatggtcagccaggagcgttcccgtcacatcgaagcggattcgttgcggctggagcaacaggagaacgagctgaacaaggccatcgatctgatgcgcgagaatctggctgagatctcccaggaggtggagaactccggcggcatggcctacgtcacgcagaacgacctgctcaacgtggatctcttcaaagatcagatcgttatcgtgatcaaggcgccgccagaggctaagcttgtgctgcccaacacaaaattgccgcgcgagatttacgtgaaggcggagaatagcggggagatcaacgtcttcctctgccatgacacctcaccggaaaattcgccaatcgcgccgggcgccggctacgttggagcacccggtgcaggatgcgtccgtacggccacctccacacgactgcatccgttgaccaaccagcgactgaacgatccgctcttcaacaatatcgatgccatgagcaccaagggattatttcaaacgccctaccgctcggctcgcaacctcagcaaatcgattgaggaagccgccaagcagtcccagcctgaatataataacatttgtgatattgcgatgggccagcatcataatctgaaccagcagcagcagcagcaacaacaacagttgctacagcagccggaggaggacgatgtggacgtggagctgaaccagctggttccgacactgacgaatcctgtggtccggacccatcagttccagcagcaccagcagccctccatccaggagctgttcagcagcttaacagaatcctcgcctccaacgcccaccaagcggcgtcgggaggcagcagccgcagcaattgccgcaggcagctcaacaacagcaaccactacgcttaatagtcataacaacagaaaccacagcaatcatagcaaccacagcaaccatagcagcagcaacaacagcaaatcccaaccacccacaataggctacggcagcagtcagcgacgcagcgatgtgcccatgtataattgtgcaatggaaggcgcaaccacaacatctgcaacagcagatacgacagctgccacatcgcgatcggccgcagcaagctcactgcagatgcaattcgctgccgtcgcggagagcaacaacggcagtagcagcggcggtggtggcggcggcggcggctatggcagcatcgctggcgctggcgccaacgctgatccccatcagccgtacagccatgaccgcaacagcctgccgcccggcgtggctgactgcgatgccaacagcaacagcagcagtgtcacgctgcagggcctcgatgctctcttcaacgacattggctcggactacttcagcaacgatatcgcctttgtgtccatcaatccgccggacgacaatgactatccgtatgcgctgaacgcgaacgagggcatcgatcggctgtttgacttcggttcggatgcctatggaccctaagaggagacgtccacgaacacaatcacaaccacacacacacacacacacacatgtctacaaaattgggattctgggggtgtttataattttaaattatatacaaatggcaaaagaaaaaaaaagatacaaagccagccagcaaattattaaattatttgattgcaaatactagaagccacaaaaaatccaaaaacaaaacacaaaaaaaagcgaatcagcaaaacttaatgaaactaagttgtgtgtacaattttaagcgtaaaaatatatacatttaaatttataacccaaactaatttaagcgaaacaaaacgaaaacacaaaatctactttacaaaaactcagcctcacgagagaaatagggagaagtcgtagcaagaagagccacattttataagcaaattttaattttagcctttaaaagaaagcaaaaagaatcaggaatactatttaaacgattggataacacacaaaaaatgcgaatacttccctcttatcaaacaactttttgggctagaactgtctgtaaattagtaaaaataataccaacacacacacacacacacacacttatataattttaaattataaaacaaaatagttgtaaagccaatcaacattaaacaataaaaagaaaatcaatttcaaattgtaaaatatatcgaagacatttcaaattaatatggagcagtagtagaagaggaagagaacactcctgggcccccaacaagatggctttggttcctgttttagtgacgcatgcaacagaatcctcttctcttcatttgcttggatttatcgattgatttttaattataatattattaaagctataactatgtatcataatttgttattgttataaaatttaaactgtaaacacacacatgggcccaatagcagtttattcatagaagccaaatcatcccacaaaacaaacaaccaaccacttaacagagtcaactacaagtacataaataattatttaaactctctcctagtagttatatatttaactaaacgatagataaaagcaacaaacaaatgcaaatcatacaattgtaaaaaaaaatcaataaataaacgaaggagaaccgcaacaagccgaaaccactgtataattgtacgtttaatttttataagagaaaacacacttgttaggtacttttctttctttccaaaaacaaacacatgaaaaaaagagaaaataaatattacaaaaacgaaggaaactttaaaataaacaaaataaatttttaaaaccgaatgtctactgtttcaattaaactgaatatttaagtttttcaagccgaatttaaataaggtgaagtttgccatggtcacaagaagtgttttttgctaacttcttttttaactaagcaattttgaatcatcatttgaatgtttttggtaaatattattttttatattaattatttttaataaagtataaagactgtactgttttatgcatcttttcaaagatttttttaaacaccaagttgaattttaaatatgtg

SEQ ID NO: 13704 - protein, 805 aa, DROSOPHILA
MSKFFVNVAPINNSNSSSSHTTTSSNTQRHQQHQQHYGGSGTTGHTMVARRLNYDLHGGTTSINNNNNIVIKNESVDLDYDHVLSSSDSNSNGGVAAHLRDHVYISLDKGHNTGAVATAAAAATAGHTQQQLQQQHHHQNQQQRKATGKSNDITNYYKVKRRPHAVSDEIHPKKQAKQSAHHQTVYQKHTASSAPQQLRHSHHQLRHDADAELDEDVVERVAKPASHHPFSLSTPQQQLAASVASSSSSGDRNRADTSLGILTKKFVDLLQESPDGVVDLNEASNRLHVQKRRIYDITNVLEGINILEKKSKNNIQWRCGQSMVSQERSRHIEADSLRLEQQENELNKAIDLMRENLAEISQEVENSGGMAYVTQNDLLNVDLFKDQIVIVIKAPPEAKLVLPNTKLPREIYVKAENSGEINVFLCHDTSPENSPIAPGAGYVGAPGAGCVRTATSTRLHPLTNQRLNDPLFNNIDAMSTKGLFQTPYRSARNLSKSIEEAAKQSQPEYNNICDIAMGQHHNLNQQQQQQQQQLLQQPEEDDVDVELNQLVPTLTNPVVRTHQFQQHQQPSIQELFSSLTESSPPTPTKRRREAAAAAIAAGSSTTATTTLNSHNNRNHSNHSNHSNHSSSNNSKSQPPTIGYGSSQRRSDVPMYNCAMEGATTTSATADTTAATSRSAAASSLQMQFAAVAESNNGSSSGGGGGGGGYGSIAGAGANADPHQPYSHDRNSLPPGVADCDANSNSSSVTLQGLDALFNDIGSDYFSNDIAFVSINPPDDNDYPYALNANEGIDRLFDFGSDAYGP

SEQ ID NO: 13705 - DNA, 3658 bp, DROSOPHILA
aatacatttacttaaactattgaaattttgaaaagtgacatcgtaatgtgtcacatttcttgcgccacccttctttgcaatcaaaatatataaaacgggtcgtcggcttggccaccacgagacgttaaaaacactttgattcttttttgctttgataaagttttaaaccaaaacataatgagtggacggaaccgcggcaaaggaaagaagggtggaggaggaccctaccgcaatgtcaaagcgaatcacaattgtgcccgcagctttgctcagcaggccaacgagctggccagcagcagtagcagcgaaaatgaaagttccgactcggaatcctcgggagatggagcccaaaatgatctcggccagccgccggagtttgcggtggccatgtgggacctcaaccactgcgatccaaagaagtgttcgggcaggaaactggcacgcctaggactcatttcaaatcttcgactgggtcagaagtttcctggccttgtcctctcgcccgttggccagttgtgtgtaagtccgctggatcgcgatgtggtggcctcttcgggcgtggccgtgatcgactgctcgtgggccaagctggacgagacgccctttggaaggatgcgcagcccacatccgcgactgctgcccttcttggtggccgccaatcccatcaactacggaaagccctgcaagctcagctgcgtggaggccatagccgccactctatacatctgtggattcacggaagaggctcgctggtttctgggcaagttctcatggggtcatgcctttctggagctaaacgacaagcttctcaatgcctatgcagcctgcaagagcagcgatgagattgttaaggtgcagaatgagtacctggagaaggaacagcaggagcgggataagcctagggatcttcgcgacttctatcccaccagcagtagtagtagtagtagcgagacggagaccgagggcgatgatgaagacacaaaagcgaaaccgaagaactaatacaaggtgctgacatttattaccttatgacaaaacattttacttgtgttttaatttacaatttgggagcaaattgagagcaaccaccgaattattgcaaactgttttgatgaaatatttacttcaagtcaagaaaagattattgcttactgtgcatttcgcacgtactcgggatcaacgttgataaagttgctcatgctgaaaaatattgagctgttctttacgaggaatttaaggaaatcctgcacgtgcgtgagtaggttctgcatggactgctgatccaacgcagagtagctgagcattgagccaaggcggacaaacagacgcagcaggtgaaaagatccgtaaagctcggacaacggtgtgtccggatgcttctgcatcacatccgcgtactgggtgcgttcgaatttgtacagcaactgggagcccagcattacattgaagtactctacaattccgtcgagtacatcgtttatggcaacctccttgctggcactggtcgatttcacggacttcttgtgcgccaaatactgctcagagatctgctgcacggtaaccttggcgggcagctccagcagtttgtgctcccgcaccaccgcataccagtcgtcggtcagatagtgctttaactcgtcgggtatcttaatcttgacctccaccttagctgcgtaggcctcctcgctttccacacacggtgccggctccgtggtgggtgtggatggagtggtagtgggcggcaacggcttttctgctacatcgcttcccgtaagagaaggccgttgttcgctcattcttttctttttcggcgccaccggcccctcttcctcagtggtctcagctgcggcggggtcttcctttttatcactcggcgtgccaggtcttgctgtggatggcgtcgattgtgtggactttcggtgggcccggctggttgtagagttggcggtgctgttagtagtcgtggtgccagtgctcccggcttccgatttgcttcccggtccggcgctagttgttggtgtgctgctagcggtcgattgcgaggtgttgctatccttagacggcgtcgaggcacgagattcgttccgcatctgttccattttcttggccttggcgctgcctggtatgtaaacaccttaatttacaactccaggaattgcgtttgttactgaactcacctttcttattatccttcttggagcgctcgccgcactggcgagccagttcctgacgtcgcttgacgttgtcatcgttgtacttgaggactcggttctcgggcacccactcgtcccagctgaaaatgaaatggctttcatgcagatcggtgttcatactagtagctttgctcactttttactccagcccgcgtagtggatgtagtactcaaccggcgtcgcatcgggttttgttttcagaaccttggcctcgtagatgagcggtccgtggaagcacagaacccgttcccctgcaaatggcgccaatgtgtttaatttgatttatagttgggcttaagttattgccctaccatccacgaacagagtgtttgcatcggtccccgtgctatagttttccactttagcgggttttacttctcccattttattttcaataatagataattaacaaatcctagagtgaccgtgcgtgacgcatagggctatcggatgggacagtaccgatgcacttatcgattatttacagggtattgtcttggtagatattaacaatattgatttatttatgactatgtacatcaaacagtctgtttttatgggttgttttcttaatgattttgaaggcatcaagtctagtgcttcgctgtcgtcggctgatcttcctgctcctcccagggacgtggaccgcgtttgttctcccagttctctatgtccacggacttgactttgtcgtactccgactccaacgtcacatccttgcggtttttcatgcttacgccgtactttttcatctcctccggcgttaccggctgcttcttggcgtactgatacctgtaaagggaggagactcatgagttagctaaggatttcccggagattcttgaatgctagcctgaggttggagaactgctgcagtccaaaggagccagccaccatcatgatgaggaagggtatgccatatttgaacgattttcgtgtgctgtaatagtttaatttatccacgagagacattgttgttattttgtgttatgacattttggcacatgcggttacactgcaagttgagaacgaagtgtgaccagttatatgataataaaaaaattggcgcaaaatttgaacaccgatttcttatcatatgcaatgtagttatattttattaaaataacttggcgatagttttaaaaataattgaatttaagctaaactattaacaagaatatttaaaacataacattttgtaatcgaaaaaagttattttcaatttggcacacagcactttattttagccacacacactaggcgcctatgtcaatcaatttgtgcagctggtgtcgtctttgaaaatagttgtccttgaatccaaatcgaaagatttgttgtccctgccaagtgcgagcaagttctgaataattgcaaaacattgttttccggcgcacgcctaatgcccaccatttgcatggggttcgacgataagttcaaggtcc

SEQ ID NO: 13706 - DNA, 1484 bp, DROSOPHILA
agccctatgcgtcacgcacggtcactctaggatttgttaattatctattattgaaaataaaatgggagaagtaaaacccgctaaagtggaaaactatagcacggggaccgatgcaaacactctgttcgtggatggggaacgggttctgtgcttccacggaccgctcatctacgaggccaaggttctgaaaacaaaacccgatgcgacgccggttgagtactacatccactacgcgggctggagtaaaaactgggacgagtgggtgcccgagaaccgagtcctcaagtacaacgatgacaacgtcaagcgacgtcaggaactggctcgccagtgcggcgagcgctccaagaaggataataagaaaggcagcgccaaggccaagaaaatggaacagatgcggaacgaatctcgtgcctcgacgccgtctaaggatagcaacacctcgcaatcgaccgctagcagcacaccaacaactagcgccggaccgggaagcaaatcggaagccgggagcactggcaccacgactactaacagcaccgccaactctacaaccagccgggcccaccgaaagtccacacaatcgacgccatccacagcaagacctggcacgccgagtgataaaaaggaagaccccgccgcagctgagaccactgaggaagaggggccggtggcgccgaaaaagaaaagaatgagcgaacaacggccttctcttacgggaagcgatgtagcagaaaagccgttgccgcccactaccactccatccacacccaccacggagccggcaccgtgtgtggaaagcgaggaggcctacgcagctaaggtggaggtcaagattaagatacccgacgagttaaagcactatctgaccgacgactggtatgcggtggtgcgggagcacaaactgctggagctgcccgccaaggttaccgtgcagcagatctctgagcagtatttggcgcacaagaagtccgtgaaatcgaccagtgccagcaaggaggttgccataaacgatgtactcgacggaattgtagagtacttcaatgtaatgctgggctcccagttgctgtacaaattcgaacgcacccagtacgcggatgtgatgcagaagcatccggacacaccgttgtccgagctttacggatcttttcacctgctgcgtctgtttgtccgccttggctcaatgctcagctactctgcgttggatcagcagtccatgcagaacctactcacgcacgtgcaggatttccttaaattcctcgtaaagaacagctcaatatttttcagcatgagcaactttatcaacgttgatcccgagtacgtgcgaaatgcacagtaagcaataatcttttcttgacttgaagtaaatatttcatcaaaacagtttgcaataattcggtggttgctctcaatttgctcccaaattgtaaattaaaacacaagtaaaatgttttgtcataaggtaataaatgtcagcaccttgtatt

SEQ ID NO: 13707 - protein, 424 aa, DROSOPHILA
MGEVKPAKVENYSTGTDANTLFVDGERVLCFHGPLIYEAKVLKTKPDATPVEYYIHYAGWSKNWDEWVPENRVLKYNDDNVKRRQELARQCGERSKKDNKKGSAKAKKMEQMRNESRASTPSKDSNTSQSTASSTPTTSAGPGSKSEAGSTGTTTTNSTANSTTSRAHRKSTQSTPSTARPGTPSDKKEDPAAAETTEEEGPVAPKKKRMSEQRPSLTGSDVAEKPLPPTTTPSTPTTEPAPCVESEEAYAAKVEVKIKIPDELKHYLTDDWYAVVREHKLLELPAKVTVQQISEQYLAHKKSVKSTSASKEVAINDVLDGIVEYFNVMLGSQLLYKFERTQYADVMQKHPDTPLSELYGSFHLLRLFVRLGSMLSYSALDQQSMQNLLTHVQDFLKFLVKNSSIFFSMSNFINVDPEYVRNAQ

SEQ ID NO: 13708 - DNA, 4148 bp, DROSOPHILA
aagttcgcaggactttccatgccggggctttcggtcgccttctatgcgtcgaaagttggtcagaaattgggtcagactttcggccctagttacgagcagttttctttttttttttatgttcctgtctgtttccgtttccaaatcagccagcgaatcacgcacattcctcccgcgtcatgcaatgaaattttggtttacgaataatacaacattttggctaccaccaattataaccatttggctggcgcacatttttccacacgtgagaacttttaggcgtcgttaaaactgttttaattccgaactgcgcaacaggtggctgtggtcacatttagtccggtctcgggagtcataaaaagtgcaatttgcatgcgcgccggttcgcctccgactggcaatccttgtgcattttaaatggcctgcctgctgggagacgacgagtccttggcaatgccttaacaaaaaaaaaaccatttccgtatatggattaccaaggtccttgtagtcgcagtgtcgtgggcgttgtcaggactaacaaaagtcgggaatttcgtgagctattgattggcattttgtggagtgggcaagctattcatatatgcccaggaacagtgtttaaaaaaaaaaggatgtaatgatttttgaaacattctgtacagaatttgggtatcatttttaagccagctcagaaactagttttgaaatgcatgtgttaaatattttgagttgggatcggtctttctgataacaaaagtattattattattatgttttatgattattttcaattttcctggaagtgatttaataagggatttggcaatggataccatcgtatcgactctgcttgctcgacctgctgcttccatcgaatccaatagacaattttctaatttgcagcaattttacccttttccctcattcattagtttgtttacagaggtttgtgaggcgagtgtgcctagcaacatggtcatagcacgccatcgggtcttgctctatggaaatggaggtggatgtggaggaatgccttcgctggctgccttttgcaaccggtcgtggtcttatggaggcccacctccttcccaaaactcctccattgcaattgcaaaaggtcgaaggcagatgggggaattggtggccccgttattaagggacctacctgttatttggttgtggtggcgaccaccagcgatacccataacttttccactcagttggctggcaaagacaagacgcgtcggatgttccatagcagatactaaccggattcacattatcccccacataccacagctttgatgccgactttggctggaatcgctccttctccgagccggatctcacaggcaatcagaagtccggcgatctcagccggttcgccatcaagcatccgcacgagtacatagccgtcgatgacctcaagtactttcgccgtcgccagcccgtccatctgcacacccggagcaacgtatgcctccacagcggcgatgagccagcgatcagtttcggctccctgaagtccgagtatcgcaagcacttctgtggcacccagtcccgacccagatccttgctgcggcgcgctacttcgctgcgattggagggattcatgcagctgctgtcggagcaccaggagaaataccactggtacacgcccgaggacctgcgattgtgagtagatgagtagccaattcttagtaatagtctagagtagttcaactggcagggaactggctttcaaagaaatcaatagttaatcaatagaaaactgatttctgcccacagctcccgcacctttcccgtccgcaatccggagaacctgcagttgggcgcgggcagcggtcccaccgatggcatgaagaactcctcgtaccttatgctggatcccagcaccaagatactgccacgcgaggtgttcctcgacgagtcggagctggcggcccggaaccaacccactagtaagctggcggcggacaagtttcgccgcgatgtggctgcccaggagcagcagcgatgccatctgcagatgcgtgcccaggctgtggaccacgaacagcagggccaggtgccagagccctccgagtaccgtcgccagttcgtgcagcagttccccgagaaggcgcactccattccccagatgagcagcatcaagattcagggtgagttcgtggcggtgccggaatacagggacagcttccgtatgtatgccaactactcgaagagtgcgcccatcaagaagaacgacaacctgcgcgtatccggttccgaggcggcctgcgcccccagctcggaggtgccggagtaccgcgacaaattcatcgacccacccaagaacgtgcccaaagagaagtcccttaagacggacgaccacctgcgtccgcgcggggagtttaccaaagagattcccgaataccacgagagcttccgagatccgcagatcaccgaaatgccggagcggggtaagccccgtgagccgttccttcgcctgcgcggcaagatcgagtttaatccggagtacaggaataactatcaggattttccgcgttcccgacccgttgtccagaagcccacctcctgcttccggttgcccacctcgggcgcatgccacgccccatccgtccaccatcagccggaagaggatctggaaacacctgtcctggtcacagtgcctccatcggaggtaactgccacgccggagtatcgtcgagcgcagtacaactaccaattgcgggagcgcccgagggatttagaggctgcaccagctggtgtccagggaaatttgcgcaaaagttccgattccacgttggaagctagacagccgcaggcccccatgccccacaaacggagaacctcgcgtcagcggcagatcaaggagccagagcaaccgttggccactagattcgacgatgtggtcggcaatgcggccaaaaagccagcgcgctacggacgacgtgcatctgtgctccagaacgcagccagttgtcgggagaactcgtcaatcatcgagggtaatcccaaatacgccgtgggatgtcgtcgctccaagcagccagtcggaaatcagacgcagccacccggtgcctttgtggtgctcgacgagcactgcaagccttccaactggatgaagaagacctggtacgactcctaggacaacgcatctacacctaccgttggtattctgttttaaatcgaactaatgtaaagcaaataaaaaatgtttaattcgaaaaaaactgtcaaaataacaattaatcattgagtttttaaaattatttttaattattatttatcaacgtatgtgcatgaatctatcatctagagaaaaacttgctcattaattgagttatttatttcaggaattgaattgacttgcattgggttttactgtaagtatctttaagaacgtttatctggcccaccctgaaaatgtatctttctcattcatggcgaaaaaacgtaaacaaacggttgactgctcacctgaaaaatgtttgggtgactttaatcttatcttgtggctggattgataatagttttgagagagcggttactcatagttgttcagtatcaccgtggatttcgcaagctgcagatgtgagcaacgcaattacaataccagattcaaaggggaactcccatcggaatcatgacagacacggtggtccatgcggccactcctccgcctcacatacttggttacaccgttcgtagccgcacgcgcatctgggtttcctacatagtgcccacctgtcttggactgttggtgtacatcgttcaaacagcctcggatttggccctgagctaccagcacttcaggcaaaaggagccgacactgggagctggcaccctggtcctggttatcctaccccccgtgatcactttcatcctggtcgcggcttcaaaggaacaaagggaatgcgcctgctcggaacgtaataaatgcgtcgcccttggcattggactgctcaagctgttcctgttccccttctttgtgatcttcaggtgagtcaatggattgccatgtgggtcactgccatatttattaactttcaaacgatgaggttctgtacgcgcttgttttgggccatcgagggactctttcacgacgacgacgatgtggagcgcatgaaatgcttggccaaggccac

SEQ ID NO: 13709 - DNA, 1813 bp, DROSOPHILA
atggaaatggaggtggatgtggaggaatgccttcgctggctgccttttgcaaccggtcgtggtcttatggaggcccacctccttcccaaaactcctccattgcaattgcaaaaggtcgaaggcagatgggggaattgctttgatgccgactttggctggaatcgctccttctccgagccggatctcacaggcaatcagaagtccggcgatctcagccggttcgccatcaagcatccgcacgagtacatagccgtcgatgacctcaagtactttcgccgtcgccagcccgtccatctgcacacccggagcaacgtatgcctccacagcggcgatgagccagcgatcagtttcggctccctgaagtccgagtatcgcaagcacttctgtggcacccagtcccgacccagatccttgctgcggcgcgctacttcgctgcgattggagggattcatgcagctgctgtcggagcaccaggagaaataccactggtacacgcccgaggacctgcgattctcccgcacctttcccgtccgcaatccggagaacctgcagttgggcgcgggcagcggtcccaccgatggcatgaagaactcctcgtaccttatgctggatcccagcaccaagatactgccacgcgaggtgttcctcgacgagtcggagctggcggcccggaaccaacccactagtaagctggcggcggacaagtttcgccgcgatgtggctgcccaggagcagcagcgatgccatctgcagatgcgtgcccaggctgtggaccacgaacagcagggccaggtgccagagccctccgagtaccgtcgccagttcgtgcagcagttccccgagaaggcgcactccattccccagatgagcagcatcaagattcagggtgagttcgtggcggtgccggaatacagggacagcttccgtatgtatgccaactactcgaagagtgcgcccatcaagaagaacgacaacctgcgcgtatccggttccgaggcggcctgcgcccccagctcggaggtgccggagtaccgcgacaaattcatcgacccacccaagaacgtgcccaaagagaagtcccttaagacggacgaccacctgcgtccgcgcggggagtttaccaaagagattcccgaataccacgagagcttccgagatccgcagatcaccgaaatgccggagcggggtaagccccgtgagccgttccttcgcctgcgcggcaagatcgagtttaatccggagtacaggaataactatcaggattttccgcgttcccgacccgttgtccagaagcccacctcctgcttccggttgcccacctcgggcgcatgccacgccccatccgtccaccatcagccggaagaggatctggaaacacctgtcctggtcacagtgcctccatcggaggtaactgccacgccggagtatcgtcgagcgcagtacaactaccaattgcgggagcgcccgagggatttagaggctgcaccagctggtgtccagggaaatttgcgcaaaagttccgattccacgttggaagctagacagccgcaggcccccatgccccacaaacggagaacctcgcgtcagcggcagatcaaggagccagagcaaccgttggccactagattcgacgatgtggtcggcaatgcggccaaaaagccagcgcgctacggacgacgtgcatctgtgctccagaacgcagccagttgtcgggagaactcgtcaatcatcgaggccacccggtgcctttgtggtgctcgacgagcactgcaagccttccaactggatgaagaagacctggtacgactcctag

SEQ ID NO: 13710 - protein, 604 aa, DROSOPHILA
MEMEVDVEECLRWLPFATGRGLMEAHLLPKTPPLQLQKVEGRWGNCFDADFGWNRSFSEPDLTGNQKSGDLSRFAIKHPHEYIAVDDLKYFRRRQPVHLHTRSNVCLHSGDEPAISFGSLKSEYRKHFCGTQSRPRSLLRRATSLRLEGFMQLLSEHQEKYHWYTPEDLRFSRTFPVRNPENLQLGAGSGPTDGMKNSSYLMLDPSTKILPREVFLDESELAARNQPTSKLAADKFRRDVAAQEQQRCHLQMRAQAVDHEQQGQVPEPSEYRRQFVQQFPEKAHSIPQMSSIKIQGEFVAVPEYRDSFRMYANYSKSAPIKKNDNLRVSGSEAACAPSSEVPEYRDKFIDPPKNVPKEKSLKTDDHLRPRGEFTKEIPEYHESFRDPQITEMPERGKPREPFLRLRGKIEFNPEYRNNYQDFPRSRPVVQKPTSCFRLPTSGACHAPSVHHQPEEDLETPVLVTVPPSEVTATPEYRRAQYNYQLRERPRDLEAAPAGVQGNLRKSSDSTLEARQPQAPMPHKRRTSRQRQIKEPEQPLATRFDDVVGNAAKKPARYGRRASVLQNAASCRENSSIIEATRCLCGARRALQAFQLDEEDLVRLL

SEQ ID NO: 13711 - DNA, 3413 bp, DROSOPHILA
acaatctaaagaacagaatctctccaaaatataaatctcccttaagggggagtattaaacttgactcaagtgactactcacggttggaagtaaatatactcgacgctctccagaccatatggctgcagctgcccaatgttttcaatattctcatagccaataaaggcagcaatgtagtgaatgtttcttgaaatagagcaaacttgatataggctatataagaagaggacctaacatacttcctccaaacgcagtgagctgcggatagaatccaacgatcgcttattaggctgccaccgcaaaaatgttgataggaaactccatttgtggtatttctcgtgattacatcttgcaatgagaccatgaacggatatttacttgtgctgcctttaagtagaaatggtgctttaaattagagttctaagctgaaaattttagtaaagtactgcccactgttgacacgatccgacctccgacaatgggcaccgcgtgacaggattcaagcacagaaataataaataaactatggagaagccagtaaaaccaactccacgggctgagatctaaagcagccttcatagttgggctttgaaaaagacactggcatatgaccgccagcgggttgctaatacataaaccgttactatgcaaatacaagtataaaaaagcattcaaacaaaagccaagctgtgcaaatatttccaattccaatgcgctggtaaattgttttcaaatctcgggccggcgtcatcacggtctatgtatgtgtagattttccattgactatttgcccaggcatatgttgggaatgccaaaaatgtatacgttcacaaaactttttcaattttcttaattagttaaaagtaacgtattttgcaatttttgcctgtgtggcaacgctttacttccggagtaaccgtggctcttagcgggtacgacaatcgaaatatcgatagcaatggtaatggtaatcccatctcgaaagtaatcagctgttgcgtgaagtagaagcatttgattttactagtgtaagagaaaaatgcaagatttgaggaacgccgacacgctgcgactgccaaatggcgacggagcagcagccaacgacgaggtcaagtcgccgtttctaatcggcgtcgccggcggaacggccagcggcaagtccaccgtgtgcaaaaagatcatggagcaacttgggcaggcggaaatggatcacacgcagcgccaggtggtgtccatcagtcaggacagcttctaccgcgaactgacgcccgccgagaaggccaaggcccagaagggcctcttcaacttcgatcatccggatgccttcaacgaggagctcatgtacagcacgcttcagaacatcttaaagggccacaaagtggagatacccagctatgactaccgcaccaactctctgtgagtttcgagatatgtagattcctttgttgtactcatgagctctactcatgctgaatccatttactggagtataatctcataagctctaataataacttgtttttcccgcagcgactttgaaaacgttctggttatctacccagccgacgtggtcttgttcgagggcatcttggtattttacttccccaagatacgagaactgttccacatgaagctgttcgtggacacagactccgataccaggttggccaggagaggtaagttgtggcttgtggcatgatttgaaataacctatgtaataaaccctttgttagtgccacgtgatatcaatgagcgtggtcgggacttggatgcggtgctcacccagtatatgaccttcgtaaagccggctttcgaggagttctgctcgcccgtaagttgagaccgtgccacatgtgccatataatggaactaatagaccctgcccatttcagacgaaaaagtttgctgacgttattataccacgaggcgccgacaacacaggtgaggcagctgcacccacactccaatccactttaacttattttctatgcgcccccacaatacacactcttacacattaagcgtttgtagtgtttcgttgagttggttgcctataaccatagttttagcaatggttcttttgtttctggttctattaactcgtctggggacaacaaacccttatcacacagattgcttgatgtttacaaatatttatataagtactatatgcctatcaacatttctacccccaacttgtttttccgtcatctctgttaattgtatctcttgcgttactatttttttttttttgttgttgttttcgttttgttcctgttgttttattgtatttcttgcagttgccattgatcttattgtacaccatatcggggagattctcgccactaccaacagcgcacagcacagcaacacagtcagggtagcggcgtctagcatgaagcgagatcactaaacgcaaaaataaacaactagcttctgaggcggccaattcctcgtcctagcgccgcgtcttgagcttgtactaattgccaaaaaaaaaaaactaaagtccaaacgcttaggaatgatatagaaacccgtggcggcgcagcacactaaggcaaatgtccattaacgagcgcgggcatcgcttctcatttggtcttctcatcgtaaccgattaacgtagtcctaagattgaaaagtatctttagtatctactcttgcatatgttcaacaatacatggtagtgtgtatgtaagctcgtttctgttcatcaagataacccaacctgcgatggcaattccagtctaacttttaagttaaagcgttaaaacttaaccccggtgccccaattggcttctcgcgaggacttaagcactctatccaccaaaccacacatgttacacttctaactattgtatctatgtttaatggtgcccgatactttgaaaactactcctatccatctctggtttgtgaatgttattataagcaatagctttattacgttttataagcaacattttcttgaatatttcgtataaactcctgactagaatacgttaattactttgctattaaatccctttgctaacttaaacatattggagttatatttatctcattccttaaactcacaacttttggtcacatacattttagatgtttctatgaattcttcttaagcaatatttatatccttataaaaagtaagggctaatataaattagatatcattagtaccgggcatctttgaagtcggaacctgcgactatagtgttatcaaaacgcgccccttttaaacacctttatgcagtctcaaatatatacaaatgcaaggcagtgattagcctatcaaggcgtgaagataaatcggtgtttcatttagtaagtacacaaccagtttattgtaaagcacactaacttcagtcacaaaacacagtagcttaacaataaccagaacatgccgc

SEQ ID NO: 13712 - DNA, 822 bp, DROSOPHILA
tgaagtagaagcatttgattttactagtgtaagagaaaaatgcaagatttgaggaacgccgacacgctgcgactgccaaatggcgacggagcagcagccaacgacgaggtcaagtcgccgtttctaatcggcgtcgccggcggaacggccagcggcaagtccaccgtgtgcaaaaagatcatggagcaacttgggcaggcggaaatggatcacacgcagcgccaggtggtgtccatcagtcaggacagcttctaccgcgaactgacgcccgccgagaaggccaaggcccagaagggcctcttcaacttcgatcatccggatgccttcaacgaggagctcatgtacagcacgcttcagaacatcttaaagggccacaaagtggagatacccagctatgactaccgcaccaactctctcgactttgaaaacgttctggttatctacccagccgacgtggtcttgttcgagggcatcttggtattttacttccccaagatacgagaactgttccacatgaagctgttcgtggacacagactccgataccaggttggccaggagagtgccacgtgatatcaatgagcgtggtcgggacttggatgcggtgctcacccagtatatgaccttcgtaaagccggctttcgaggagttctgctcgcccacgaaaaagtttgctgacgttattataccacgaggcgccgacaacacagttgccattgatcttattgtacaccatatcggggagattctcgccactaccaacagcgcacagcacagcaacacagtcagggtagcggcgtctagcatgaagcgagatcactaa

SEQ ID NO: 13713 - protein, 260 aa, DROSOPHILA
MQDLRNADTLRLPNGDGAAANDEVKSPFLIGVAGGTASGKSTVCKKIMEQLGQAEMDHTQRQVVSISQDSFYRELTPAEKAKAQKGLFNFDHPDAFNEELMYSTLQNILKGHKVEIPSYDYRTNSLDFENVLVIYPADVVLFEGILVFYFPKIRELFHMKLFVDTDSDTRLARRVPRDINERGRDLDAVLTQYMTFVKPAFEEFCSPTKKFADVIIPRGADNTVAIDLIVHHIGEILATTNSAQHSNTVRVAASSMKRDH

SEQ ID NO: 13714 - DNA, 2496 bp, DROSOPHILA
tcgagcataatcgtggcaatccatctcaccatcatcattgcaatcctgattgaacttcttcatatagttttgcaccaaatcggcggcacagtgcggatccttggcgcagttgatgaaagccttttccgaatcgggatgctctccatttaccgtcagtttgccagcatccacccagtatccccaggtgatgcggaatatgccgcatgctcccttttccgcactggtgcaaatcgccgtggcattgcaaccactaatggcctcacaaatgcaggtgagacacagctccgttaccggcttatccagcacatgacctgtttacgcaatttattgtacatatagcacatatatttttggcggaaaaaacgtaccttggccttgaaccaatgaaggcgacagcaccagcagcaaatatatggaatatagcaggaaaactcgcattttccggctggttaaagtaataacatccaattcctctgcccctgaaactgcgaatggttctagcgattcccatgaactgagtactcagtacccggtaaatgcgccaatctagcgggtaataccggtttatagggcgcatccacacaaagtgttaagaatagttctactacatacccccactcactgactcccagttgaaacttacaacaaaaagtatgctacactgcgactcctaaatattttaaagcgtgtgttaaagactagtttaattttactgtatttcaagccaagatgtagagaatatgtatgtaagcaaggaatgtaaaatgttttttacacgaataaccctaacaaataagtaaaattcattacaataattattttttttgtccattcgaaataatttactaaatttatgaaacaagtgtgaagcactgaaaagttaaaaatatttgcttgtattgtcatttattctgaatcgaattcaaatgcattgccataaataattaattattacattatttaaatttaattacaatataaatttagcaagttaatgtgtttatatgctagagcgcacgtcgatctgctggaacgaattaaggcagttggtcagctgcgtctggtactggtagctcagctcgcccttgcatccatagccgcccagcttgtggatggcagcaaagtcgtagcaatcgatggcgttgtctccattgcagtcctggccgaacttggtcatgtaattctggatcgtgttggccgcgcagtagggatcgttcacgcaattggcatacgctgcagcgagattaatgtgcatcagatgtatgataaggtttattgcataggtaatggatgggacactcaccatcctccgactggggactctcgttgcccaaggtcagcttgccgccgtcggcccaatatgcccaggtgatgcgaaacaggccgcagactccgccgccgcagtaacgtgtctggttgcatccactgatggcctcgcagatgcatcccaggcacacatcagtcaccggcttatctgtttcgggtttaaagatcattcaaatcaaatcaaatcagttcagttcatttttatttttattttattttccagattagcctcaaaagagcgttagcagtgcagatttgcccagatcatgtcatcgctttattcagagcatttggtaatgttttgaatttttaagagttataacaagttgaagactttgaaattttagcagctcacagaaaaaagtagtaggaaactaattaaacaaaaaatccagttgaccaatttggtttaggtgtcttatcttgaacttgttaaaaattcttttaaaatttcttacgttcattattataaattccaaccgaagagatttccgtgtaaaataacaacaggtactacaataaaactaatcctagtgtgttatctgtgtttccccggtgcgagcgggttcataaatttcaaaaattcaataaaattataaaatatatccaagaaacgaaaagcaattccgttgcttgcacgcccatgaacctgaaatccatcggcctcacgttcccatcccattttgtatcgaactagttttgcaactttcaatggaaacattgaagcatctccgtagaacaaaatctggcagcgcgtaggcgaggatgagtcaattaatcggcgttatcaagaccttgttcttgtaattaaattttgtatttttaacgagtatcggcattttgccaattttgcgaaaagatcgaaagaagcgtgaagcacagcatgtcatctagccttctggctcacccacacacacgagcaaaactctgaggtttctgagttcagtgacctatgcaaagtaatcttcaaaggcataaaaattgggtcaagattaaagaccttttatatatttccacctttctaaaacatatcatatcagtgcatattttagtttatataaacaccttttcacggggttttcctgacccagagataacccacacgcagcaaattgtcacgaaagtgggattttttgaggtctaacaatggagtaccgatgtgcaccgcaa

SEQ ID NO: 13715 - DNA, 426 bp, DROSOPHILA
atgatctttaaacccgaaacagataagccggtgactgatgtgtgcctgggatgcatctgcgaggccatcagtggatgcaaccagacacgttactgcggcggcggagtctgcggcctgtttcgcatcacctgggcatattgggccgacggcggcaagctgaccttgggcaacgagagtccccagtcggaggatgcgtatgccaattgcgtgaacgatccctactgcgcggccaacacgatccagaattacatgaccaagttcggccaggactgcaatggagacaacgccatcgattgctacgactttgctgccatccacaagctgggcggctatggatgcaagggcgagctgagctaccagtaccagacgcagctgaccaactgccttaattcgttccagcagatcgacgtgcgctctagcatataa

SEQ ID NO: 13716 - protein, 141 aa, DROSOPHILA
MIFKPETDKPVTDVCLGCICEAISGCNQTRYCGGGVCGLFRITWAYWADGGKLTLGNESPQSEDAYANCVNDPYCAANTIQNYMTKFGQDCNGDNAIDCYDFAAIHKLGGYGCKGELSYQYQTQLTNCLNSFQQIDVRSSI

SEQ ID NO: 13717 - DNA, 8821 bp, DROSOPHILA
cttttccattacctcgatgatcgttagttggttcggttcatccggtcgcgtgggcaacgtattggtcaactatcgagccgtggcccacgaggacaagtccttcgcccaggggctggcgctgatgatgattagccttctggccctcataccgggacccatcatattcggccgcctcatcgactccacgtgcctggtgtggacaaagacctgcaatggcaatggcaactgtcagttgtacgaccagacccgtttccgttactccctcaactttttatcctgccgtaagtttgattcaaaatatgtaataagataacatattctctaccttcttgctaacttccagtgctcacctttatgggactcctcttcgattacctcgtttggtactacggacgcaacctggacatttatggcgacaaggaggccaaggaggaggagcgtgccaacagaaaagaccagcccattactccgctcctggccaagaaatccgaacaggagtaaaatcaacaaaaaaaagaaagtgcaacccatccgtgatactcaattataaggagtagattcatatgaaacacgccagttccgagtatttcataacaataattcaaagcacattcctagagttagtttttgaaatcaaaatagagaaagattgggcaaagcctgtactccaacgccatatgtacaaatcttccgcttttcgataggaatttagctattgaactcgcgctgtcaaatgtcttctttcagtgtacaattgttaattacttttactttgtgctaagatcaattaaatataccatgcttagtttaacaacaaaaatgaaaagaatttatgtgtacgtatgtataaaaaaaaatgtttcaaataaaaatgtatgtttattaaaatattatgaggagtctaaatcataaatatttatattttatatatattaattttgccaaaatattcgattgcaatccataaaaccagaatataatttcttaggtttcattttttttttttttttgaaattttcttttcacttttattgataaaaaatgttcaaatttatgcagatcgtttgtttttcattccatacgtatatgtataataataatacactttaatttcgatttttgtataaatattcattcccgtttgtctatataatttctattattacgatcgctcttattcctcagtggcgtagttttcgacttccgttccgatttcgcgagtgatttgttgcttgagtgtcagtgttgggtgtctgtgtgaaacattttgaatgaatttccgcgttgtcaacaattatatcgcactcagtattattacaataataattaattaattaattatcattcgcgttcgattcgtaggaggctgcgagaagcgttaaaagctggcttaagtccttcatttactaggtccgcaatgtaagtattaatcagttaattaaattaacttagacttcaggggactgctcaacgtgcttaattgatattattttatttacttgcgtctgttacggcaacaacattcaatttaacaaaaactgaattttcgacaatggcagaggggaagacagattttaaaaaatggctatgtgaatattttgaaaccgccttggtccggaatttgaatgagtgaatagcgtatataaacaataaaggggtaaacttaaataaaaagctttactagtttgtgtttttgtttctgctcggtagcaaaaggcattttattttttcatatatgggatttcgtgttcaactcgcacgaattcttcaattaactaaattatacaaaatcaaatgtgttttaagtagcaaaatcaaatggttttaaatgattaacaattaggtgtttccgtaaatttgaattttctccgttctgcttttacagactttactccatgttctttaagcttaaacttaaattaaagcatatagattatatcatttaaaaagaagagcagaaatatcttaatgcattttgcagggtatttaacaaatttgcaatttaaaggcgcatacaggaagatggatggggaaaggattctcgggatcgtactttcgcttacaaatacaaaaattgggtagcttgcagctttagttttagtattttaaagaaattcacgtattgcgcgcgatttaggcatgtacgtgtaggctatttaatgcttacagtttatacaaaatagtaaaccaaaagaaaacgacgactgcgacaagtgctcaatatccttgcgagatgggctcaacaaacaaaatcgttatcaatgcaactcctcttcttcaactctttctctctctttgcatatatacgtgtgagttgtttgttttgtatacatatataaatagttcatcttgtttcgcattcgctgcctccgattttgctgcttagttttacataatatagtttataattcgtatataatgcatttctgtttctatctccgaactcgtccttgttgtaaattaacttttcgcctgcctacattgccgttccgttccgttttgaatcgatctggattctataatcgattgctattgctggttgaaagtaatgtgagtgagagctcgagcgatgctgagtactgtttttgttgatttgtcaaatgtgaagaaagcgtggcgtggcgttgctgttgttgtggctgtggctgtgttctctcgtcgggcttgcaatgctatctcaaaaatcgcaatgaaaggcgggcgctcgaatttagctaggctcaatttattcgaccaccttcagcaccttgccaatggcaatggttttgtctgaaagatagaaatgataattagacggggatctcccgagtcaccaatcgacttactttcatctctgagcgtaaaacggcccatttgagggaatagcttaaattgttcaaggcaaatcattccggagcactcgattcgcataattgcaacctgatcctgcttaacgaaccgtggacgtgtttttgatttgtcaccagactttttgtcgaccaaacagatgagggcctattgaaaaataatacatattcagtatctggctaatgtatgggaattatagacctaaaacttaccttaactgtgacttcttcggctgcacagtgtatgtgcatgacagccgagtaacccgcacagataattgatttgtgttctaaaattacgacctgagcatcaaagatttttcccgtcttgatgggattggctgcatcgcagagaacaaaaccgggcgagacatcctcctcctcaataccctaaaaaaaagtttaagaatcaattaaaataatccaagggtataacaaaagaatcatgtactcactttcagcttaatcttgacgttctcgccgggaccaacagaagtgacttcaaagtcgtccgagaacaactgatccaccgccacttgcgtctatgtgaaaaacaagcttagtttcaaatattcagctgattgcaaagtgtataaacttaccctatttggcatcactaacaggttttgacccttgcgcgctgttccggactcaaccttgcccatcaccacggtgcccatatccttgtacttgtccacaattggcatgatgaaaggcccgtccgacttgcggttgagcgagggcagctcgtcaatgaacggaatgaaggcgggtccccggtaccaggggcagagcgtctccgggatttggtctttcagcccgtatccgctgaggcccgagcaaggcataaaggtaaggtccttggccgggttgaagcccagcttcttgaggtatggtagtatcttgtctttgcattcgttgtagcgcgtctgatcccaattgaccgttgggtcatccattttgttgaccagcacgaccagatgcttaacgccggcggtcttggccaacatggcatgttctcgggtctggccgccgcgatcgaagcccgtctcgaattcaccctttcgcgccgagatgaccagcactgcgagatcggcctgcgccgcgccaccgatcatgttaggcacgaagctcttgtgaccgggtgcgtcgaggatagtgaaatgctttcggtccgtttcgaagaaggctcgtcccacctcgacggtcttgcccttgtcgcgttcctcctggttggtgtccagcgcccaggacaagtaccaactctcacgcgacttctcacgtgcctcccgctcgtacttctccagtgttcgcttgtccaccatgcccgtgagcgacatgatctgtccgccaattgttgatttgccagcatctacccaaagcaaagtgcgaatgttaataatggcttttggtgggacatatgtttataagtaatgataactcaccaacatggccaatgaacacaacattcacgtgctcacgcttgctcctattttcctccaccttaaccaccttcttcttggacaccttcggcgtggcctcgccctccgtgaactcagcatcttccacctcctcatcctcgggcgtgatcactgcatcgtccacatcccagctgtcagcaggatcggtttctaagcaaataaaaaaaaaccaaataaaaggtcattagtcgagacatttacaaggcgattctactgtgcttggtggtgaaaataatatggcttgttgaggaatatataattgtttgttgtttattttctatcgattactaaaattgttatcgcgcaaatatataatttatttacattagacaatcttgggaaaactagtaattttaaaaattgttcaaaatagtgtcggtttgtccagatcaatccagttaaaaaccgaataaagcaatgaattttttttatttttggaattgtccacatcatcgtaatagtttaaagaaactttagtgatgggagtaaaattcactttaactttctctatttcacaatatcgaaacctttgtattttgagcgacatttagtaaatgcaaacatgtctctttttatgcacaaaaataaaaatgcaaatgtcatgccttttatttttgcacatgaaacaactgtgtaaatagtttctttttaatttaggtcggtttgttagaaacttatagcacttcagatgatttaaactcagggaagttgagctatcacttcaccaattatatacttcgtactaccactcatgcactcgccgtgtttgacctggcggccacatgctaattgctaatcgctgactctagccacccgggcggatgagtcatgtgcgggattggattggtggagtgctgttctgtgctggtgtcaacgtgcttggttaatagtagttcccgaacctttgacgtaaatgtcggaggatcatttgaccgtctggagatgggctgtaacgaatggtatcccaactccacgattactaactttttctccactgcgaaaacgagtaaatgtagcgagatccggcgcccttactcatgattccgatgcatacaactcaattctaatcggatttcggaactaggagcggatgtagatatagccggagaaacgagcttcgatcgcgccaaagtgtaagagccaacagcaaatgctattttttttcggcgctttggcaagcgcgccgcacagccaaacgccatgtaatcaagttcgaagcggtttcaaccgccggcgagctgcactaagcgcttccattcgggccaagcaactacaaaagtcgccacattggagtcgctgcgataacgacgagtgagccattcccattcccatgcccattccattccagtccacaccgccagtcgaagctgggcgcagcgtaggctccaatgaatggctgacaaaagagtaaacgtgtccaaaacacaagaattggggggcaagcatttgcgagtgtgggtgcggaagaaggggacaaggcaatggccaaataaacgacaccacaaagcgaagcggcagtaaaatggcagcacaaacagctgcttgtcaacgtcgcccggcgaatggcaagtaggtgagtggccaccagagatgcgccgtgattgttaacagtttaacaagtgacagtgataagtcgttacatcgagaaatcaacaaagctaaacaagaaagtgttttctaactatgaaattttcagaatattaaaattatgaacaagtttatagaattgaaaaatacacaaggctagaatatttatattagcatattcgtgtaaaattttcatggcttaactcttaaatatcccaattcttgaaactcaaaatactgaacgacgattaagaatataagaatactattcggacgaaagttttcacaaatcccaaatcccaagatcacagcgaggcgtggattgtttgatgttcatgtacatatagattcaacaagtatttttaaatgtatgtacctacatttgtttaaagcaaaaatgtcaaagtgcatgattaattcccaaccattagctggtttctagaaaacaactagacctgatttgcggttatttcaccatttggtgacacctctgtagtgattctggtcgtgattcctgggcatctctgcgctgagccactgctggcgacacgacgacgagaaaagcggccaaagaaagggccctggccggacgaactgtttttgcgcgcaggccgaaagcgattagccatttgtttagcggcacaataatgcccgcaattcgaatagaagtcaagcaacacatgcgacgccgacgtcggcagtgctgacgcagattgaggttatgtactagggccagcgataataacctaaacggaacctggtgaatgcaacctatctttggggttttccctatcccattccccattgttgtgtctctgccaacggtcttgcgaccagcaggtagcaacaataacacgcttctttgttgacgtcacagaagaagcgagttcaatggacgtggggcatgtgtatttggcagggggtatttaggtagctagcaagctctatttaccattgtttgcgattttgtccgaggggttgagaccatcgatgggcgttggatccgccgccgctgctcctgctgaaggcgtggtggctggcgaacccggcgctggcgatgcggaattggaggatgatgtgggcggctgtgctgagggtgctgctgcccccgccccctgtgcagttggaggcggtggagctgctcccgctgtggatcccccgctgccgacggaatcgggtgtggtggctggcgtggctgaaccggaggcgggacccggatccgccgtctcctcggccgcagccgctgcaaccactactgccgccgcctcctcagctacattcacaacgctgttgtaactgaaactgggcacaaattctaccgcgttcacgttcagcgttgagaactttgtgctgatctccgtgttttcctgggcggccatcgttgcagtgcgtccgtaatcctccgcagtggtttcctccgatgaaaatctctctctcgcttttttcacgcgacgacacactttcgccctccttctacaaactgcttcagctgcttcttcttgctgctcccgcactcacacagaacacacgcggtcgttcggaattcttgggattgcctatggtaatggaaattgggaatggcaaaagcaatgccaccaacacacgcacgccttgatggttgttggccgggggggtggcttgtggggggtttaggccagactttcggctcaatgtggtctacacttttgttgtgactcggtgttgtgtttgttgtttgtgctttgctagcctggccaactcgggttgaactcgaattccctttaatttgatcgactatcgcctgtttggggcagtggtgaccacctggtgatctgcaggtatgattcgactacctgaacactaaatgcagtgctcggaactagcaatcttctattattttacacgttttaagccacgcatcaagtcagggttgccacttgtatgcggtgttatcggtgcatcgatatgtgctggctgtcacagtggcctataattgatttggggcaaagtattaagatatttttaaatttttttagtaagatttttaatacttttaaaattattcaacataaataattatattgcttttgtactttgttctgattaatataattttttaaggctaaatataacgtagtccacatgtacatatataaatacaaactgtatttgttttatgtgtgactagacattaataattttttattcactttcagtgagtttttataattattaatttagttattttgtataatagaagtgtaatgcgagttttgtaaatattgataagtgtgtagtgagccttggggtttcaatacatttctaagctcatcatcaatggtatcgaattacaatcgatgttgttccagctctaacgtcgtgccagacgccattttaacagtagtgaaaaaatcgtctggagtttggctcgttttcagcattcgcattagcattttagcggtaaaacaaatatccaaatagacaatgagcaacggtggtggtgccgggggattgggcgcagcgcgtccacctccacggatcgatggaatggtctcgcttaaggcaagtatctgctaagtaaaatgcgactaaatcgcccacaaaatggcggccggctggcaacgttgtgtggttaggtaacctctccaaaagcatgtaaattaatccgcgtgtaattatgcctacaggtcgacaatctcacatatcgcaccacgccggaggatctgcgtcgggtcttcgagcggtgcggcgaggtgggggacatctacatacccagggatcgctacacacgtgagagccgcggattcgcatttgttcggtaagcattcacttctcttccgggaaaattgtgaaagtcttaggtcttttttgttttgttactttcacttgccggcggtggattttaattatcatgggacctaaaatgta

SEQ ID NO: 13718 - DNA, 3424 bp, DROSOPHILA
ctgacttgatgcgtggcttaaaacgtgtaaaataatagaagattgctagttccgagcactgcatttagtgttcaggtagtcgaatcatacctgcagatcaccaggtggtcaccactgccccaaacaggcgatagtcgatcaaattaaagggaattcgagttcaacccgagttggccaggctagcaaagcacaaacaacaaacacaacaccgagtcacaacaaaagtgtagaccacattgagccgaaagtctggcctaaaccccccacaagccacccccccggccaacaaccatcaaggcgtgcgtgtgttggtggcattgcttttgccattcccaatttccattaccataggcaatcccaagaattccgaacgaccgcgtgtgttctgtgtgagtgcgggagcagcaagaagaagcagctgaagcagtttgtagaaggagggcgaaagtgtgtcgtcgcgtgaaaaaagcgagagagagattttcatcggaggaaaccactgcggaggattacggacgcactgcaacgatggccgcccaggaaaacacggagatcagcacaaagttctcaacgctgaacgtgaacgcggtagaatttgtgcccagtttcagttacaacagcgttgtgaatgtagctgaggaggcggcggcagtagtggttgcagcggctgcggccgaggagacggcggatccgggtcccgcctccggttcagccacgccagccaccacacccgattccgtcggcagcgggggatccacagcgggagcagctccaccgcctccaactgcacagggggcgggggcagcagcaccctcagcacagccgcccacatcatcctccaattccgcatcgccagcgccgggttcgccagccaccacgccttcagcaggagcagcggcggcggatccaacgcccatcgatggtctcaacccctcggacaaaatcgcaaacaatgaaaccgatcctgctgacagctgggatgtggacgatgcagtgatcacgcccgaggatgaggaggtggaagatgctgagttcacggagggcgaggccacgccgaaggtgtccaagaagaaggtggttaaggtggaggaaaataggagcaagcgtgagcacgtgaatgttgtgttcattggccatgttgatgctggcaaatcaacaattggcggacagatcatgtcgctcacgggcatggtggacaagcgaacactggagaagtacgagcgggaggcacgtgagaagtcgcgtgagagttggtacttgtcctgggcgctggacaccaaccaggaggaacgcgacaagggcaagaccgtcgaggtgggacgagccttcttcgaaacggaccgaaagcatttcactatcctcgacgcacccggtcacaagagcttcgtgcctaacatgatcggtggcgcggcgcaggccgatctcgcagtgctggtcatctcggcgcgaaagggtgaattcgagacgggcttcgatcgcggcggccagacccgagaacatgccatgttggccaagaccgccggcgttaagcatctggtcgtgctggtcaacaaaatggatgacccaacggtcaattgggatcagacgcgctacaacgaatgcaaagacaagatactaccatacctcaagaagctgggcttcaacccggccaaggaccttacctttatgccttgctcgggcctcagcggatacgggctgaaagaccaaatcccggagacgctctgcccctggtaccggggacccgccttcattccgttcattgacgagctgccctcgctcaaccgcaagtcggacgggcctttcatcatgccaattgtggacaagtacaaggatatgggcaccgtggtgatgggcaaggttgagtccggaacagcgcgcaagggtcaaaacctgttagtgatgccaaataggacgcaagtggcggtggatcagttgttctcggacgactttgaagtcacttctgttggtcccggcgagaacgtcaagattaagctgaaaggtattgaggaggaggatgtctcgcccggttttgttctctgcgatgcagccaatcccatcaagacgggaaaaatctttgatgctcaggtcgtaattttagaacacaaatcaattatctgtgcgggttactcggctgtcatgcacatacactgtgcagccgaagaagtcacagttaaggccctcatctgtttggtcgacaaaaagtctggtgacaaatcaaaaacacgtccacggttcgttaagcaggatcaggttgcaattatgcgaatcgagtgctccggaatgatttgccttgaacaatttaagctattccctcaaatgggccgttttacgctcagagatgaaaacaaaaccattgccattggcaaggtgctgaaggtggtcgaataaattgagcctagctaaattcgagcgcccgcctttcattgcgatttttgagatagcattgcaagcccgacgagagaacacagccacagccacaacaacagcaacgccacgccacgctttcttcacatttgacaaatcaacaaaaacagtactcagcatcgctcgagctctcactcacattactttcaaccagcaatagcaatcgattatagaatccagatcgattcaaaacggaacggaacggcaatgtaggcaggcgaaaagttaatttacaacaaggacgagttcggagatagaaacagaaatgcattatatacgaattataaactatattatgtaaaactaagcagcaaaatcggaggcagcgaatgcgaaacaagatgaactatttatatatgtatacaaaacaaacaactcacacgtatatatgcaaagagagagaaagagttgaagaagaggagttgcattgataacgattttgtttgttgagcccatctcgcaaggatattgagcacttgtcgcagtcgtcgttttcttttggtttactattttgtataaactgtaagcattaaatagcctacacgtacatgcctaaatcgcgcgcaatacgtgaatttctttaaaatactaaaactaaagctgcaagctacccaatttttgtatttgtaagcgaaagtacgatcccgagaatcctttccccatccatcttcctgtatgcgcctttaaattgcaaatttgttaaataccctgcaaaatgcattaagatatttctgctcttctttttaaatgatataatctatatgctttaatttaagtttaagcttaaagaacatggagtaaagtctgtaaaagcagaacggagaaaattcaaatttacggaaacacctaattgttaatcatttaaaaccatttgattttgctacttaaaacacatttgattttgtataatttagttaattgaagaattcgtgcgagttgaacacgaaatcccatatatgaaaaaataaaatgccttttgctaccgagcagaaaaaaaaaa

SEQ ID NO: 13719 - protein, 619 aa, DROSOPHILA
MAAQENTEISTKFSTLNVNAVEFVPSFSYNSVVNVAEEAAAVVVAAAAAEETADPGPASGSATPATTPDSVGSGGSTAGAAPPPPTAQGAGAAAPSAQPPTSSSNSASPAPGSPATTPSAGAAAADPTPIDGLNPSDKIANNETDPADSWDVDDAVITPEDEEVEDAEFTEGEATPKVSKKKVVKVEENRSKREHVNVVFIGHVDAGKSTIGGQIMSLTGMVDKRTLEKYEREAREKSRESWYLSWALDTNQEERDKGKTVEVGRAFFETDRKHFTILDAPGHKSFVPNMIGGAAQADLAVLVISARKGEFETGFDRGGQTREHAMLAKTAGVKHLVVLVNKMDDPTVNWDQTRYNECKDKILPYLKKLGFNPAKDLTFMPCSGLSGYGLKDQIPETLCPWYRGPAFIPFIDELPSLNRKSDGPFIMPIVDKYKDMGTVVMGKVESGTARKGQNLLVMPNRTQVAVDQLFSDDFEVTSVGPGENVKIKLKGIEEEDVSPGFVLCDAANPIKTGKIFDAQVVILEHKSIICAGYSAVMHIHCAAEEVTVKALICLVDKKSGDKSKTRPRFVKQDQVAIMRIECSGMICLEQFKLFPQMGRFTLRDENKTIAIGKVLKVVE

SEQ ID NO: 13720 - DNA, 2618 bp, DROSOPHILA
taccctcatagctggaaccactgtacaccagtagccacaaacaaactagcaatcgtagcataactgagctttgaatccgatcgagaatcgagaacccgacctgcaagtgccgtgttgaccaaacaactgatctcagttgactccaagccactagtttattaatcgaaattaacgcctatattagctatgagttatttgcacataaattaaacggactcttcctcataagttagttgctaaatactagaaaaagttgcattaggcctagctggaattctgacgcttgtcattccgcatcgcgttcctcaaacatcgtttgaaaatgctctcgtaggtgtagggcatatccgccttgcagttgaagggacccatatagtgaatggcaccataatcgtaacagtcctccttctgatcatcgttgcaatcctgtccgtacttcaccatataactctgcaaagtatcggccgcacaatacggatcattggcgcagttggtaaaagctgagtatattgtaaattcaaaggtaagtaagtaaatgcactaaattgacagataaacgcagttcttacaactatccgtcaatggcgagtcgccaggtatggtcaatctgcctgagtccacccactgatcccaagtgatcctgaaaatgccacatgccccattcacgcacacagccgtcgcgttgcagccactcaaagcctcacacatacagatcaggcattgttccgtgatgggtttttggacctcggcttgaacccaaatgccaacgaatgtgagcccgagtacgaaaaataatatatgtgcactatgcatagctcgagatgtgtattcacttccgattcgatgcctttcgcgattgttcagccactgaaacgatttcagcagtgactactggtttttattatcgaaaatgagcgccatcgaaggtgactaatttcagttataggaaatgcaccgatctggtttccaatcagcggtgattcccgggtaaataaaaatattaagtttattaacatatatatataatgtttattttttatttactcaaatccctcatcctcgtacctctcgatgcactcctcgaacacactctggaaattgtagggcatgtccgcttggcagccataagcccccagtttatggattcgagcataatcgtggcaatccatctcaccatcatcattgcaatcctgattgaacttcttcatatagttttgcaccaaatcggcggcacagtgcggatccttggcgcagttgatgaaagccttttccgaatcgggatgctctccatttaccgtcagtttgccagcatccacccagtatccccaggtgatgcggaatatgccgcatgctcccttttccgcactggtgcaaatcgccgtggcattgcaaccactaatggcctcacaaatgcaggtgagacacagctccgttaccggcttatccagcacatgacctgtttacgcaatttattgtacatatagcacatatatttttggcggaaaaaacgtaccttggccttgaaccaatgaaggcgacagcaccagcagcaaatatatggaatatagcaggaaaactcgcattttccggctggttaaagtaataacatccaattcctctgcccctgaaactgcgaatggttctagcgattcccatgaactgagtactcagtacccggtaaatgcgccaatctagcgggtaataccggtttatagggcgcatccacacaaagtgttaagaatagttctactacatacccccactcactgactcccagttgaaacttacaacaaaaagtatgctacactgcgactcctaaatattttaaagcgtgtgttaaagactagtttaattttactgtatttcaagccaagatgtagagaatatgtatgtaagcaaggaatgtaaaatgttttttacacgaataaccctaacaaataagtaaaattcattacaataattattttttttgtccattcgaaataatttactaaatttatgaaacaagtgtgaagcactgaaaagttaaaaatatttgcttgtattgtcatttattctgaatcgaattcaaatgcattgccataaataattaattattacattatttaaatttaattacaatataaatttagcaagttaatgtgtttatatgctagagcgcacgtcgatctgctggaacgaattaaggcagttggtcagctgcgtctggtactggtagctcagctcgcccttgcatccatagccgcccagcttgtggatggcagcaaagtcgtagcaatcgatggcgttgtctccattgcagtcctggccgaacttggtcatgtaattctggatcgtgttggccgcgcagtagggatcgttcacgcaattggcatacgctgcagcgagattaatgtgcatcagatgtatgataaggtttattgcataggtaatggatgggacactcaccatcctccgactggggactctcgttgcccaaggtcagcttgccgccgtcggcccaatatgcccaggtgatgcgaaacaggccgcagactccgccgccgcagtaacgtgtctggttgcatccactgatggcctcgcagatgcatcccaggcacacatcagtcaccggctta

SEQ ID NO: 13721 - DNA, 561 bp, DROSOPHILA
aggaattggatgttattactttaaccagccggaaaatgcgagttttcctgctatattccatatatttgctgctggtgctgtcgccttcattggttcaaggccaaggtcatgtgctggataagccggtaacggagctgtgtctcacctgcatttgtgaggccattagtggttgcaatgccacggcgatttgcaccagtgcggaaaagggagcatgcggcatattccgcatcacctggggatactgggtggatgctggcaaactgacggtaaatggagagcatcccgattcggaaaaggctttcatcaactgcgccaaggatccgcactgtgccgccgatttggtgcaaaactatatgaagaagttcaatcaggattgcaatgatgatggtgagatggattgccacgattatgctcgaatccataaactgggggcttatggctgccaagcggacatgccctacaatttccagagtgtgttcgaggagtgcatcgagaggtacgaggatgagggatttgagtaaataaaaaataaacattatatatatatgttaataaacttaa

SEQ ID NO: 13722 - protein, 161 aa, DROSOPHILA
MRVFLLYSIYLLLVLSPSLVQGQGHVLDKPVTELCLTCICEAISGCNATAICTSAEKGACGIFRITWGYWVDAGKLTVNGEHPDSEKAFINCAKDPHCAADLVQNYMKKFNQDCNDDGEMDCHDYARIHKLGAYGCQADMPYNFQSVFEECIERYEDEGFE

SEQ ID NO: 13723 - DNA, 4858 bp, DROSOPHILA
acttggaaaggtagcaaaacgcacattatggaaatcaaaatatacatatttcgaactacatttatcatttttatgtatatgtatatactattaattttatatcgacattggtttcggcttttctcgctgtgcgacaggcgcgaccagcgctattcgcaattattcatgggtaatctaacccaaaatgggacgttaattactggcgcatgtcagtggcatttgcccctgacccctggaatcctgtgcccccccccctcaccatcgtccacatcccatcctgccattcgccaatgtgcgccaaactgtgctgtgtggcgtgaatcgcacaagtacggccagcaatttggttttttgttcgactggaaacagtgcggaatccgtacgcccagatccccagaagtccgttctacggccatttaccgggtgattaattaagctgcaaggacctgcgaatgcaactttctgccgctgacaacacccagggaagcgaggtggcggcgatggtgggccattgaagaattccgcaaaatatttaacttcgtaactcaagggaagagttgaccctatctatatcaatcatattttttcttaattaattatatcttatatatgtataatagtgtggttcagttcaatgcgaacccacatataaacttgctgaagtggaattagaagtggaaaagagtgccagtacccagaagaatccggtcgaaatgaaacatcctttagaaaataaaacagtttcacatacgtgtgtatgatgttctatgaatatataatagttcgtagtgatggtcgaaataaattttgtatgtatgatttaggtcatgcggatcgtcgaatacttaagtcgaataagtaaaatgcagggatccgttgtaaaacttcccgatgaatcctaggcgtgcggggtaagttacaaaaaacaaaaaaaaaaaggaaattcacatatgtatccttatgtatagttaatgtatagttatggctaagttgtgttggcctagctgtggcccaacttgtccgcaatgaacttgacaaagtcgctgcggaacaggatctttggattgtcctcggtggccagctcctccacctggcgcaggtccgtccacttccagagcaggcggcacgagaagctaaaccgaaacgaggcgaagatctcgtcggccttattcctgggtatctgatccttgtagtacgactccttatttctcacgttaaagtagtacagctgaccacgagaccgcgagtgggcggatacataattattggtcagctcgcagaacatcattatgccgccgggcacaaagaacttgttgtcgtccagcgcgaatcctaatctctgcgagttgtcctttagcacataatggcgcatgttcgcaaagaaactgcccatatcctgcaggcgaaagaggggcttgctgcgcagcgctccaaaagtgcgatccttgcggtacggtttgtttagactcctagcaaacttatcgcacatgcttacgcgctcgcggtacggacgtctacggatatcgacgccgcccaggcagataccatcgataatgtgcagggcagccattcgctgaatggtcctgccctctccgtagaactcgtacacaatctggccgaagaagatcgagcgcggctgcacctcaaaggcggtctccaccagctcccactttttgtgctccgtgtagcgcagcaaattgccgcgggacttgcacaaaaacagactgcatgcattaatatttgtctcctcgcgccccacaggcacaaaataccagtccgcaacgtttttgatagtcgcattgagactggccacgcctttcatttcggtggccggcagactcagccagctgcgttcgttcgcccaatcagcaaggagttcatcaagcagcctatccgttggcttgttctccggtgcctggcgcagtttatccggcagtccccagcgcttcaggcactcctgacgcacctccgactgcttggtctccttcagctccagattctgggcgaatgctgctatcttgcgcaggccgacgatctgtttcttgccaatggcgttatttgaatcgataatgtaacgcaaaaagtcttcgtcctcggccaactcgttggcattgaagatttccaggacgtcgttctcgtccagttgcgattcatcggacagcatcaggttgaccgtgttcagataggctacgatgcccgccgtctccgcatccgaacgtttgtacttgcagaccaggtagcgctccgaatttgccggacggctgctgtttggcttgatgatggcaatctgttggaagcacttgtacatcagatagaccaggcccacactgaacggtgtgaacaggtcaaacaccttgcaaacgaagctgccgttcggccgcagtatcttcagggcggtaaggaactgacagaggtacagttgcttggacaggatctcctggatattcttctgaccttccaccgaaaagccaccgtcggccatggcaaagtgaacgccctggggcgtatgcatgcggatatactcgttcagcgagtcctggttgctttcatcgaatatgttgccatcttcctttacgccgtagaacgtgtcaaaggactccggcgaggcagcaaagaacttttccagcttaaagtcgttagcgccacgaagtgtgaagccgaatcctttggcctcccacgatttgcggtacagcacgtactcggagaagccgccaggacctgtgcaacaacagaaaggagatcaaggttattacgtctaaagcgagtttattgagaacgatcgagatttggaaagcaaaagcgaaacgcaatgtattcacctgcacacatgtccgtgaaatagagaagctcatcgggagccaccagggtctggccagcgggatcgcggggattggtgaacatgaagttgcacatggagtcgatgttggccatcttgacggcggcgcggttgagaaagatggagctgcggatcgtctcaaacggattacatcgggatcttgcccgtcgtttctcgttgtcgttgagatcatcgaatacagttttggcattgaggatgtgatgcaggatggccggatcgcagtagcgtgtctccccgtcgagggtcagcttcttctcaccggtgaccaaatgacccatcagctgatcaagactgtatgcgtccgcacggctgccaggattgtggagccaaagcaccggttcgggtatctcgagctcctcgcaggcaggatcccactggccagccgacgattggacagtgtccagtttgaggccgaagccacggcgaccatcctgctgaacggcgatgatgggctccaggcgaccctggttgctctttcccaaacccttgtcattctcgtagcccatcttcttcatcatctccatggccttgtttgagtagctcttcacccattcccgcttgatcttcttgggcgtgggctccgagttctcatcgtccgaaggttcgtccatcttgaaggccgcgatggaatctgatctatgctctggaattgtaggcggcgcgatgctcgagtttgtgcagcgtattaattgattatatacaataacaattaaatcagctggatggatttataaattaatgggacttttctttctgtggcgatttttgtgtttacaaagatatgtgagcgactgtttggaattgttgtgcacaggctgtttattacactagatcagtgttattgtagtccgttcccgcacccggatcgggcatctagatggctaggccgcgttccgaaaactgtttgtcaagcgtgattcagatttaagcacatttagaataacttttaggtctaattttcagctgcagctgattcgataggtggtgcgataagtccagacaaataacgcttcgtgttatcgataacacgtagttcttttgaacctacgccgtatggcgataaataccgtagcaaaaacgtggttaaatatactacaaatatattctccgcgggaaattcaaagtttactttatacgttcgaaattattatttactatagctatagcttttattgccactgaaacttttttttaaaggttgtcactttctgtctagttcgagcataccacacttggtctagaactagatctccacagggtagtcacccatttctgtcattagctcgttattagctgtcatatctcagtccaattcacaaggtgtgctaaaattcctggtctgaaaatccagattgaatattattatatactaccaaaatggaagaacagaatgttgacgaaacgaaaaccaatccgctgtcgcgaaaactaaagttctccggtatttgtaagctaaccgatgaggaactgtcgcatctctacaagctcgacgagctgacagacgaggagctggcttccgtggacctgaagagaagctccttgatcgatgactatcgtcttctgcacgaggtttcgatgatgaggcaaatggagaacgaagccgcaaagcccccaaatcccccagaacccccaaagcccccaaatcccccagaacgccctaaagcccgtaagcttcttcatgtgggatttgtacgaaaagctagagcattgggtttacatacccaagaaggtatataaatttaatttgcttaacaagttcgtcaaggtcatgagtttcgaggaggagcctgggaccatcttcaccgaggagcagttgcggctcgattcgaactacatggagctaaacagcgatatattccgcctggagtccttctacaattacctggacagcatgtacgtcagcggcaattccaatagagcaatcgatttggtgatgtttggcatccaccgtttgaacatcaacattctgatgaatatccataagttccatacgccaaagaa

SEQ ID NO: 13724 - DNA, 2757 bp, DROSOPHILA
gtctggacttatcgcaccacctatcgaatcagctgcagctgaaaattagacctaaaagttattctaaatgtgcttaaatctgaatcacgcttgacaaacagttttcggaacgcggcctagccatctagatgcccgatccgggtgcgggaacggactacaataacactgatctagtgtaataaacagcctgtgcacaacaattccaaacagtcgctcacatatctttgtaaacacaaaaatcgccacagaaagaaaagtcccattaatttataaatccatccagctgatttaattgttattgtatataatcaattaatacgctgcacaaactcgagcatcgcgccgcctacaattccagagcatagatcagattccatcgcggccttcaagatggacgaaccttcggacgatgagaactcggagcccacgcccaagaagatcaagcgggaatgggtgaagagctactcaaacaaggccatggagatgatgaagaagatgggctacgagaatgacaagggtttgggaaagagcaaccagggtcgcctggagcccatcatcgccgttcagcaggatggtcgccgtggcttcggcctcaaactggacactgtccaatcgtcggctggccagtgggatcctgcctgcgaggagctcgagatacccgaaccggtgctttggctccacaatcctggcagccgtgcggacgcatacagtcttgatcagctgatgggtcatttggtcaccggtgagaagaagctgaccctcgacggggagacacgctactgcgatccggccatcctgcatcacatcctcaatgccaaaactgtattcgatgatctcaacgacaacgagaaacgacgggcaagatcccgatgtaatccgtttgagacgatccgcagctccatctttctcaaccgcgccgccgtcaagatggccaacatcgactccatgtgcaacttcatgttcaccaatccccgcgatcccgctggccagaccctggtggctcccgatgagcttctctatttcacggacatgtgtgcaggtcctggcggcttctccgagtacgtgctgtaccgcaaatcgtgggaggccaaaggattcggcttcacacttcgtggcgctaacgactttaagctggaaaagttctttgctgcctcgccggagtcctttgacacgttctacggcgtaaaggaagatggcaacatattcgatgaaagcaaccaggactcgctgaacgagtatatccgcatgcatacgccccagggcgttcactttgccatggccgacggtggcttttcggtggaaggtcagaagaatatccaggagatcctgtccaagcaactgtacctctgtcagttccttaccgccctgaagatactgcggccgaacggcagcttcgtttgcaaggtgtttgacctgttcacaccgttcagtgtgggcctggtctatctgatgtacaagtgcttccaacagattgccatcatcaagccaaacagcagccgtccggcaaattcggagcgctacctggtctgcaagtacaaacgttcggatgcggagacggcgggcatcgtagcctatctgaacacggtcaacctgatgctgtccgatgaatcgcaactggacgagaacgacgtcctggaaatcttcaatgccaacgagttggccgaggacgaagactttttgcgttacattatcgattcaaataacgccattggcaagaaacagatcgtcggcctgcgcaagatagcagcattcgcccagaatctggagctgaaggagaccaagcagtcggaggtgcgtcaggagtgcctgaagcgctggggactgccggataaactgcgccaggcaccggagaacaagccaacggataggctgcttgatgaactccttgctgattgggcgaacgaacgcagctggctgagtctgccggccaccgaaatgaaaggcgtggccagtctcaatgcgactatcaaaaacgttgcggactggtattttgtgcctgtggggcgcgaggagacaaatattaatgcatgcagtctgtttttgtgcaagtcccgcggcaatttgctgcgctacacggagcacaaaaagtgggagctggtggagaccgcctttgaggtgcagccgcgctcgatcttcttcggccagattgtgtacgagttctacggagagggcaggaccattcagcgaatggctgccctgcacattatcgatggtatctgcctgggcggcgtcgatatccgtagacgtccgtaccgcgagcgcgtaagcatgtgcgataagtttgctaggagtctaaacaaaccgtaccgcaaggatcgcacttttggagcgctgcgcagcaagcccctctttcgcctgcaggatatgggcagtttctttgcgaacatgcgccattatgtgctaaaggacaactcgcagagattaggattcgcgctggacgacaacaagttctttgtgcccggcggcataatgatgttctgcgagctgaccaataattatgtatccgcccactcgcggtctcgtggtcagctgtactactttaacgtgagaaataaggagtcgtactacaaggatcagatacccaggaataaggccgacgagatcttcgcctcgtttcggtttagcttctcgtgccgcctgctctggaagtggacggacctgcgccaggtggaggagctggccaccgaggacaatccaaagatcctgttccgcagcgactttgtcaagttcattgcggacaagttgggccacagctag

SEQ ID NO: 13725 - protein, 788 aa, DROSOPHILA
MDEPSDDENSEPTPKKIKREWVKSYSNKAMEMMKKMGYENDKGLGKSNQGRLEPIIAVQQDGRRGFGLKLDTVQSSAGQWDPACEELEIPEPVLWLHNPGSRADAYSLDQLMGHLVTGEKKLTLDGETRYCDPAILHHILNAKTVFDDLNDNEKRRARSRCNPFETIRSSIFLNRAAVKMANIDSMCNFMFTNPRDPAGQTLVAPDELLYFTDMCAGPGGFSEYVLYRKSWEAKGFGFTLRGANDFKLEKFFAASPESFDTFYGVKEDGNIFDESNQDSLNEYIRMHTPQGVHFAMADGGFSVEGQKNIQEILSKQLYLCQFLTALKILRPNGSFVCKVFDLFTPFSVGLVYLMYKCFQQIAIIKPNSSRPANSERYLVCKYKRSDAETAGIVAYLNTVNLMLSDESQLDENDVLEIFNANELAEDEDFLRYIIDSNNAIGKKQIVGLRKIAAFAQNLELKETKQSEVRQECLKRWGLPDKLRQAPENKPTDRLLDELLADWANERSWLSLPATEMKGVASLNATIKNVADWYFVPVGREETNINACSLFLCKSRGNLLRYTEHKKWELVETAFEVQPRSIFFGQIVYEFYGEGRTIQRMAALHIIDGICLGGVDIRRRPYRERVSMCDKFARSLNKPYRKDRTFGALRSKPLFRLQDMGSFFANMRHYVLKDNSQRLGFALDDNKFFVPGGIMMFCELTNNYVSAHSRSRGQLYYFNVRNKESYYKDQIPRNKADEIFASFRFSFSCRLLWKWTDLRQVEELATEDNPKILFRSDFVKFIADKLGHS

SEQ ID NO: 13726 - DNA, 4501 bp, DROSOPHILA
tcgtcgagaacattaccatatcgtccatttggtatgcaaacgaggagtttgagtcctggtggttcggtttcatctgggagtggatcgtttacagtggaatactatttctggctactttaatcgtttactactgtatactccgacccaaggaagtatccctcatcgtggaggacgatttcccgcaaggggatcaacaggaaagtcctgaggaccaggccgttgcctagcagtttccggctagtttgttatatcgaagtaggtagagtgtaagccgtcagtctgtcactggcaaacgaataaattatttaccttagtattagatcgaaaaaatatataaattttgttctgcaatggttgatcgtggaaataatttggtactcccagtgggcccatgttcaacggaactaacggaatctcaagcgagttttgctccacccaaaattaagaaagtgctccgtaagttaagactgcagtattctagaacttttctaatccgaatggtcatgcagccactagagcaaatcgcatggaacagtttctatggcaggaactctttgccgaatacaaccgacaggcctccgcccaagtggatttgggtgaggatcgcacggagtactacgaccagttctgcaaggatgtgccaccgaaaaacgaagagaccgaggaagttctggtcaacaagtatccactttactgcactactgccgtaacagtatggaatcacgagggagatttcaccaagactttcaaaagaaaatattctattaccagacctatagatctgtgtcctgataagtttgcactttagatgtggaaattgtatgagagtagtgcccacagaatattatttaattttgatctttcattgtaaatgttacataaaaattaaacttgcagtttgagaaattctatgcaattagtttaaattaacattttatttaaattcaatctaaacgtaatgttttataacggttgagtttacagtagagcatgcatacggtcactcttgcagcgggcatcgatggttcttcgtttacgcatcgatgtttgttgatccagaaacatatcgatagttgtctcggccgctgacgtgtataaaatatcgagggacaggcggtgatttttgagcgatttaattttattttcctatagaatataagcggcgtgtgaaagcgcaaccacaatataggaaaatgttaaagctaggtgcgtagcctgctcggtgtttgagccggagaactttaatttgacgctaaattcagtggaaacgccggctgcaaagtcgtagctctcgtgctgtctctctctgattttcgtggttaagcgattgccggcgacttggaacctaatggtttttttttttattcaacgccaggtctggtcatcttctgcgtgttggtcgctagtgggccgacgtggagcgcccgcaccgtggacagtcacctggggcaaaaggatctcagccgcctgcaaaaagttttcgtggacggatttggttccagtgacctgcagtcgatcttcttctccagcctaaacattcaactgactgatgccactcagaaggagccgttgtgcaagaagattgctacgctgcattccgaatccaagctgaacgtgagtttatctaaatatgcccatttatcaatagtcatacttatttatgctcctttaactccttgcagagcttcgaaaaagactactactacattggtgctagcagaaacctgggttgctccgctaagattgacgagggtctgctttccaaggtgtatagttccctgaactcggagctcggcagctctcaggagatcttctaccgcgtggtcacccacaaagtgctcggcgtggagatcaatgaagccactcaggaaaaactagtgaagcgtttgcaagaactgctcaagaaggacgacacactcagcggcctgggatacgctttcaatgttgctccacttctgggtgccagtgcctcctttatcgcaaatcgcgtggaggatgccatcgtgcaagcagatgaagttgacggcaagctcttgcaattcgaaggcggtctcagtatcacatccctgatcatcaatggtgctttcggtgtgagcaagacctttaacaagcccgtgcccattactgctgaccaggcagttaagtttgctaactacttccttagccgccgatccgtccaaaccgccaaaggagctcatgtgctaatcgaggcgctgaagactattagtggagccgataaaattgctcccgtttgtgtgcagctcattggcaacggtcaattggacgctcagtcgccgactctgaacgtagccgttgttgatctgctcggcaagcctttgtcacctgcccccaaagtcatcaatgcaaaggttattcgcaagaaggacagctctgttttagctgataaaatcactgtggcctcgaaatcctcggacaaaaccacctatgtggctgatttggccagcttaaagccagctcgcggcgtttaccaggcggagttgagtgcagatggtgtctacacccagacactgcagttcaaggttcttggccgcgtcaaggttcaatctctcgaggtgggcattgcggaatctgatgctagcgctgctacccgcaagcagagtgtgacctatccaggaaaactgcaggaggttctctccgctgacagcacccagaagcttttgctgaaggccgttctggtagatgaatccaccagcaagcctctggctgtccatcaggcattcgttcgactctacaacaagaaaactgacaaggagatcatctttgtggccgagcaggatagcagcaaggcgtacaaattcgacatggatgttggcaacaacggaaagaactttaactaccagagcggcacctacagcatttacttgaccgtgggcgattcctctttgtccaactccttcgagtggttagttgctgaagtccaattgaaattcaacgaggataagggtaattatgcaacttaattgttatggaaagtactaatctaacctcatatctggttacagaagtcaagcctaagaacacttctggtcccctgcccgaaatcatccatcagttccgagtgcccgataagcgcccgccccgcattgtttctgatatcttcaccggactgtgcataaccccgcttgtgctgcttttcgttttttggggaaaactgggcatcaatgtatctaacctgacgctggcaccgagtacgatcgggtttcatctgggtttcggtggcattctggtgctgttcttcgtgttctggctgcagcttaacatgttccagacactgcgcctgctgattcccatcgcagtattcacattcctggctggcaaccgattactgagacgtctttacgcacaacgtaactcgaaggcaagtgcgtcgtaagtgcgttcatcattgtacgaagtcaataagtgagctactctctatcttgcaacaccatcagaaaacaaactttaataaagcgatttagttaagcccaaacacacactaaatactgcctttaaatatagttgaatattttatttgtgtataattttacagcctagtttcaactgcacaagccctgacatcataattgtcttaaagaccatttgctaagcagacagttgtataatacaaaaacaatggaaacaaatgtatatttacaataataacacttgtgaaaatcttccagagcaataggatatgaatctagaggtgagccttcatgaatggcttcaagtacttgtggaatgctccgttgactggctccttgttcaacgggttcttcttcgtagactcgaagatgtgttcgtaaacatttccatcataggcacccaatgcggaatctagcacgcgatcgtgaagatcaaagctgtccaccaagctgacggcattcggccggaatcgttttaagcagttctccaggcgaacctccagtttcgtgacatcttgatcagtgagatcaatgaactgttgaaagttacatataacattaaatattcttaactaatatcaatttaaaatcgtacccgcaagaagtcgccaatgcggttgaggcaggcgtctaccagatacagctccagcaccacctttaggacttcagctagttctggggacacctcgcgcgacaaggccaaaagctccgtataggcagtctgcgctaggaaggcgcgtccatgaagctacaagtggtacaaaattatataggatactgagtgaataacagatatttcattacgacttacatctgcagctgctgttaggaaggtgccacatagattagctgccacctcggtaccataaccttgcttgcggcgcagttcaatctgctcataggcaattcgggttttgctgatataaaaatatgaatttaaatacttggtacttctacctttttttctttagtaaatacttacttggcggcaacgaattggaaagccttgacaatagacctcaatgatccgtcaaagttaacaaacttggtttggtttattgcatcactgatgt

SEQ ID NO: 13727 - DNA, 2205 bp, DROSOPHILA
tcactcttgcagcgggcatcgatggttcttcgtttacgcatcgatgtttgttgatccagaaacatatcgatagttgtctcggccgctgacgtgtataaaatatcgagggacaggcggtgatttttgagcgatttaattttattttcctatagaatataagcggcgtgtgaaagcgcaaccacaatataggaaaatgttaaagctaggtctggtcatcttctgcgtgttggtcgctagtgggccgacgtggagcgcccgcaccgtggacagtcacctggggcaaaaggatctcagccgcctgcaaaaagttttcgtggacggatttggttccagtgacctgcagtcgatcttcttctccagcctaaacattcaactgactgatgccactcagaaggagccgttgtgcaagaagattgctacgctgcattccgaatccaagctgaacagcttcgaaaaagactactactacattggtgctagcagaaacctgggttgctccgctaagattgacgagggtctgctttccaaggtgtatagttccctgaactcggagctcggcagctctcaggagatcttctaccgcgtggtcacccacaaagtgctcggcgtggagatcaatgaagccactcaggaaaaactagtgaagcgtttgcaagaactgctcaagaaggacgacacactcagcggcctgggatacgctttcaatgttgctccacttctgggtgccagtgcctcctttatcgcaaatcgcgtggaggatgccatcgtgcaagcagatgaagttgacggcaagctcttgcaattcgaaggcggtctcagtatcacatccctgatcatcaatggtgctttcggtgtgagcaagacctttaacaagcccgtgcccattactgctgaccaggcagttaagtttgctaactacttccttagccgccgatccgtccaaaccgccaaaggagctcatgtgctaatcgaggcgctgaagactattagtggagccgataaaattgctcccgtttgtgtgcagctcattggcaacggtcaattggacgctcagtcgccgactctgaacgtagccgttgttgatctgctcggcaagcctttgtcacctgcccccaaagtcatcaatgcaaaggttattcgcaagaaggacagctctgttttagctgataaaatcactgtggcctcgaaatcctcggacaaaaccacctatgtggctgatttggccagcttaaagccagctcgcggcgtttaccaggcggagttgagtgcagatggtgtctacacccagacactgcagttcaaggttcttggccgcgtcaaggttcaatctctcgaggtgggcattgcggaatctgatgctagcgctgctacccgcaagcagagtgtgacctatccaggaaaactgcaggaggttctctccgctgacagcacccagaagcttttgctgaaggccgttctggtagatgaatccaccagcaagcctctggctgtccatcaggcattcgttcgactctacaacaagaaaactgacaaggagatcatctttgtggccgagcaggatagcagcaaggcgtacaaattcgacatggatgttggcaacaacggaaagaactttaactaccagagcggcacctacagcatttacttgaccgtgggcgattcctctttgtccaactccttcgagtggttagttgctgaagtccaattgaaattcaacgaggataaggaagtcaagcctaagaacacttctggtcccctgcccgaaatcatccatcagttccgagtgcccgataagcgcccgccccgcattgtttctgatatcttcaccggactgtgcataaccccgcttgtgctgcttttcgttttttggggaaaactgggcatcaatgtatctaacctgacgctggcaccgagtacgatcgggtttcatctgggtttcggtggcattctggtgctgttcttcgtgttctggctgcagcttaacatgttccagacactgcgcctgctgattcccatcgcagtattcacattcctggctggcaaccgattactgagacgtctttacgcacaacgtaactcgaaggcaagtgcgtcgtaagtgcgttcatcattgtacgaagtcaataagtgagctactctctatcttgcaacaccatcagaaaacaaactttaataaagcgatttagttaagcccaaacacacact

SEQ ID NO: 13728 - protein, 634 aa, DROSOPHILA
MLKLGLVIFCVLVASGPTWSARTVDSHLGQKDLSRLQKVFVDGFGSSDLQSIFFSSLNIQLTDATQKEPLCKKIATLHSESKLNSFEKDYYYIGASRNLGCSAKIDEGLLSKVYSSLNSELGSSQEIFYRVVTHKVLGVEINEATQEKLVKRLQELLKKDDTLSGLGYAFNVAPLLGASASFIANRVEDAIVQADEVDGKLLQFEGGLSITSLIINGAFGVSKTFNKPVPITADQAVKFANYFLSRRSVQTAKGAHVLIEALKTISGADKIAPVCVQLIGNGQLDAQSPTLNVAVVDLLGKPLSPAPKVINAKVIRKKDSSVLADKITVASKSSDKTTYVADLASLKPARGVYQAELSADGVYTQTLQFKVLGRVKVQSLEVGIAESDASAATRKQSVTYPGKLQEVLSADSTQKLLLKAVLVDESTSKPLAVHQAFVRLYNKKTDKEIIFVAEQDSSKAYKFDMDVGNNGKNFNYQSGTYSIYLTVGDSSLSNSFEWLVAEVQLKFNEDKEVKPKNTSGPLPEIIHQFRVPDKRPPRIVSDIFTGLCITPLVLLFVFWGKLGINVSNLTLAPSTIGFHLGFGGILVLFFVFWLQLNMFQTLRLLIPIAVFTFLAGNRLLRRLYAQRNSKASAS

SEQ ID NO: 13729 - DNA, 2444 bp, DROSOPHILA
cctggcacttcagattgcccagtttgtggagtgctccgaaatccaggcaatcgatgtgctcgtctccattgcaatcctggccatgtttgaacatataattctgcaccgtgttcgctgcacagtggggctgattaacgcagttcgtaaaagctgagaaaaggactggggaattgaaatggatctattacttggatatcctgaacataccgtcttcggagagagctgtatctgtgggcaaagttagtttgcccgcctccacccagtagccccaagtgattcggaatataccgcaggccccatttacgcaaattgcggatgcattgcagccactcattgtttcgcatagacagtctaggcaatcttccgtgacgggtttgttttgcactaaatacacagaaagaaatactaatcaatacatacttatttcatcaaaaaaaaaaagaaagaagataatttttgtataaatgtgatttttcttaagaagactttttaaatatcaaaaaagcattatattatggagctaatgaataaattatattcagtgtacgagaaaagtggaaatgggcggatgttacagccggctttatagtataaagctattcctataaactggctttattttacagcgaacccagatggattaccataattatagagcaccacgtcaactacgtaacacagtggttataaggtactatcgctacggaattgatggcttgtgtagctgggtagcacttaccctcatagctggaaccactgtacaccagtagccacaaacaaactagcaatcgtagcataactgagctttgaatccgatcgagaatcgagaacccgacctgcaagtgccgtgttgaccaaacaactgatctcagttgactccaagccactagtttattaatcgaaattaacgcctatattagctatgagttatttgcacataaattaaacggactcttcctcataagttagttgctaaatactagaaaaagttgcattaggcctagctggaattctgacgcttgtcattccgcatcgcgttcctcaaacatcgtttgaaaatgctctcgtaggtgtagggcatatccgccttgcagttgaagggacccatatagtgaatggcaccataatcgtaacagtcctccttctgatcatcgttgcaatcctgtccgtacttcaccatataactctgcaaagtatcggccgcacaatacggatcattggcgcagttggtaaaagctgagtatattgtaaattcaaaggtaagtaagtaaatgcactaaattgacagataaacgcagttcttacaactatccgtcaatggcgagtcgccaggtatggtcaatctgcctgagtccacccactgatcccaagtgatcctgaaaatgccacatgccccattcacgcacacagccgtcgcgttgcagccactcaaagcctcacacatacagatcaggcattgttccgtgatgggtttttggacctcggcttgaacccaaatgccaacgaatgtgagcccgagtacgaaaaataatatatgtgcactatgcatagctcgagatgtgtattcacttccgattcgatgcctttcgcgattgttcagccactgaaacgatttcagcagtgactactggtttttattatcgaaaatgagcgccatcgaaggtgactaatttcagttataggaaatgcaccgatctggtttccaatcagcggtgattcccgggtaaataaaaatattaagtttattaacatatatatataatgtttattttttatttactcaaatccctcatcctcgtacctctcgatgcactcctcgaacacactctggaaattgtagggcatgtccgcttggcagccataagcccccagtttatggattcgagcataatcgtggcaatccatctcaccatcatcattgcaatcctgattgaacttcttcatatagttttgcaccaaatcggcggcacagtgcggatccttggcgcagttgatgaaagccttttccgaatcgggatgctctccatttaccgtcagtttgccagcatccacccagtatccccaggtgatgcggaatatgccgcatgctcccttttccgcactggtgcaaatcgccgtggcattgcaaccactaatggcctcacaaatgcaggtgagacacagctccgttaccggcttatccagcacatgacctgtttacgcaatttattgtacatatagcacatatatttttggcggaaaaaacgtaccttggccttgaaccaatgaaggcgacagcaccagcagcaaatatatggaatatagcaggaaaactcgcattttccggctggttaaagtaataacatccaattcctctgcccctgaaactgcgaatggttctagcgattcccatgaactgagtactcagtacccggtaaatgcgccaatctagcgggtaataccgg

SEQ ID NO: 13730 - DNA, 375 bp, DROSOPHILA
atgtgtgaggctttgagtggctgcaacgcgacggctgtgtgcgtgaatggggcatgtggcattttcaggatcacttgggatcagtgggtggactcaggcagattgaccatacctggcgactcgccattgacggatagttcttttaccaactgcgccaatgatccgtattgtgcggccgatactttgcagagttatatggtgaagtacggacaggattgcaacgatgatcagaaggaggactgttacgattatggtgccattcactatatgggtcccttcaactgcaaggcggatatgccctacacctacgagagcattttcaaacgatgtttgaggaacgcgatgcggaatgacaagcgtcagaattccagctag

SEQ ID NO: 13731 - protein, 124 aa, DROSOPHILA
MCEALSGCNATAVCVNGACGIFRITWDQWVDSGRLTIPGDSPLTDSSFTNCANDPYCAADTLQSYMVKYGQDCNDDQKEDCYDYGAIHYMGPFNCKADMPYTYESIFKRCLRNAMRNDKRQNSS

SEQ ID NO: 13732 - DNA, 2441 bp, DROSOPHILA
gacctccaactcacacacctcaacaccccctacccatatgaatcgagcttgattgtaattttatgaacgtaatttgtcagttaggcctcaatcatttccatgattttttactcgaaatagaaaatagagaagccaaatatttaaaaatagtttcttaaaaaaaagaattcactgtagaatcgtgaaatttaaatcaccttcattgtacttgtgtctgcatatttacttcttttgtgggcgtttttggcatttaatgcttttaattcaaaagaaaaactatgccaaacatttgtatttaaatgataaacctttggcaagcactgattttttcactaatattttgctttcatttcgtttatagtcgtaagcagaaacttccacttagttttcattacgttcactgcccactttcataactcttcaccgtctagagatatgataagaataggatgatattgctgcctttcgttcgacattgcctcagtctcagtctcaacatgaatcattaccaattaaaaaggttgttgaaacaatttcaatttgaacagattctgatgaaaatatccgtaacagtcctttttactttcaagtttccatatactagactaccaaacagaataccccttaatagagagaacctcatctcgagatatagaaccatgaccactgaatggcaaaccaatgttagagccaagctttagcaaacgtaagccagaatctgaataaattaataactatgtactaccagtatgttaacatgtttacaaaaagcgagagcatattaaagtagttttcatatacccctctatatatattatatatatatatctgtatctgtaactaaatctatagaatccatacctatattggaaactgttcaaatgcaaacataagcaatgtttcgatgtatgtacgtgtatatgtgttaccaggattgttttaaaaacagacaaatatatccccgaaaagtgggaaacgatgaaacccaataaagaatcaattatgttgaaaccgtttcctgctccttgatgatcttttcctctgccatccgctccttggatttcagacatcgattgaagactttggcaaagatgtagggcaactcttcctggcacttcagattgcccagtttgtggagtgctccgaaatccaggcaatcgatgtgctcgtctccattgcaatcctggccatgtttgaacatataattctgcaccgtgttcgctgcacagtggggctgattaacgcagttcgtaaaagctgagaaaaggactggggaattgaaatggatctattacttggatatcctgaacataccgtcttcggagagagctgtatctgtgggcaaagttagtttgcccgcctccacccagtagccccaagtgattcggaatataccgcaggccccatttacgcaaattgcggatgcattgcagccactcattgtttcgcatagacagtctaggcaatcttccgtgacgggtttgttttgcactaaatacacagaaagaaatactaatcaatacatacttatttcatcaaaaaaaaaaagaaagaagataatttttgtataaatgtgatttttcttaagaagactttttaaatatcaaaaaagcattatattatggagctaatgaataaattatattcagtgtacgagaaaagtggaaatgggcggatgttacagccggctttatagtataaagctattcctataaactggctttattttacagcgaacccagatggattaccataattatagagcaccacgtcaactacgtaacacagtggttataaggtactatcgctacggaattgatggcttgtgtagctgggtagcacttaccctcatagctggaaccactgtacaccagtagccacaaacaaactagcaatcgtagcataactgagctttgaatccgatcgagaatcgagaacccgacctgcaagtgccgtgttgaccaaacaactgatctcagttgactccaagccactagtttattaatcgaaattaacgcctatattagctatgagttatttgcacataaattaaacggactcttcctcataagttagttgctaaatactagaaaaagttgcattaggcctagctggaattctgacgcttgtcattccgcatcgcgttcctcaaacatcgtttgaaaatgctctcgtaggtgtagggcatatccgccttgcagttgaagggacccatatagtgaatggcaccataatcgtaacagtcctccttctgatcatcgttgcaatcctgtccgtacttcaccatataactctgcaaagtatcggccgcacaatacggatcattggcgcagttggtaaaagctgagtatattgtaaattcaaaggtaagtaagtaaatgcactaaattgacagataaacgcagttcttacaactatccgtcaatggcgagtcgccaggt

SEQ ID NO: 13733 - DNA, 384 bp, DROSOPHILA
atgagtggctgcaatgcatccgcaatttgcgtaaatggggcctgcggtatattccgaatcacttggggctactgggtggaggcgggcaaactaactttgcccacagatacagctctctccgaagacgcttttacgaactgcgttaatcagccccactgtgcagcgaacacggtgcagaattatatgttcaaacatggccaggattgcaatggagacgagcacatcgattgcctggatttcggagcactccacaaactgggcaatctgaagtgccaggaagagttgccctacatctttgccaaagtcttcaatcgatgtctgaaatccaaggagcggatggcagaggaaaagatcatcaaggagcaggaaacggtttcaacataa

SEQ ID NO: 13734 - protein, 127 aa, DROSOPHILA
MSGCNASAICVNGACGIFRITWGYWVEAGKLTLPTDTALSEDAFTNCVNQPHCAANTVQNYMFKHGQDCNGDEHIDCLDFGALHKLGNLKCQEELPYIFAKVFNRCLKSKERMAEEKIIKEQETVST

SEQ ID NO: 13735 - DNA, 10322 bp, DROSOPHILA
ataaaactccacccttaagcacttgcggttggctatattttcggctccatccaaattgcgggatagtatatctttaagaaataaaagcttattctaagaattcacacaaccttcaacttactataaatccttagatacatctccacctcccggtgctcctccttgtgatgcttcaatctcatacgcataaaggcattcttcaacctattggtaggatagaaactggatgatatcaaaaaaaaaaaactcctcaatgcagacaacccactttctaacaaggtccatttcaatgatagctctttgggcattcagtggatttagaacgaattccgacaacgatacgactgccttccaatgggtcagcctaacatcactatccagttctttgagcaatttgggcagtgcaaaccagccgtaggccagttcagcacgatccgccaggtgcgtcgaggtcgaattgcagcagagcggcatacacttgcaaatattccgtttctccatatgatgcgtccactctgtaatccattttttttatgattatccttcgctgattatatatcgcaactaaattacccgtagtctgcaagctgtttatggaggtcggcttcatcacatccttgatttcgtgttgcagaaagtgattgcgatatctcgctagctgctcccacattttggtttaatggtttgttgttattataatgagaaaatacaatacgtgtcaaatgccagaacttttttcaaaaatcaacttctattctacgtttcaacttaacatttctgttaggaaaactatgtttctgtactgtaaagcgccattgcggctgagaacgtaacccaattggttggaagctcaactgcgtgttgaatattatgaaaaggttcgaagctcggatgcaacagctgttcgtcgcctgaaatcgatatatcgcaatttggttgatatatttcgccgattcaatgccgctgcatttgtgaacggacgccgagcgagttactaccgaatattagatgcggactgcaagcgcagctatacgagaatataccgacaggcacgcaaaatatgcaaataccaggagtgcatctctattgaccggtcaaatactcggcttggcggatagtgcatttgcagttgcaatttcatcaatcgccaaatgcacttgactgaaaggctgtacaaaaaaacaaagagaaaaaacccagtgtgcgtgcgggaatatgtaaaaaaaaaacgagttaaataaatagctaaataacaagcagaaagcagaacgtaagtatcgaaaaagcgcagtgtttttgttgtgccggctgaaataaattcgattgtgtgcgcgcgcgtttgtttgtgtgtcggcatgtgcgtgtgagtgagcagacaacaaaaggaattcggctcgctcaacttcttcctagtttaccgttacttgcactgccaaaatcgcaaaaaataaggggaatagggagataaataaataagccgacgaatttcgaatagcataaatagtagctcctgccaaaaaaaaaaagaagaaaaatcagagaaacgtcagtcaaatcgaaaaacagaaatggccttgataaaactagcaaggtgagtttttattctgttttctcgctaatattacctataaagtatgtgtataggaattttcccgttgaaagttgtagtccaccttctctttctttgcttttccacttaacaaaccgcaattaagttggccaggggcggagtttccaccgaaagggggtttttccagcacttgcccacgtaaattgattttctgtggccccgtcatcctgtcgtgctgacctgaactgaccccatttttcatttccattttccgacaaaagaacaaagtccgcagcctgaaaaatccggccctggccttttttttttattgttgcctcttggtcaacagcaaagcgcttgaggccgtgtaataactttcgggcaaatatttatttcccagcaacgagttgttgatattgaagttggtcaatgcactttggcgcccctgaaacgcacttcaaatatcgctaagtgtaatcagggactcggaaaaacgatgataacaataattaagcatattgcagaatcgtagatatacatacaattatatttatgtatttcaattgtatgataatatgatatacttaataccagtacatttacatttacaaaaataaacatccttgtgcttagatccaaattaatttcgcatgaaatattttcgaaatcttcataataccagtttcgcaaccagattaaactactttttagaacacacaacgaacaatcgaatctaatttgaacaagatcaattcataaacttaagaacacagcgaacgtaggattatgataatctgaatttcaaatgaactgctaataataggaaaacttacgtgaggtctgtgcaattaattctgttattgtctaacaactaacaatgtatttgtttaccttctcgatttcgtttgttgacttttccagcatgtacaacaactaaacaaactagctatctggctatcgaatttccaacgccattatatccactatccccttcactatagactccgatatttatttatttgctgtttacgttcgcaaaaaaaaaaccaaacagtcgcaaatcacacatgattaaattaatcaagcggcgcacaggcgttaagtttgcgatcagttgattgatggcccgctgactgattggccgcgtgctcagcaatcagaattgggactatcccatacgccacatacactttgcccggaggatccgagctgcacttgctgcactgtgagtgccccacttctaatggtccgcacatagttggagcagtgattcacctgacccattccctggaaggggttcggtggtccaaaaataactcccagcctttcagcaattgagatcagagttgctgggacacggactttggtaattgagtgtaattggaagtgaacacgagaccactcactccaatccccagatctcggtggccagatgacggatgacaggcccagtggaagctgcaaaagtgcagcagattgcatccacaaagaatgtgtctgtatcgcggcccgatggccccaatatgtcctcgcctgacctgctagttcaatttgcacatgaaacatacagtatgtattcttcgagtaccaccacctcatatatgcatgtttatatatatatatatatatatatatatatatatattcatatttatatggctgtgcagtggaaacttttgtggactacaatgagaatgcaataaaactaaaacgggaggctgattgataaagcgagtaatctatatgacgacatggtctcgagttactctgtaaatagcaccctgcgcacatggagcgtatttacataccacatatacatatatgtacgtacatactatgtatctgcgtaatctcgggctgtttgaaagccctattgttatacgactcgtgctggcgactgtttaatttaattatgactgtttcattaattgaagtgcgtagtattctataaatggaaatcttgcggccgcaataacaacgcgcatggggcatcaaatgaaagcttccaatcaagatcagtgctttataacttttgtcaatcttaactcagttcgatttgtcactccacttcagcaaagtcgtagatcttcgattgataagcagtacttcctttgtcttggccaaaatgcacctgatcgatcaatgggaggtcttggccatccactcgtgagtagactcagctatctttgtaaagttgcgcaatttccaagctggtcgcacatcgaattctagttctcattcccacacgaaaacccgtttaaaaaaacaaaccaacaaacaaatgagctaatgtgcttgaatacgcttaagatcggtttgaatatacatataagatccgaattttgggtggttctcatataaattgtaatgctatttacgaatctagctgttattaagtaaaggatcgcattatctataatttcaacacctaaatggctaaaaacgtaggcgcctttacggccagtttaagatcgtaaacaaagctgtgcgaactgtctcagtggcagtagcagaaacggaatatacttattattattgctcagtttatagcttattatttgcaacaattgaatcaaaccaaacgtatgtacatatgtggagtgccagccgcaaatttgcagcgcacaaattaaagatcaaacagagcaattggtcgcggagaaaccacaacgaacttggcatacacttcgggcagatgaagtgagatttatgggagggaaccaaattgacatgcggatcgatggagcggctaccttttgaccgatcttagggtggtgtctggacgattctctagaagattcccgaacgctgctgaccaatgaacgctgagcgcaactcgatgcccagacattggctggcaatcgacgtctggttttcagctggcaaccagagtgcgggaaatccggctgaaagcagttttcaccaaacttatccaaagtcaagagcatggcgcacacgaaactcacggatacaatcgccgctaccgatacgattgcattccgaccacgtcgccaccaccacgacaacgattctggtcgaaaagcagccgaagcaagggtgctgcaactcaatattgcaatcgaacgaatggtggagacccaaaggggagctccacaaattgggggctacggcggagaccctccattgaaatatagatttcgagaaggccgccgtacttttttggcccggctacggtatggtaaattcgaatgcacgcgccaccgttgcgaacgcggcatgcacgaggcgtatgcgcaataaatatatatcatttgctttggagcccacttgctaatttccatcaattgcaataaacccagcctcaagtcgaatcatccacaggaccttgatggtaatcatccgtaaataaatacccctgcctttgaaggtggcaattagctagagtcaattgccatgcatgataatgtttgaaaagtcagagctgccacgtgacacatttcccctgatgatctcataaaacataatatgcatttcgtgtaatatattgtaaaaggaaattgccgacgtatttgactttcctggaaagtaacattacacaagaagaattgatttcaatatactaaaatgcatcatcatttctttattttagaattttaacttaacatcccgagggctatttttagtctttggttttttcaatttttcccatttcaagtccattgtgtccaggcacgcttctcatttggccaattcattatagccccatacaatttggctaactgctgagcggaccctgggaaatatatggctaaataatggtgcttttcagaagtgttacttgtaattactgcaactacattgtttggcgacaaagaaaatcgcactttaatgccaatttcgctggccaattaatggaatgtgtaaaaaggggcttgtcatcaaccggcgacggcggtgaccagttggaaaacctgttgctgactcagtgctcattcaagtgaaacgttcagtgggtgtggaaaattcgtgtggaaagctaactaaaaagtgcacttaatgctaaagaaaacacattgaaatgtataatggcaattttggcttcatcatttaatggattttatttccatctggttatgtaatcaacggagttggtgctagaaacttctaccaataaaattgatactgtaattaacctcttttccgcgtggaaattgatgtgctccagtggcaaaccaaccgcctactaggcaatttgcttgcaattttctaaatatagcctaacccattaaagtcacttagaatgcaaagccgacagcacggactcgtttcaattggcgcaagtaaaagtgaatttaaaagtggttttcctttttttttccgctcagcctgccagctgcacagagttcattcatccaatttcgcgttgtttgtgcaaaagtcgacttccgcatatggtccaccaatcgttgcgcccccttttgctgccccaaaaatccagtgaaaagcgaaagtgcgactggggccgcctgcatttgcgcccccccccccctcccctcctcgccgtccatttaatcattgcaaattttatgcaatctgccaacggctgatctttttataagcactttgtgtgtgtgccatatatcaaaaagcagatcatgtcgggcatttttcatatgtaattcaatttgattaaatgcgcgtagcgtgcgccaaaagtgcattgactccgaagtctgatgcgctgcatttggctggcctgatgcgtttgaaaaatagaaaaattagcctaatcgaattgggggaagtactgccatgacaacgatctaatcagacgagaaacccccaatggagggttaatgcattgcaatgtttactatatgcaatgcgatggcacgcgattcgttcatttgttgtcgatgactagttggtccccaatgcaggcagatatcttctttaactcaactttctttgttactttttatccaaaccaaaccaaatcattttattgggtttttctcaaacaacaaaacaataaacaatctctaattaccaatttacctagatttaaatgagaaaatatactttaaaggaccattttccccagcacatttaatcgatacattttgtttcctacgcttctcgtcggccgacaaaaataggtgcagcaatctgattgcgagataaccagttcaattagtgaaagtcagagtcgccggcatttgctttatgcaacttcattttatcgaccaaacaagacaagacggctgccgcagcagctgtcgtttaaaaatcccgccaaaaattagtgttgtcaaacgcaacactgaaatccgactaggtggcaacgccgcgacgtcatgttttcttgttttcgcgattagcatgcggcgttgaaattttgtgaagctcgctggaaattgtgacgaaaatgagcgcgcttagcagtaaacttctcatgaaacggatgccctgctcgctggacgaactggcgcagctgatccgtgagtgcaagctcattctgccgcgctcactgaacacctacggccggaaaagggtgctcctcgagtatgccgacccggaggaggcggcaaaagcgctggagcagctccaagaactcagcgaatcgctggacaagccgctgtgcatcagtgtctttggaccgcggcccagttccggagccgccagtgccagcagcaaatccacgcagacgtcgggagctggaaatggaggcgctgtctctggctttccggatatcgacaagtacgttcgtaggctttacgcctgcaataatcagtgcgacttcacacagccgccgccgccatatctcagctatagctatccacccattaacggggagatcctagccagaatcggtcagagtctgcagacaaattcccacttctataaccaagttttgcacctaatgaatcgcatgaatctggagccaccctttgaaaagcggcccgatggactgatggctcaaatgcatcgtcagcacgtgggcactcaaaccgagctgatacccagcgaatcggaaagcgagttggagagcgacgatggggagcaaaagttggccaaaaggcagcgactccttctagctcctgcgagcgaagaagcccgtgccaagactctcaaacgagcacgccaaatgctacagcaagctgcccaactagctagtcacactaagcccaaactgactgttcaaaaaccctcttttgacgcacccaaaatcgaaatgaaactgcccgaaaccttagtaccaccaccgatacatccagaaagacgtgaatccatatcaaagccagaaactggtgcatccacatcaaaagcagtgaggcgcctgtccaccagtgcgctcgaagctctgccggtctataagaattacaaaaccggcgatccaagcaacaaattgtacattaagaatctggcaaagagcgtggatgaacagcagctgagggagctgtatgccaagtacacggcagcaagtaaattggacattaaggtcatgcaccagggtcgcatgaaagggcaggcttttgtgaccttcctcgatgctaacaatccggagattatagcccaggcgctaaacgaaaccaatggacttttgtggcacgacaaaccaatgatcgtctgctacggcaaacagcaataggagcagtcaagggatgtggggagaaggttaggatctcgtagattttctgttttcaaatcggtttcccgaacagtagtagttttagaagacgtcaaactggtttgatcttatactcagatcagctggaaaagctatgaaaaacatacctattttctacaaaattagcaacaaaaaaaaaaaaaatcttttttaaaaaatataaaaaactttctaactgtgatatataacgcttatattctgtcggatttgcaggcaactgggcctgatcgataccatatacgtcgacggagctcgcccagatccaaataacgatcccgaggagtcgttcaacgaggacgaagtcacagaggccaactcagtgcccgccaaaagcaagaagtcaaggaagtccaagcgtctagccatgcaaccctactcatatgtgattgccgtggactttgaggcaacctgctgggaaaagcaggctccgccagagtggcgagaagcggagataattggtaagatattaaaatagcaacatcgatttgttgcaattgcgttaatggaactcgtactttttagaattcccagcagtgcttgttaaccttaagacaggaaagatcgaggcggaattccaccagtacatccttcccttcgagtcgccgcgcttgagcgcctactgcacggagctgacgggcatccagcagaagactgtggacagcggaatgccgctgcggacggcgatcgtgatgtttaacgaatggctgcgcaatgagatgcgagcccgcaaccttaccttgcccaagatgaacaagtcaaacatactgggcaactgtgcattcgtcacctggacggactgggacttcggcatctgcttggcgaaggagtgcagccgcaaagggatacgcaagccggcctactttaatcagtggatcgacgtgcgggccatttatcggtcgtggtacaagtaccgtccgtgcaacttcacggatgccctgtcgcacgtgggtctggcattcgagggcaaggcccactcggggatcgacgatgccaagaatctgggcgcactcatgtgcaagatggtgcgcgacggggcgctattctcgatcaccaaagatctgacgccatatcagcagcttaatcccaggttcgtgttgtgagttccagcggccagcaatccctccaaaacttgaaacggaacgcagaatatccatttagttactggattttatttaaatattaatataaaacgcaatgaaaggattggtatggagaataactaaagagaacatgcacgaaaatttaaatttcttcttttttttttttttgccctgattttatattttattgtaacggcaattgataagacttgaacaattcgaagcatcgcagcgatcatacatacaaataaatttataaatagctataaatatggcttagagcatacatatttttctaccattcatacttgataatgcttagttatagtctacaatacggaatgcaatacttatcttaacgacttacaccgcctaccatttaggagataaattaataaaacgacaatagctacatataaatatgggctgttaattgggaaatctaatgagaccgactatcattttttgtgttcaaacgataatgtcactcgagagtcgatgcttgatggccacctgtacgacggccttgtcgccagtgaccatccactcgggattctcctcgcttagcttctccaccgtgcagatgggcagtccacaatagatatcggacttaatgacgcgcagggcacagacgctggatggttgaaagccgcgcaggcagtcggaaaactgggtagtgggtttgttgttgatgtcgccgagcagtttccggtagttgagatctcctttaaagatcaccagggatgcctggctaatgtagacatacaggcaaggttgcacccgcttcatctggctgtagtcgtgaccacttgtccagaagtagcttttgtcgcacaggataaaggaacgatccctgatatagccacgtatccgcttaccaaaggcattcaattcctggaactcgtgcttgcgtagaaactttactagccagttaaagtccttgtgcgtgcaatccgagatgaaccacggtatagccttcacatggaaccgcacccgactg

SEQ ID NO: 13736 - DNA, 1093 bp, DROSOPHILA
aatattagatgcggactgcaagcgcagctatacgagaatataccgacaggcacgcaaaatatgcaaataccaggagtgcatctctattgaccggtcaaatactcggcttggcggatagtgcatttgcagttgcaatttcatcaatcgccaaatgcacttgactgaaaggctgtacaaaaaaacaaagagaaaaaacccagtgtgcgtgcgggaatatgtaaaaaaaaaacgagttaaataaatagctaaataacaagcagaaagcagaacgcaactgggcctgatcgataccatatacgtcgacggagctcgcccagatccaaataacgatcccgaggagtcgttcaacgaggacgaagtcacagaggccaactcagtgcccgccaaaagcaagaagtcaaggaagtccaagcgtctagccatgcaaccctactcatatgtgattgccgtggactttgaggcaacctgctgggaaaagcaggctccgccagagtggcgagaagcggagataattgaattcccagcagtgcttgttaaccttaagacaggaaagatcgaggcggaattccaccagtacatccttcccttcgagtcgccgcgcttgagcgcctactgcacggagctgacgggcatccagcagaagactgtggacagcggaatgccgctgcggacggcgatcgtgatgtttaacgaatggctgcgcaatgagatgcgagcccgcaaccttaccttgcccaagatgaacaagtcaaacatactgggcaactgtgcattcgtcacctggacggactgggacttcggcatctgcttggcgaaggagtgcagccgcaaagggatacgcaagccggcctactttaatcagtggatcgacgtgcgggccatttatcggtcgtggtacaagtaccgtccgtgcaacttcacggatgccctgtcgcacgtgggtctggcattcgagggcaaggcccactcggggatcgacgatgccaagaatctgggcgcactcatgtgcaagatggtgcgcgacggggcgctattctcgatcaccaaagatctgacgccatatcagcagcttaatcccaggttcgtgttgtga

SEQ ID NO: 13737 - protein, 223 aa, DROSOPHILA
MQPYSYVIAVDFEATCWEKQAPPEWREAEIIEFPAVLVNLKTGKIEAEFHQYILPFESPRLSAYCTELTGIQQKTVDSGMPLRTAIVMFNEWLRNEMRARNLTLPKMNKSNILGNCAFVTWTDWDFGICLAKECSRKGIRKPAYFNQWIDVRAIYRSWYKYRPCNFTDALSHVGLAFEGKAHSGIDDAKNLGALMCKMVRDGALFSITKDLTPYQQLNPRFVL

SEQ ID NO: 13738 - DNA, 2962 bp, DROSOPHILA
tagtttacatattgacagagaaatgcctaatctgtgctaagaccaaacatctctaaataaaatgcttgaccttaacgtttaagttttatttacaagatcaacgttacttaacgtatttgcctttactcattttcttctccgaaagtatttgcaaataaatctaattgaaatctattcaatgataacatggccccataaatattcatgacacttcccccaaccaccatccggttttgtgttgtcctttcatttgcaagcgaattgaccgaagcttaataataataaaactgaactgctacggcatttaatggctaaattaaacattttgcataattatttcaagtgattctgcagttgtaatatccgaggaattatcttaaagggcagaaatcagttttcttcacaattggaatggccagagcatgaaatcagaatgaaagcgattggccggaaggaaaactcttcggttgcctagactgtcaaaaggaattttcaatcacaaaacaaaatgccaaaataagttaaactctggctgtgtatccttgtatctagcttcggccgaatgatgattaccgttaggacattgcgtaattaaatattccccagaccagtgaactttcggaagcaaagtattaatagatggggagcaaatgaaggttagtgggttaatcatatcaacatctcagcaattagcctggccagtggtacttagaattttcctataatttccttagcaacttagacgaggcacgaacaggagtggaatgaccgaaagttattggacacaatttttgtgattgagtaattaaagatatttatccttgagtaaaaaccattaggcaacatttgttaaaagcttcttctacaaaagagtgtagatagatgtagtgtaatagatactttctgtcaaatgcatacacaagttttaatccccaatggtttgttataattacaagtttctttaatataactttgcaatttttaacactactgaatgatttcagcgggtctctttcttagaagtgccaggacgattatcagggttggatttacatatacgagcaggagtaggcttctcggacgttattttcagtgaactcttgtgttcatgtagattttgggtttgagtcggaacaaccgaagggtatgggacgcgaggctcgcgacttggttcatcatcgttgaccgatggcattcgatgcaagtgcgttaaagaggccaattcttccggctctgctttgctaaagagctcggccttcagtttttggtagcagtgatggctgggggagaaacctggttcaggctcagaatgatctgatatcctgtattcggattgactttcagaatatgagtattttgtttgcgtcaagttgcttgcttcgccgtcgagttgattgttttcactgcacgcttcacaagattccattcccccttcgcagtgaatattaaactctgaactggtcaactcggcaaactcgtcggctataagacgtcgagccagtggaaccgaatagaactccttgtaatgcacttttcgccgcctctcaaactccattctacgcactttttcctctacagactcgggaaagtcctcatccgccgaggattcttctgagtctccttcgatgccaaatgccggcatttctgactttgatgtgtgtctcaacttttcgatcagggcatttgtatccaactcctttggcaaatcctcctcaaagacgaagggtgtctttggttcgtcgatgatcatgtggccgtagtccttaccagccgggtggaacgtggccagtatgttgacctcatcaaatttggctgccttcaggctaaattgcgcactattgtttcccgacttcaggatgccctttacttggtccccatccattcttgtttgtagctatgtgtagttttggcctttgaaaggaactaattaccgaactaaaatgtattagtgtaaacttgtgtgtgccctatatggcttataatatttaactgataaaatacattgtcatcgtcaaaaaatatataaaaatcgtgggctccttttcttggaagattattgtataacttcattacattcgcgtacaattttttattttatttttaatttattatcataaatctctctatgaactctgcactcaaattactctgtttaacattttaaattgggatctaattatgtagtagaaggtatgcctgcttcaagtcacatattatcttcttatattcgattttaaaattactttatttattgttaccatacatattaaatttgtatgtttacgtatgttgtttaaatgctgcttagtggagtttcaaattcattgttactccatcattattctctggtaaattaagccaaacatgtttattaattataaattaagtccttgtctccgtatcgagcaaatacccaacccctaatctcggataataccaaatctccgatcagactgtggacggattcactttcaaaatatcaagtggttttcctgctgcaatctcgaagtaatccctgttgccattgctactgttgtttttgtgttgaggatgtcaagaactcgatgtgtttgtgtgtggatgaatgtattcggtactccaatcgagatacttcataatccgcgggagcagtttccaatcgcagccatcgaaaccacaaagtaaactcattttgacgtgttcaaaatggggttttgccgcccgttggatggaatgatagggggttttgtaaagcggagtcagagcaaggcttcattattgatgcgccatagtggagtttttgttattgatgtaaacatattcatcacaaacatgttacctccgatacggacgaaaacgtggaaaatgggggaagtgggggcggtaaatcaagtgatgataagaggcgtggggcaaccaatgcagttgtggcagttgcagttcgctctgtggcagctgccacttcaaataacttcactgcaca

SEQ ID NO: 13739 - DNA, 962 bp, DROSOPHILA
acacaagtttacactaatacattttagttcggtaattagttcctttcaaaggccaaaactacacatagctacaaacaagaatggatggggaccaagtaaagggcatcctgaagtcgggaaacaatagtgcgcaatttagcctgaaggcagccaaatttgatgaggtcaacatactggccacgttccacccggctggtaaggactacggccacatgatcatcgacgaaccaaagacacccttcgtctttgaggaggatttgccaaaggagttggatacaaatgccctgatcgaaaagttgagacacacatcaaagtcagaaatgccggcatttggcatcgaaggagactcagaagaatcctcggcggatgaggactttcccgagtctgtagaggaaaaagtgcgtagaatggagtttgagaggcggcgaaaagtgcattacaaggagttctattcggttccactggctcgacgtcttatagccgacgagtttgccgagttgaccagttcagagtttaatattcactgcgaagggggaatggaatcttgtgaagcgtgcagtgaaaacaatcaactcgacggcgaagcaagcaacttgacgcaaacaaaatactcatattctgaaagtcaatccgaatacaggatatcagatcattctgagcctgaaccaggtttctcccccagccatcactgctaccaaaaactgaaggccgagctctttagcaaagcagagccggaagaattggcctctttaacgcacttgcatcgaatgccatcggtcaacgatgatgaaccaagtcgcgagcctcgcgtcccatacccttcggttgttccgactcaaacccaaaatctacatgaacacaagagttcactgaaaataacgtccgagaagcctactcctgctcgtatatgtaaatccaaccctgataatcgtcctggcacttctaagaaagagacccgctga

SEQ ID NO: 13740 - protein, 293 aa, DROSOPHILA
MDGDQVKGILKSGNNSAQFSLKAAKFDEVNILATFHPAGKDYGHMIIDEPKTPFVFEEDLPKELDTNALIEKLRHTSKSEMPAFGIEGDSEESSADEDFPESVEEKVRRMEFERRRKVHYKEFYSVPLARRLIADEFAELTSSEFNIHCEGGMESCEACSENNQLDGEASNLTQTKYSYSESQSEYRISDHSEPEPGFSPSHHCYQKLKAELFSKAEPEELASLTHLHRMPSVNDDEPSREPRVPYPSVVPTQTQNLHEHKSSLKITSEKPTPARICKSNPDNRPGTSKKETR

SEQ ID NO: 13741 - DNA, 21028 bp, DROSOPHILA
cattatatagtcccacctagacctccaaaaattgacgacatgttgtcggtgctgcctgtttatgctgagttctctttgaaacgataagtcggcgctttgtggccgtttacatttacattaagtacgtagttgctatccgccggcttcttgatttatggggaatttacttttatgcattccgacttgaaaatatgtgcagtgcggaattttcgcaagttaagatttgcggtattataaaaggtttattctatttggattatgatgatgtaggtcacaacttacaaaacccataactgccgttggtaatttaagtgaagtttacgttttcatgttcccgccataaattaaactttactatgctcgtgtattttggaatgtcacctagacatacacacgatattaattgatatattgaatagttatatcagtaaagttttatgaaaatgtaattaacggtttaattcttgtgcgaaatcaattcaagaacaaaatattttttttgtacatattgtaccactgtgcaacttgaatatcagtgtggccatgcatgttgactctatatcaaaatccagccaaacctagccaagcggactggtcacactgcaccatatataagcccacgaaacggatatcgccgattcaaacggtcgaacatttttcttgctgctcgtacgtacgttttattggttgctcgcgctcgtaacgtttttttcgccccgttttggccaatgtgtgtgcgcgcgcgtgtgtgtgtgctgcttgcagttcaaaagggcagcgacaacaacaagaacagcgcacctctcttttaagccaagtcttcggcgctcgtatgtgtgtgtgtgtgttggtgtgattcagaatcgtggcctgggaagaaatggcaaattagttggctcaaagtggaatctctgtgctcaatattcaaattcaggctagaaagtgtcgcgtgcgaaagtttgcaaataatacaactagcagaaaaagaggaatataacttaaaaaaaataaaaataacctgttctaagccaagtgccgattgcgcgcgtgtgtgtgtgtgcgtatgagtgtttgcgtggagcagagagaagggagaatgcaattaccaacaacaacaagctcaatgagtatcgtttgaatagcaataatatctagccaaaagcaaccctttccaatacgaaaactcgacttgagccaacaaatcagcgatcatggctaaaatcgccaatgcgtcactgtcgcaacaacaaaaacagcggcaagcagaaacagcaacgaccacaacaacaacagtggcggcatcagtagaaacagcaacaacaacagcaagaagtcgagaccgcacgaaaagcgcagctcaaattacgtcgcatttgctcaagcgcgccatttcagtttattcgtcgcctcaatggataccgctcttcatacttatttacttagcaacaggtgagagagaaccctgagagggagctagcgagtgagtgagagggagggcgataggcagtcgaggacattcaggaggagagagcgaagatggggacatgagagagcaacacggtgtttacgcggttcttaagctacagtgatcactccacagcactgaacttgcccgttataaattattaaaatgtatattagatgcccattttaaatggaatttgtaatgttgttattgtgtttaagcctttggctgctcatatgattaatgagttaatgagattgagttacggaagtcacactgtaaataatttatatgatgagccacatgcattctttagcttaaacatttgctgatgtttcaaaagctcgtaatcgaaaaaaaagagcaacaggtcatgtgtgtgtgtggtggggcattcgtgtgttttggggatgttgaccaagtcatgttgggtaaaaggaatttggattttcaatgatttcgggcctacgaaaaactcgttcaacgggttttccttcaagaagtgactcatggagctggcttacctgaagtttgattgtgttaattatacactcatttctaatttttgatgattgtgtgctcggtcttatcttgcaaacaaaaggaatgcttagaaatgtattagcttcgattgcgtataaatttatatttagtagagtacaactttagtcgctgagagagataattaatcaaattatagcttcaaaggcggttaatgttagcaatcttggccaagaagaattaattactgaaaccagaagagatattttaacgtgacccgcattttttacacactgtagcttacaaatggatatcatatttttaggtaaataacagggaatcgtaacaaattattgtttctgcatttgttgatactggtgcgattttttggtaataaaacctcatttgtctgcattttcaaagcgcttttagcgatatcacaacagtgaaatctgtgaaacttatcgcataacgatcataataattgattcacaactcttgctgactcattatgtgtaattttctgttacatgttgtccgcggctcaattgtttggctggcttagcattgtctgccccctttttccaacggattgtgcaaaaacgacctcaaaaattgggtctatttatttacaattcgagtaccaaccctccaaacggccagccatccggctgttgttacgcgcaatcttatcttttggccggaaagtgaagtacaacagttgcaaaagcgcggccaactcaacgtcagcaataccgcaattccgttgataggttgataagaagaacactcaggagaagggagcacagatagagaaagagttttccaactcgaagtagggaaagccctggagtgcagcgaaaacatagtaaaccagtttatcagctcttgaagctaatagtaaacaaattttcagcttaataattaaaaaaaatccaaacgagtgaaaagccctaataaagagctataattcattcatttccatgaacacattttcttttaattgtaaagaaccaacctctctataggccctgtattttcgtataccttttatcgtagaatttatcaaatgactttggtttatgattgacaaggaaaaccgacgaataaaaagaagagaaaatgaatgtctgggctgggaaatccctgaaaggcatcacagcaactggtttatggcagcttccatcgtaaaatccagacaccgacagcgaagatcatcagcgtcatcttcacttcgagagtggtttctgtacggctttcgtttgaatttccgccctaaacagatataatccatcattttcaggggaaaaatcgcggcacaggtatactaggcacgctggaaaagtggagggaaaacacaaatgaaccgaaactacctgcattgcgttaacgataacaacacgtgaccccgcgagtttatggaaattctctggcacgtacataaatgaaaatcgagaatggaatggaaattgtacgctggacacacccgcgttctccgctctccggtgtccggtgtttcaacctggtcaagtgttaaagtgcaatcggccgtgacgcgggtcgtgggccatgttccgtgggcctacgcagccggccgcgaccattgcctgacgttggccattagtgcaagtcgttagccaggtctataaaaatagccagagtataactgaaaaagaactgatttgccccagtcctttaaaggttagggcgtactttactacccagtacttagtggggagtggggaattgtggcggaagtggaattgaatgcaatactgagaatgcagggcgcacatttcaggaccaattttggttatagccgaaataattgggatgtggactcttggtatgattttggactaagcatagaaagttgtaattaggtaactttaagtcgagacaactgcttagttctgtctagtttctccttgcaatgttccacgttttctgcgactgcatcgattagccagccaccttgggaaattaccgatgcacaaaaaccacaaatgtgagaaacaatatgacatagtggggaaaatattatactaaactgaaaagacagtggcagctttcgcttttacacgatattaattccaaaaatttattcgatgcaaacaaatgtttaaaagttgtgggcgttgttcaatgctgtccgttggattgtctttatcgcggtgatcacgtagtgccgttttatctgtcgctatttgcatacgcagcgtactgccagcaacaacaaattccattgttagcattgagtcacaccaacaacgataccgtgggccacaacgcaccaaaatcgaacacaaattgtttggtaattgaggtgggaaattggggaacatactctaaggttctgaaggcaattaacgggctcagcatgcgtggttttattatttatttcagaccatattaatagcatgttgtagtgctaaacacacaaactaaagcttatatatgaggtagcagccatttaataaataataaaatatttatggaattattacttctataagttcattctactcacatcatatgccctgtggaaagtgtaaagtcacttcctgatatgattttgtacattttttccataattactcacagcccttaatttattttgaaaaccttaccgcggtgcaacgcccacgtactgcgtttatacttcaaaagtctgtgtttgcccaggttgtgggttccgaaggttctagaggttcattccggtggatctggtggttctagtgattctggtggatgaaatggtgttgctctttggggacgcaccggaaaagattctcaggtgtgttttcggttttgttttattcaacagttcattgctttgtgccagtttgtgaacgagtctggccgcccctttttccaggcccacagaatgtacaagggccgccttgttggcaacacacagaaagcggtcgagcaacaacacaccactggctgccacaaaactggttcccaggcgcgcctgcgcagaggtggctccaaaacaaaacaaaaaaaaaagcacacacaaaattttgaacggcgccaaaagagcgggggagagaaaaagcgactctaatttcgagtgtgccccattctaagcatttattttcggggctcttttcgcttgaaagtcatcttggtgttcccagaaccaagatattaatgaataaacgataactgtttaaacgtaaagatttattcacacggttaaatatagacaagttcaacgagaaatggcacaaaaagaaaaatgaattaactaaattgaaataagcttattcgtgaactcatttcaacttcaattgttactttaaacttttcacacttatgctggctaatatgaaaacttgatatgagttgctttgatatcattgccattatttactaccctctattttgatttcgtgcacaatttcatgagagtaacctgagcgaatccactggattggtgacgcactcaaactttttagtgggtgcgtattttttgggttattctccttataatctgcagctttcatgagaaacgttcatttatgaaaactaattagcttctggccgcttcaatgtattgttaccatattgtgtggccgaagcggttttatttaaatatttaaaaatatttcctcaccacatttcttggaagccaaagcggaaattagtgtgggaacgcattcgtatctcagtttcgttcggaatctttcttctcgccaacgaggtgttggaacaaataataaatagcttagagcaatgtgttcttcgggtttaaagtgcagtcagacatgaaaatctgtaagttatagaatagagcgatggacatgggaactaactgatcttgagaagaaaggcgttgacttcaggtaacgcaacaaagaaatcattttcaacagggattattctatgtaccctagaaaaattgttggccgaagctaatcgtttataaaagcggttagaaggagagttcttatctttgttatcgttctataatatataactatgtgatttcgaagttccttagataacttaagaatttctaagagactgttgaattgtcgaaatcaaaacccaaattagattcataaatatttatagcggaactatccatatttggcaagctttattaaaaagccaatttcctttttaaattaattaattaaattcaacaacaactctatttaaaacacattttcattattttttcgcttatctttgtttaagatcttccttgtgatcatttacccatatatatttatatatatatataaatatctctagctctcatgatcattgaacatcgagtgcaattaagccctttcgataatcgtattatcaacaagctataattaaattttaatcgcgacacgttttcacttttccattaatagaaaaataacgaacagacaccgaaaacgaaaactcaacaattaaagtgcaattaaaaaatttcgaatttaattagacaaaagaaaaacagtgttattgttgttgcagcagccaacaaattaaatacaaaaacggaaaaaagtaaattcggtcaaatttaatttatgcaacttctgaacatccgataagcgaaatgaaaacaacaaaacaatcgagtgcaaaatgaaatttttcgtgggcgttcatttactcaaaagctgcggaaaaagtaaaaagtatttagagcaaaaattgaaaaccaaaaacaccagttaacgtgttttttgtgtgggttgccaagtgaggcaacagcaacatagtagtcatgtacccatacaccatttaaaccgagccaaaagaattgaagtatgaccaaatgcagagagctgcccgcatcaacaaaaaaacgaatagttgcaggaaaaaatataagattcatagcatttccatacttttgaagactttctctagcgaggcataggtaactttgattattgattgggaaattgttacccctatagcctgacattctaaataacagtggttctattatctcaatttatcatttcactaaaggggattttctatttaggggagagtttaaaaaaatcctcggcaaccgctcaatttagcccagttagcaacgtgcaacctgttttgttgtggccaaacatcggacctgcaacttgggataagggttgcacgttcgtaaaaaaaagggaaggtatgtggaataacaactattctaaagagctcttcaagctttagaatcgtgaaaaattcgttaaaaaagaagccaaatgcagtagcttctggtgacattggtaaccgaagtcaatatgcatttggatgtatgcacagctgtcactaagataataataaaggtggttgatggcatgttgaaaaatcgtacaaaacaggtattaattttgatgatattgtgcatttataactttgtacatttttacaaaagtgacatccatttattgcgttttttacatgtttaataactgcagaatgtttcagctcattttattatcgctgctattattgtgaccgcagttgtgtgtaggcactccacgttggtattgcactcggtgcggcattgtttttcgcatatgctgacgctgattagtcataccaacagaatgcagtgtaaaatccgaaatgcaaaatgcactggcagagccagaggtaaaaccaaagcaaagcgagctgagccaatttgcatacatctacttatgttgtgttggctgttgcaatgggctgaatgtttttgttaactgggtctactggagagagcctctcattttgaccaacttgatgaggtgtgagtgggggcgggacaggaattggcagtactcatttccttcatggaaaagttttgcgcgtttttcgcaaactgttttcagcataaatcattcgtttcttacgggtggtaaatggtatgggaaacctgaaatgggggaacttaaaatgagtgattatctcgacgatggattgaagatacagagcgttttctcttttaaattgaaagatttacttaagtataggggctcagcatttttggggaaactactgaaagaaatgattattttattctcatttagtgggcaaaacaatttgcaaaagcatgatggtcagcctattaattataaatttcaatgatcgactatagtgagttactatttagtgctgctcatcatttaagtaacaattggatgcctgatctccacggaattatatagtttatactacattgaagatacagatactttcacaaagatactttcattcattcgaagattcatttaaaaagattatgcaagaagagtacaatgggaactttcataatactttaatctgcgaaaatagctgaccatctcaaagctgtcacaataaagattatttaaaattcgtaggttctggttattggacacgcctcttcctaagaaccggcacaaaacaatctttgtccccaaaaaactccaagcgagacatcattaaaagcttcaaaagcatttacagcagaatgcccagaatgtttttgacaaaaagacgaaataaactattaaactgtttcttttatggcaccgctaaaaagaattcttccgctctccggagcagaattaatccagagttttgcagttccagctcgaatccaaagtcgagtcattcatgacacaactgaaaataataaacaaaaactcgaaaaacggcaaaatgctataaaaaatggaaatagaattcttgccgctggttatgattatgaaatttccgttccgtttatttgcggccaatctaaacactcaatggatagattatataaaagcacaaaccaacggaattccggttctacgagtaggtgcatgtggttttagtatgaaaaactaataataataattgtcttttgtattaaaataccagttttttttggtaattacctttaggtaatttcagtcttacaataatttaattccacacacattgagtgtttcatttctctcggtgtacatgtgtgatttttatagcatttttgccgtttaacttttgaatacttttctgcatagtttcgtacgtgagtataatataattatgagctactttgctggcgacttatttacttgttcactgactacaccttggctgcccgcctcccggccacgcccccttctcacctggcacacataatcacagaaatgacaacaacaacagcgtgcttgctgtcaatgcaaatagcgaagcaaatcgcctttaaataggttcgaaataaaatgtttgagaagaccgcacaaaaagagccagcaaaatcgatggcctcataaagtattgtattttgttgcccgctgtgttttaacacggttcgggttctgtcgaggtctcccaagtcttccaagtcccctgagcaccttctaagctcgtggctaccatgggtcagggcagcccaaagggcacagcggaccacagacgggttcatcggagccaggaggtgctaaaatgatctcgtctttgtgggggaagtgcaaaaatactcaagtacacatgtgccaacaatgttgaggtgaaaataaagttagataaatgttttttttttagtcataaatctcaacttggacagtgtcattgaaacagcaatggtcttttaagtttttgaatgacaccaagttgttaaaaatcataaatggcaaatggtaaccatcaatatgtaaaaagtattaaaaagttcagaaaagcttataatttatgcaaaataaatcaacagttgcccaattcatctcagtgaaagcaattattcataataagctatttgagcactgaattataacaagcttcctggtttttaataactaacttattgtaaagaaattcgtttgtataaaaaatcgtatttataaaaaacgaaaggtctctctgatttttgtttcgatttcctttcgctaataactttttcctgagccgctttctttccgtttcaagattttgcttaagtttttgtttttatgtttgatctgcagactattgatgaaaaccagcttatgaacatgcaagtctacttaagttatacatacatttggtacatattcacagtttccctctttgcagatcttaacgcctcgtgcactcgagcctaagaaagctagttagtttcgccatttggccattttttcgtatttgtttagaaaatgtgaatgagaaaaacgacttggagtcagttatggagtcttctggtctgcggctgcgtctgtttttctactttagctgaaattgattctgcgctttggtgatcagcgcaaacgaaagttgtgaagagagtggggggattttaactgattaccatttaagtggcatgtgccgggccatggcaactcgtctaatttggtcaatgctagtcgaaagaaaaaaacactttcttagccagagagcaatggacagagacgcagcgaaaatgctgaactgaacagcactgggaaaatgtaagccaaagtaaaccaattgtccatttgccgtgtgccaaatatgcgaaatgaggaagtctacggttacaaatgcgttggccaaatgcgaatgaaatgcgattagttaaatgggagcccgacttgacttgacttgacttggcccgaaccaaaccgacctggccttgtcatgcttttatttcattcatttcacccatcagtccgatgcattcagcgaaaaatttactctgaattactgcagttttccggttttaaattaacttaattttgatttcatgggaaattgtaactagagattagggtggttgaaatcagctgcacatacacttcttagatatttctgtttatatttcaaactaaatattgcacgttccttccagtgcatcggctaatcccactaaccctggcaatcttgatcttctcttgcagatgtcgcctcagtggcggtgccgacgaaggaggcgtactttaatggctccacttacctccgcctcaccacgccgatgcccatttgggatcactcggcgattagtttccgctcgtgccgcggcggcgagatcctcgcccagcagtacaacaagaactccattgtaatctcagtgctcaatgactttctgcaaatctcactggctggacccgccgtccatgggcccaacaaccggctggatgtcaagctgccctaccaactgctggacaaccgctggcatacgctgcagttcaagtacgagtacggaaatctctacctgcatgtggatcgcgcggcaagcatatttggtaagtaaccatgccgttctggctgccccaaattggatttcaggctctatcgcccactcattcgggtcagtcgtggacaatcgtgccatgcagcaaagcacatggaagtgaatcacatcacgagggttaagtaatgcatgttaagtaattgtgctggctaactgaatagaggtagaaaatgggtagagatgaactcattcgaaaaatcaattaaacgattgtatagaatacgtgcgagaaatgattaaatagaggaaaccaaccaagaaaataataattactagaaatgaatattaacgaaaacaatttgctaatcttaataatgaatttatctttcttctccagccaactccacgtacaacagtcagttcctgactaaccaggacattggctacaaggacgccatcttgatactgggaaactccttctccggttgccttctggatggaccaggtctgcaatttgtgaacaactcgacggtgcagaatgtggtctttggtcactgtcccttgaccccgggtccctgcagcgatcacgatcttttcactcgactgccagacaacttttgtctgaatgatccctgtatgggccatggaacctgctcgtccagtccagagggatacgaatgtcggtgcacggcacgttactcgggaaaaaattgccagaaggacaatggctcgccgtgtgccaaaaatccatgtgagaacggtggttcctgcctggagaattcccgaggggattaccagtgcttctgtgatcccaaccacagtggtcagcactgcgagacggaggtgaacatccacccactctgccagacgaacccctgcctgaacaatggagcatgtgtggtgattggcggcagtggagcactcacctgcgagtgtcccaaaggatacgctggtgccaggtgcgaggtggacacggatgagtgcgcctcacagccgtgtcagaacaacggaagctgcatagaccgtatcaatggattcagctgcgattgcagcggcaccggttacacgggtgcgttctgccagacgaatgtggatgagtgcgacaagaatccgtgcctgaacggcggcagatgcttcgatacctacggatggtacacctgccagtgtctggatggttggggcggcgagatttgtgatcgacccatgacatgccagacgcagcagtgtttgaacggtggcacctgcctggacaagcccatcggcttccagtgcctctgtccgccggagtacactggtgaactgtgccaaatcgcacccagttgcgcacagcagtgccccatcgattcggagtgcgtaggcggcaaatgcgtttgtaagccaggctcatcgggtgagttcaacgttccattcttttcggttatggggatcatttgttgggtactgcatgactattcattcgcttactttgggttttacggtcttaatttctccacctaaccaattgggatatatatataagcttccgacatggagccgctgactccgctcgagctggacattctcgacgccacgctgtgccccagcgaaaagaagaagcgctacatatcgcccgagtggctcaaacgcaagcgttgtgagctaaaactaagtaggtcgaatggatgcggtagtagcttgctaaaaagggatttctgtatagtttcattatccatctgacattcatagacattagctcatttgacaacacctctccattacccccactaaatgtatatatctgcctgttttattcgctataagctaatgcccctatcttgtattgtataaaaccatgttgcgtttgatgggtaataatcgtaggccccattggtcactgcctgccaacaacaaccacaccgacaccagaacaagagccaacaacaacgccaagaaccacaccaaaccctaacccagctattcccaacaccctaacaacaacaaccaagataccaccaataacaaccagccgaacactggtgggaacgaccacgggtagcaggagaccaccacaacagccactacaatctccgacccaacgctcggcctccctgaatgcatgtccccaagaaaactgcttgaacggtggcacctgcctgggctatagtggcaattattcctgtatttgtgctagtggatacacaggtttggcatacatttgtccggggttgtcctaaaagagtgcatgtcactgatgatccacttaagggagtttaatttgcatgcggttaatggcccttgtggttcttgggtttaaaattatattgatttcgacttgagtcctgtctgaatccactctgccacagtacttaaaaagttatttactaagaattgcataggaaattattaaatgtgataacatggaaattaacgatggtctgccctattttgcatatgaataatatcaagtgaagtcaaaagacttgccaatatcattaacattgtggattcattcaagattcaagtctaaaccaattctaaacttttagtgcaaccccagataagctaactttaaatacgtagaaaagtagatcttgttaaacaattaatatttggtaaagcacttgaagaaatcagaaatgtacctttaaatatttatttatttagttacttaaatagtaaaaaaaaaggctccattgcatactaatatctagaattattcccaggttacaactgtcaaacgagcacgggcgatggagcttctgctttggccctgacacccatcaactgcaatgccaccaatggaaagtgtctcaatggaggaacttgctccatgaacggaacccactgctattgcgccgtcggctattcgggagatcgttgcgagaaggccgagaactgttcgccactgaactgccaggaaccgatggtatgtgtccagaatcagtgcctctgcccggagaacaaggtgtgcaaccagtgcgccacacaaccgtgccagaatggcggtgaatgtgtggacctaccgaatggagactacgagtgcaagtgcacccgtggatggactggacgcacctgtggcaacgacgtggacgagtgcaccctgcatccgaagatctgcggcaatggtatctgcaagaacgagaagggatcgtacaaatgctactgtacgcctggatttaccggagtccactgcgattccgatgtggacgaatgccttagctttccctgcctcaacggagccacgtgccacaacaaggtaggtagatggcagtcggacttggatccgagtctgccgctggtgacttaggattagtttgttactaaagtgtaattagttgtttttctttaaattcggaaagcatcggattttgagacaagtgagtgggagcttagatatatattaaatcttttcgattagatgtaattgaaagtaagcttgtccctataaaaattccaattagatcgctttgtctttttgatagtgcttgagcgaaaccaatattttttctattattgatgatgacaatatttaatcaacttatattgacatagataaatgcctacgagtgcgtttgccaaccaggatatgagggagagaactgcgaagtagatatcgatgagtgcggcagtaatccctgctcgaacggatccacctgcatcgacaggatcaacaacttcacctgcaactgcattccgggaatgacgggccgcatatgtgacatcgacattgacgactgtgtgggagatccctgcttgaatggtggtcagtgcatcgaccaattgggtggcttccgttgtgactgcagtggcaccggttatgagggcgagaattgtgagctgaacatagacgaatgcctctcgaatccgtgcacgaatggtgccaagtgcctggacagggttaaggactacttctgcgattgccacaacggctacaagggaaagaactgtgagcaggacatcaacgagtgcgagagtaatccctgccagtacaatggcaactgcctagagcgttcgaacataacgctttaccaaatgagtaggatcacggatctgcccaaggtgtttagccagccctttagctttgagaatgccagcgggtaagtcatttgaagcgggatcccattttaaattcgtggcttaaccttcttaatccacagctacgagtgcgtctgtgtgcccggcatcattggaaagaactgcgagatcaacattaatgagtgcgacagtaatccatgcagcaagcacggaaattgcaatgacggggtaaattattaaatatatgatagttaaagaattacaattaatattgaacttgtgtttattcgcagattggaacctatacctgcgaatgcgaacctggcttcgagggcacccactgtgagatcaacatagatgaatgtgatcgctataatccctgccagaggggcacttgctatgaccagatagacgactacgactgcgactgcgatgcgaactatggaggcaaaaactgttccgttcttctcaaaggctgtgaccagaatgtaagtctttaaaacaaaaaaatatacaatagatctttacactaatttgaatccctttgttacagccttgtttaaatggcggtgcctgcttgccgtatttgatcaacgaggtaactcatctgtacaactgcacctgcgagaacggcttccagggcgataaatgcgagaagaccaccactctgtccatggtggccactagcctgatttcggttaccacggaacgcgaggaaggctacgacattaatcttcaatttaggaccacactgcccaacggagttttggctttcggaaccaccggcgaaaagaatgaaccagttagctatattttggagctgattaatggacgactgaatctacattcctcgctcctaaataagtgggagggcgtgtttattggatcgaagctgaacgatagcaactggcacaaggtgtttgtggccataaacacttcgcatctagtcctttcggccaacgacgagcaggctatttttccggttggctcctatgaaacggccaataatagccagccttcattcccgcgcacatacctcggaggcaccattcccaatctgaagtcctatctgcgccacctcacccaccaaccatcagcttttgtgggctgcatgcaagatataatggtcaatggtaaatggatctttcccgatgagcaggatgcgaatatcagttataccaaactggaaaatgtccagagcggttgtccgcgcaccgaacaatgtaaaccgaatccttgccattcgaacggtgaatgcacggacctttggcacaccttcgcttgtcactgtcccagaccattctttgggcacacatgtcagcacagtaagtagtcttaaatggaggtaatgcatccttgttttgaaacatcatgattttcctcttattagatatgactgctgccacttttggccacgagaacacaacccattcggccgtgattgtggagaccacagatgtggctaggcgagctattagatccatcctagacatttccatgtttattcgtacacgcgagccaactggtcaagtcttttacttgggcactgatccacgcaaagcccccactaaaagtgagttaaatctttatcatatacatttattagaaacttttttacattttttttataacttcaatagatattggcgactcatatgtggccgccaaattacacggcggcgagctgctggtaaagatgcagttcagcggtactccggaggcctacaccgttggtggccagaaattggacaacggctataaccacctgatcgaggtggtgcgcaatcaaacgctcgtgcaggtcaagctcaatggcaccgagtacttccgcaagacgctgtccacgacgggtctgctggacgcacaggtgctttacttgggcggacctgcacccacacgcgagtcacttctgggcgcgaccacagaaccaggaataattccagttccgggagcaggaatacccattgaagacacaacagtgcccaaggaggcggacgacagcagggactactttaagggcataatccaggacgtgaaggttagcaatggctcgctcaacctgattgtggagatgtattccctaaacgtgacagatgtccaagtgaatgccaaacctctgggcgctgtaaccatcgatcgtgcctccgtgttacctggtgaggtgtccgatgatctgtgccgaaagaatccctgcctccataatgccgagtgcaggaacacatggaatgactacacttgcaaatgcccaaatggttacaagggaaagaactgccaggagatcgaattttgccaacacgttacatgtccgggacagagcttgtgccaaaatctggacgatggctatgagtgtgttacgaacaccacatttactgggcaggaacgcagtcctctcgccttcttctacttccaggagcagcaatctgacgatattgtcagtgaagcgtctcccaagcaaactcttaaaccggtaattgatattgccttccgcactcgtgctggaggtactctcctgtacatagacaatgtggacggattctttgaaattggagtaaacggaggacgagtgaccatcacctggaagctaagtgcactgcattttggcgagtctgcacgctttgagaaggagaacactgacggagaatggagtcgcatttacctcagggcacacaacagcaaactggagggtggatggaagggatgggaatcgatggtggatccgacgccagctttttccacggacatcgaccaagcggcctttcagtccctgatcgctacaagtacccaggtttacttgggtggcatgccagagtcgcgacaagcacgaggatccactttgtctgcccagcagggctctcagttcaagggctgtgtgggagaggcaagggtgggcgatcttttactgccctacttctccatggcggaactgtattcgcgcaccaatgtttcagtacagcaaaaggctcaattccgtctaaatgccacacgacctgaggagggctgcatcctgtgcttccagtcagactgcaaaaatgacggcttctgtcaatctccttcagatgagtacgcctgcacctgtcagcctggattcgagggcgatgattgcggcacggacatcgacgagtgtcttaacacggaatgcttgaacaacggcacctgcatcaaccaggttgcagctttcttctgccagtgtcagccaggattcgagggtcagcactgtgagcaaaacatcgacgagtgtgcggatcagccgtgccacaacggtggcaactgcacggatcttatcgcatcgtacgtgtgcgactgccctgaggactatatgggcccgcagtgcgacgtgctgaagcaaatgacctgcgagaacgagccatgtcggaatggatcaacctgccagaatggattcagtaagtgaagccccatcattatgatacaattatttctttcaacgattattattcttctcgccttgcagatgcttctactggcaataactttacatgtacatgcgtgcccggcttcgagggtccactgtgtgacatacccttctgtgaaataacgccttgcgataacggtggcctctgcctgaccactggagcggtaagtggcctacaaatggaatactcaactgatcaattattcatcgaaacattctctttaggtaccgatgtgcaaatgtagtctgggatacactggtcgcctgtgcgagcaggacattaacgagtgcgaatcgaatccatgccagaacggtggtcagtgtaaggacctcgtcggcaggtacgagtgcgattgccagggcaccgggttcgagggcattcgctgtgaaaatgacatcgacgagtgcaacatggagggagattactgcggcggattgggccggtgtttcaacaagcccggatccttccagtgcatctgccagaaaccctattgcggagcctactgcaactttacggatccctgcaacgctacggacctctgctcaaacggcggtcgctgcgtagagtcctgcggcgccaaaccggactactactgcgagtgtccggaaggtttcgcgggaaagaattgcacagcaccggtaagttttcaaatgatacactacaaattcagtgaaagaaaaacaatatattgatttcttcgcttttttcagattacggccaaggaggacgggccttcgaccacagacattgccatcattgtaatacccgtagtggtggtgctgctgctgatcgcgggagccctcctgggcaccttcctggtgatggccaggaacaagcgagcaaccaggggcacctatagcccgagcgcgcaagagtactgcaacccacggctggaaatggacaacgtactgaagccaccgccggaagagcgactaatttagttttgagttttgagcatgaacgacgattagcaaagcaaacaaaagatatttttaaatccgcccatatacacctagctgtaggagtaactcaatgttttgtactaagttggcccctagttatggtttacatcttaaggtgctcaaagcaatagcagcagcagcagcagccaggcttccacctcgactcgtcccttatcccctgcctacgctttagttagttaataatgccgttgtctatttattctagtagtttagatgacatacgtaccgccctatagtcgttatgtagttatgttccgatagtttagattcagtattcgatttctcgtatatgtaatcctaaagctgcgaacaaagttgagctccgacgtcgatttcccctttgcattccacaaggaagcccatcaaatgtattgtatgagtatttttgtaaataagattgtttgccgactcttaaactaaattagctgagctaaaatcgaaattaaaaacagaaaatcctatatgcctatatatacgcgagtatatatatcagtaaatgtggccttataacaaaaaaaaatatagtaacgaaaagcaatgacaactagaacagaaaaagtattggttaagtaaatcaaataaaaaacatattttgctctagagtatctaagcgtaaacttaagagactgtactatataataaatataaaatatttcgactttttccaatcaattgcctattcaattatccagttaaagacacacggcaaactatatataaaaatcgttttctttttttcatttgtagcaactattgctaaatttattcgtcagctttaccatgacgtgtatcttatggtttgaatgcaaccaaattcgcaggaccaacaaagttaagttatgtttatcatgtatgtgagcgagcttctaatgactaatacacatgtttataattataagcagtaggatgaatgcaaataataatgaagattaaataggtaaggtatacaactcggtgtatatagatagaaaaaactccaagctcgcctaatcatacactcgaaatagagtacatttgctaaatatcatttgaacgaaagtgcagtccacattagcccaaagatgccacccacttgaatttgctctgcatctcaggatggtagaagatgcactccagcttgtttacgcagttcttgccgaagcggcagggcttgggatgatagaaggtgcagcccagcttggaacaattcggatagtacttgcacatggtagtcgcagtcgtggatgtaacaggagccgatatcgacttgtagttctgcactgggatgacgtgagaggctgtaaattaaaaaaaaagtttgtgagtttgtaaaattaaatacaaaggctatcaacttacatagtggtggagcagcaagctggacatggcttagatccctttgaccgccatgggcgtagttgcagtctatgctcatgcaggccatgtcgaatttgcacttcggatgcgagtacatgcacttgtccgcgaatttgcagttggggaaagacttgcacggcgccgttggatgatagtactcacagaa

SEQ ID NO: 13742 - DNA, 7216 bp, DROSOPHILA
aaaaaaaataaaaataacctgttctaagccaagtgccgattgcgcgcgtgtgtgtgtgtgcgtatgagtgtttgcgtggagcagagagaagggagaatgcaattaccaacaacaacaagctcaatgagtatcgtttgaatagcaataatatctagccaaaagcaaccctttccaatacgaaaactcgacttgagccaacaaatcagcgatcatggctaaaatcgccaatgcgtcactgtcgcaacaacaaaaacagcggcaagcagaaacagcaacgaccacaacaacaacagtggcggcatcagtagaaacagcaacaacaacagcaagaagtcgagaccgcacgaaaagcgcagctcaaattacgtcgcatttgctcaagcgcgccatttcagtttattcgtcgcctcaatggataccgctcttcatacttatttacttagcaacagatgtcgcctcagtggcggtgccgacgaaggaggcgtactttaatggctccacttacctccgcctcaccacgccgatgcccatttgggatcactcggcgattagtttccgctcgtgccgcggcggcgagatcctcgcccagcagtacaacaagaactccattgtaatctcagtgctcaatgactttctgcaaatctcactggctggacccgccgtccatgggcccaacaaccggctggatgtcaagctgccctaccaactgctggacaaccgctggcatacgctgcagttcaagtacgagtacggaaatctctacctgcatgtggatcgcgcggcaagcatatttgccaactccacgtacaacagtcagttcctgactaaccaggacattggctacaaggacgccatcttgatactgggaaactccttctccggttgccttctggatggaccaggtctgcaatttgtgaacaactcgacggtgcagaatgtggtctttggtcactgtcccttgaccccgggtccctgcagcgatcacgatcttttcactcgactgccagacaacttttgtctgaatgatccctgtatgggccatggaacctgctcgtccagtccagagggatacgaatgtcggtgcacggcacgttactcgggaaaaaattgccagaaggacaatggctcgccgtgtgccaaaaatccatgtgagaacggtggttcctgcctggagaattcccgaggggattaccagtgcttctgtgatcccaaccacagtggtcagcactgcgagacggaggtgaacatccacccactctgccagacgaacccctgcctgaacaatggagcatgtgtggtgattggcggcagtggagcactcacctgcgagtgtcccaaaggatacgctggtgccaggtgcgaggtggacacggatgagtgcgcctcacagccgtgtcagaacaacggaagctgcatagaccgtatcaatggattcagctgcgattgcagcggcaccggttacacgggtgcgttctgccagacgaatgtggatgagtgcgacaagaatccgtgcctgaacggcggcagatgcttcgatacctacggatggtacacctgccagtgtctggatggttggggcggcgagatttgtgatcgacccatgacatgccagacgcagcagtgtttgaacggtggcacctgcctggacaagcccatcggcttccagtgcctctgtccgccggagtacactggtgaactgtgccaaatcgcacccagttgcgcacagcagtgccccatcgattcggagtgcgtaggcggcaaatgcgtttgtaagccaggctcatcgggttacaactgtcaaacgagcacgggcgatggagcttctgctttggccctgacacccatcaactgcaatgccaccaatggaaagtgtctcaatggaggaacttgctccatgaacggaacccactgctattgcgccgtcggctattcgggagatcgttgcgagaaggccgagaactgttcgccactgaactgccaggaaccgatggtatgtgtccagaatcagtgcctctgcccggagaacaaggtgtgcaaccagtgcgccacacaaccgtgccagaatggcggtgaatgtgtggacctaccgaatggagactacgagtgcaagtgcacccgtggatggactggacgcacctgtggcaacgacgtggacgagtgcaccctgcatccgaagatctgcggcaatggtatctgcaagaacgagaagggatcgtacaaatgctactgtacgcctggatttaccggagtccactgcgattccgatgtggacgaatgccttagctttccctgcctcaacggagccacgtgccacaacaagataaatgcctacgagtgcgtttgccaaccaggatatgagggagagaactgcgaagtagatatcgatgagtgcggcagtaatccctgctcgaacggatccacctgcatcgacaggatcaacaacttcacctgcaactgcattccgggaatgacgggccgcatatgtgacatcgacattgacgactgtgtgggagatccctgcttgaatggtggtcagtgcatcgaccaattgggtggcttccgttgtgactgcagtggcaccggttatgagggcgagaattgtgagctgaacatagacgaatgcctctcgaatccgtgcacgaatggtgccaagtgcctggacagggttaaggactacttctgcgattgccacaacggctacaagggaaagaactgtgagcaggacatcaacgagtgcgagagtaatccctgccagtacaatggcaactgcctagagcgttcgaacataacgctttaccaaatgagtaggatcacggatctgcccaaggtgtttagccagccctttagctttgagaatgccagcggctacgagtgcgtctgtgtgcccggcatcattggaaagaactgcgagatcaacattaatgagtgcgacagtaatccatgcagcaagcacggaaattgcaatgacgggattggaacctatacctgcgaatgcgaacctggcttcgagggcacccactgtgagatcaacatagatgaatgtgatcgctataatccctgccagaggggcacttgctatgaccagatagacgactacgactgcgactgcgatgcgaactatggaggcaaaaactgttccgttcttctcaaaggctgtgaccagaatccttgtttaaatggcggtgcctgcttgccgtatttgatcaacgaggtaactcatctgtacaactgcacctgcgagaacggcttccagggcgataaatgcgagaagaccaccactctgtccatggtggccactagcctgatttcggttaccacggaacgcgaggaaggctacgacattaatcttcaatttaggaccacactgcccaacggagttttggctttcggaaccaccggcgaaaagaatgaaccagttagctatattttggagctgattaatggacgactgaatctacattcctcgctcctaaataagtgggagggcgtgtttattggatcgaagctgaacgatagcaactggcacaaggtgtttgtggccataaacacttcgcatctagtcctttcggccaacgacgagcaggctatttttccggttggctcctatgaaacggccaataatagccagccttcattcccgcgcacatacctcggaggcaccattcccaatctgaagtcctatctgcgccacctcacccaccaaccatcagcttttgtgggctgcatgcaagatataatggtcaatggtaaatggatctttcccgatgagcaggatgcgaatatcagttataccaaactggaaaatgtccagagcggttgtccgcgcaccgaacaatgtaaaccgaatccttgccattcgaacggtgaatgcacggacctttggcacaccttcgcttgtcactgtcccagaccattctttgggcacacatgtcagcacaatatgactgctgccacttttggccacgagaacacaacccattcggccgtgattgtggagaccacagatgtggctaggcgagctattagatccatcctagacatttccatgtttattcgtacacgcgagccaactggtcaagtcttttacttgggcactgatccacgcaaagcccccactaaaaatattggcgactcatatgtggccgccaaattacacggcggcgagctgctggtaaagatgcagttcagcggtactccggaggcctacaccgttggtggccagaaattggacaacggctataaccacctgatcgaggtggtgcgcaatcaaacgctcgtgcaggtcaagctcaatggcaccgagtacttccgcaagacgctgtccacgacgggtctgctggacgcacaggtgctttacttgggcggacctgcacccacacgcgagtcacttctgggcgcgaccacagaaccaggaataattccagttccgggagcaggaatacccattgaagacacaacagtgcccaaggaggcggacgacagcagggactactttaagggcataatccaggacgtgaaggttagcaatggctcgctcaacctgattgtggagatgtattccctaaacgtgacagatgtccaagtgaatgccaaacctctgggcgctgtaaccatcgatcgtgcctccgtgttacctggtgaggtgtccgatgatctgtgccgaaagaatccctgcctccataatgccgagtgcaggaacacatggaatgactacacttgcaaatgcccaaatggttacaagggaaagaactgccaggagatcgaattttgccaacacgttacatgtccgggacagagcttgtgccaaaatctggacgatggctatgagtgtgttacgaacaccacatttactgggcaggaacgcagtcctctcgccttcttctacttccaggagcagcaatctgacgatattgtcagtgaagcgtctcccaagcaaactcttaaaccggtaattgatattgccttccgcactcgtgctggaggtactctcctgtacatagacaatgtggacggattctttgaaattggagtaaacggaggacgagtgaccatcacctggaagctaagtgcactgcattttggcgagtctgcacgctttgagaaggagaacactgacggagaatggagtcgcatttacctcagggcacacaacagcaaactggagggtggatggaagggatgggaatcgatggtggatccgacgccagctttttccacggacatcgaccaagcggcctttcagtccctgatcgctacaagtacccaggtttacttgggtggcatgccagagtcgcgacaagcacgaggatccactttgtctgcccagcagggctctcagttcaagggctgtgtgggagaggcaagggtgggcgatcttttactgccctacttctccatggcggaactgtattcgcgcaccaatgtttcagtacagcaaaaggctcaattccgtctaaatgccacacgacctgaggagggctgcatcctgtgcttccagtcagactgcaaaaatgacggcttctgtcaatctccttcagatgagtacgcctgcacctgtcagcctggattcgagggcgatgattgcggcacggacatcgacgagtgtcttaacacggaatgcttgaacaacggcacctgcatcaaccaggttgcagctttcttctgccagtgtcagccaggattcgagggtcagcactgtgagcaaaacatcgacgagtgtgcggatcagccgtgccacaacggtggcaactgcacggatcttatcgcatcgtacgtgtgcgactgccctgaggactatatgggcccgcagtgcgacgtgctgaagcaaatgacctgcgagaacgagccatgtcggaatggatcaacctgccagaatggattcaatgcttctactggcaataactttacatgtacatgcgtgcccggcttcgagggtccactgtgtgacatacccttctgtgaaataacgccttgcgataacggtggcctctgcctgaccactggagcggtaccgatgtgcaaatgtagtctgggatacactggtcgcctgtgcgagcaggacattaacgagtgcgaatcgaatccatgccagaacggtggtcagtgtaaggacctcgtcggcaggtacgagtgcgattgccagggcaccgggttcgagggcattcgctgtgaaaatgacatcgacgagtgcaacatggagggagattactgcggcggattgggccggtgtttcaacaagcccggatccttccagtgcatctgccagaaaccctattgcggagcctactgcaactttacggatccctgcaacgctacggacctctgctcaaacggcggtcgctgcgtagagtcctgcggcgccaaaccggactactactgcgagtgtccggaaggtttcgcgggaaagaattgcacagcaccgattacggccaaggaggacgggccttcgaccacagacattgccatcattgtaatacccgtagtggtggtgctgctgctgatcgcgggagccctcctgggcaccttcctggtgatggccaggaacaagcgagcaaccaggggcacctatagcccgagcgcgcaagagtactgcaacccacggctggaaatggacaacgtactgaagccaccgccggaagagcgactaatttagttttgagttttgagcatgaacgacgattagcaaagcaaacaaaagatatttttaaatccgcccatatacacctagctgtaggagtaactcaatgttttgtactaagttggcccctagttatggtttacatcttaaggtgctcaaagcaatagcagcagcagcagcagccaggcttccacctcgactcgtcccttatcccctgcctacgctttagttagttaataatgccgttgtctatttattctagtagtttagatgacatacgtaccgccctatagtcgttatgtagttatgttccgatagtttagattcagtattcgatttctcgtatatgtaatcctaaagctgcgaacaaagttgagctccgacgtcgatttcccctttgcattccacaaggaagcccatcaaatgtattgtatgagtatttttgtaaataagattgtttgccgactcttaaactaaattagctgagctaaaatcgaaattaaaaacagaaaatcctatatgcctatatatacgcgagtatatatatcagtaaatgtggccttataacaaaaaaaaata

SEQ ID NO: 13743 - protein, 2146 aa, DROSOPHILA
MAKIANASLSQQQKQRQAETATTTTTTVAASVETATTTARSRDRTKSAAQITSHLLKRAISVYSSPQWIPLFILIYLATDVASVAVPTKEAYFNGSTYLRLTTPMPIWDHSAISFRSCRGGEILAQQYNKNSIVISVLNDFLQISLAGPAVHGPNNRLDVKLPYQLLDNRWHTLQFKYEYGNLYLHVDRAASIFANSTYNSQFLTNQDIGYKDAILILGNSFSGCLLDGPGLQFVNNSTVQNVVFGHCPLTPGPCSDHDLFTRLPDNFCLNDPCMGHGTCSSSPEGYECRCTARYSGKNCQKDNGSPCAKNPCENGGSCLENSRGDYQCFCDPNHSGQHCETEVNIHPLCQTNPCLNNGACVVIGGSGALTCECPKGYAGARCEVDTDECASQPCQNNGSCIDRINGFSCDCSGTGYTGAFCQTNVDECDKNPCLNGGRCFDTYGWYTCQCLDGWGGEICDRPMTCQTQQCLNGGTCLDKPIGFQCLCPPEYTGELCQIAPSCAQQCPIDSECVGGKCVCKPGSSGYNCQTSTGDGASALALTPINCNATNGKCLNGGTCSMNGTHCYCAVGYSGDRCEKAENCSPLNCQEPMVCVQNQCLCPENKVCNQCATQPCQNGGECVDLPNGDYECKCTRGWTGRTCGNDVDECTLHPKICGNGICKNEKGSYKCYCTPGFTGVHCDSDVDECLSFPCLNGATCHNKINAYECVCQPGYEGENCEVDIDECGSNPCSNGSTCIDRINNFTCNCIPGMTGRICDIDIDDCVGDPCLNGGQCIDQLGGFRCDCSGTGYEGENCELNIDECLSNPCTNGAKCLDRVKDYFCDCHNGYKGKNCEQDINECESNPCQYNGNCLERSNITLYQMSRITDLPKVFSQPFSFENASGYECVCVPGIIGKNCEININECDSNPCSKHGNCNDGIGTYTCECEPGFEGTHCEINIDECDRYNPCQRGTCYDQIDDYDCDCDANYGGKNCSVLLKGCDQNPCLNGGACLPYLINEVTHLYNCTCENGFQGDKCEKTTTLSMVATSLISVTTEREEGYDINLQFRTTLPNGVLAFGTTGEKNEPVSYILELINGRLNLHSSLLNKWEGVFIGSKLNDSNWHKVFVAINTSHLVLSANDEQAIFPVGSYETANNSQPSFPRTYLGGTIPNLKSYLRHLTHQPSAFVGCMQDIMVNGKWIFPDEQDANISYTKLENVQSGCPRTEQCKPNPCHSNGECTDLWHTFACHCPRPFFGHTCQHNMTAATFGHENTTHSAVIVETTDVARRAIRSILDISMFIRTREPTGQVFYLGTDPRKAPTKNIGDSYVAAKLHGGELLVKMQFSGTPEAYTVGGQKLDNGYNHLIEVVRNQTLVQVKLNGTEYFRKTLSTTGLLDAQVLYLGGPAPTRESLLGATTEPGIIPVPGAGIPIEDTTVPKEADDSRDYFKGIIQDVKVSNGSLNLIVEMYSLNVTDVQVNAKPLGAVTIDRASVLPGEVSDDLCRKNPCLHNAECRNTWNDYTCKCPNGYKGKNCQEIEFCQHVTCPGQSLCQNLDDGYECVTNTTFTGQERSPLAFFYFQEQQSDDIVSEASPKQTLKPVIDIAFRTRAGGTLLYIDNVDGFFEIGVNGGRVTITWKLSALHFGESARFEKENTDGEWSRIYLRAHNSKLEGGWKGWESMVDPTPAFSTDIDQAAFQSLIATSTQVYLGGMPESRQARGSTLSAQQGSQFKGCVGEARVGDLLLPYFSMAELYSRTNVSVQQKAQFRLNATRPEEGCILCFQSDCKNDGFCQSPSDEYACTCQPGFEGDDCGTDIDECLNTECLNNGTCINQVAAFFCQCQPGFEGQHCEQNIDECADQPCHNGGNCTDLIASYVCDCPEDYMGPQCDVLKQMTCENEPCRNGSTCQNGFNASTGNNFTCTCVPGFEGPLCDIPFCEITPCDNGGLCLTTGAVPMCKCSLGYTGRLCEQDINECESNPCQNGGQCKDLVGRYECDCQGTGFEGIRCENDIDECNMEGDYCGGLGRCFNKPGSFQCICQKPYCGAYCNFTDPCNATDLCSNGGRCVESCGAKPDYYCECPEGFAGKNCTAPITAKEDGPSTTDIAIIVIPVVVVLLLIAGALLGTFLVMARNKRATRGTYSPSAQEYCNPRLEMDNVLKPPPEERLI

SEQ ID NO: 13744 - DNA, 6782 bp, DROSOPHILA
cggccagcgcatctggctgtaatgatgccagtgtagaggacgccaacgcccgcatctgccacaccagccacacggaaccctgcgcccaatccatgacaggcactctgggtctctttgtcgccctgtcactgcactcggccatcgaaggactcgccatcggcgttcagaactcttccacaaaggtctgtgccgcctgccttgacatagttagactagatcggctatagtgcgcaatcttaggcaaatattgaagcaaagagatgcgagggcttagtccaattagataaccggaatctgctttgtctcgtcgtaggttctgtttcttctaggggccgtcgcctgccacaagttcgtgatgggcttttgtctggggctcgagttccgctcgaatccgcagacgagttttcgcgcccagttcgtcggcatttcggtgtttgccctgggcgccgtcattggcattggcctgggcatgcttatcgtggacgtgcccgccgcttggtccagcaaaactctgcctatcgtccaagctctggccggaggcacactcttctacgtcaccgtctgcgaggtgataccgcgcgagaaggcgcgctggcactcgaactcaacgcgacgctgggcgggatttgcacagtttgcaactgtgctcgccggctttgcgaccatgtgcatcataaacttttatctttctggtgcgtagcattatgtgatttgcatttccctttcgacattgctgacctattttcttcgcgccttttcagatgaggattagacatcttttcgttgagaaatcgtttcagcgctgtgagaaaatgtgccgctttttaaacttagaacacttaggataatattatggattggcagctgttaatctcttgtgtaagacttgttacttgtgcatttccaactaatcttgttttaggtacattgtcgatctgccgtaggataagtaaaaagttcagtcttctcgtctacatttatattttctctttctccaaagtttgtgttattttttatgcttttattatatgtaataaaccttacaattaagttgttaatcaaaaaaagggcatcctcttttccttttgattaatcttacttagccaaccattaaacgcaatcattttattactttctggggacatcatgtcactgttttaaacgaattaaaacaacatctatgtaactacatctctatatgtatgtaaataggcatatgtgtatatatatatatagtgtttacctaatcgtgaaatgttgcttggttgctctattggtggtgtatgtgtgaagaaacggacactcataaatagctaaatgttgggttgtttggtctctgatctctcatttaaggtcatttggggaactcctcttagatttacgattttcatgctagcagggcaacatacttgggatgggaggggatttacaattacgtgagatgagtagattagatcttatacacttaaaccagtgcatatgcatatcttatcattcaccttgatcttcattaacaatttaatttacaatagaaaccgaaaattcgcgccgagctcaggtgcgtttatctgctgacctgcgttgaatcgccaaacttagaacataaataaatctagtaattatagctcctccttcgccgccgcactaaccccattctcatcctcgtcctcatcgtcgtcaccccattcgctaatgaggctcttgaccttgtccacgctggctgcttcacctgacgttgcttcatcacctgcttttgcactttctagtgtcggcttttctgcagtggttacatcctgtgtctggtttggtttgtcctcgacggcttccttctcgtctgccgttctagtatcttcattattttcggctgctttttccgctgctggttcatcaatctccatttgttcggtagatacctgcgtaggtggcaccaggtcatcctcgtccgttactgacctatctaacgcctctgtcgtcgcattctcttcagattgaacaatgtccttctcctgatcaggtttctcggcctcggcaattaactcatctagcagctctttgcgtatgttatcggcctctagatgcacatcatcctcgccctcagaggcagttaccgcctctcttaattccgccacggaatcggaatgcggaattggtgaatcctctttgataaattcctcttgatcgttttcaagctcagcctctttcttgatctggacctcggccttcgaagccttctcgtccgccgcttctgagtccacatccattttctcgggctgactatttatattggggactgcgtcaactgcatcgtccgcactggtgacagactcctcacttgccttttcttcagttgcctcttcgggtcccttgtgtagagactggagagccaagtcaatatcatcttcttcctcgtgtactgttggctcagggtccttgttggctagttcggatgcaagctctgcggtagcgggcttatcgtcgacatcgtcatcgttctcatcctccgtccagtcgccggtaagctcctttagcttttcactaatgtcatctcgcggcttatccgattttggctgtaagttgtatgactcatgttgtagatgtacttgcataaaagtgtttaataaactcacctccttgttgctctgttcttcagactcggctataaggttttcggcccattccaggttgtcaatggactctttgctttcatcagcaatgttctttttggcgctctccacagagtcggcagcacccagttcgctatagatttgactgtcatcatattcctcttcggtgccggccagggatttttcatcggtctcctgcttgacgtgctccgcttctggctcactgagcaccattaccacaccgccggcagtggcgcctgcttgctgctggttaagctgtgagagaatctctttgcgctgctcatcagtaagctccacctcattgccatcggcgcccacgaatttgacttcctgctgcacctgttcaacatcttcctcttgcagttgctcctgttgagcttgctgcactgtgatggcactggtggctggtagacttatgtccgaaaggattcgcactttgccagtctgctctggttcctgctcttcgtctccttcggcctcttcctcctcgtcttgcgagccgaggaattcttcgtccgtttcatcgataatgccatcctccaaagcctgctccttgtggtagctcttcatgtgtctgtacagctgcagctcttgctcgaacaccttgttgcagtagatgcactgctgcttgttgtcgtccgtgtgcacctcgtttatgtgcgcctccaactcacccttggtccggtaagactggttgcatagcgcgcactcggcaaacgtatacagcagcgacttggtctggtgctccatatacatgtggaaatgcagttcccggttgttgacagacctccacccgcaatgctcacaaagcgccggatcaattgtctccttgtgcgtgttgatcagatggcgtcggaagcctcggtacgacggaatgctaatgggtcgtccgtttacgccgcatctcaggcacagccagggccctgaaatatagatattcattagtagttgtttttgggaacctattacctacaaatgttgtactcaccagtagtattctctgctccctgagcgatcaaggcgtgcattgtcttactatcaatgcgtctcttctgggctgcggctgtatttgctggtggattcgccccggttccctggttaccggttgtctgcgaggttcccgacttttgctgagagctagccgccttctgttgtgctgtgattagtggcgtactcttgtcggctttgaaagaaacgtgcagtttcttgtgtggcgatgtagttgcggatgactggttcgccgggggttttactgtcgctggagcagatttttcggtcggcgctgccggggtattgggcataatctttagctttatgtttttgtggccctttacaatgtgcggatactggcgcaagacttcggcaatgatcttggtgtgattcagcttggcgttggaggagtccttgacaattattgttggggtctggctgggtgagtcctgtttcaagataatggtggtggatccatgttctagttgggtctgtgtaccctgtggggattgctgcttagatgtagatggctgcggtggcatatcatcgtcatcatcgtccccggcatggacatcatcataaagcattcctccatcgtactcaggatcgttatctccgtactcagcggcgatttgctttcgcatccgttgttgctcagcgaattccttaacctcttccaaactgggcttcttggatggcggcgatagcaggcttgtctgtgctggtctcttgttattgttataaccctttcgcagctgctcgaatggtgacgttggctcctgcttcacattgctactatctccatacggcgaacgatttgagccacctgatgttcggctcattgtgttgccagttgacccgcgctgtgtgttggctcgttgcgcgatgggtgtggctacgtttcgcgattgcggcgaaggacccaagacgcgctgttgtggaagacccgaactgggctgtccaactgtgcgccggcgtattccctttggactaggcggctaaagaaaataaaaggttacaaaatattttcacaaatgatgaattgccaccactcaccctttgctggcgattaacgttctccatggtgcgacggtgcgcctctagcagcttcaacagcaccgtcatgttcatttccttggcggtgcgcaacagcttgccgtacattttaagctcaaactccagggtgcctgtgtacatgaagttgacaatgggcaccaccacgtccgcctggaactcgttgggcatgatgagggcatcgtcgacgatctcgcaggtctgctccagtacattgaagtagtcggtgcaggcgctgagcaccagacggtgtacctttagctgtgaattgtcccgaaactgcagcgtcaaatcgcagtaatccgttttattaaagaagttctgcagcttctgcaggaagaagactccccagttgtccactttcacggacttgacttcacccatattgctgtgtgcttggctagtggccgtgctctccgtttccgtatccttatcgttagcctccccgtggtttcgcttgctctggcttcagggcgcaactgtactcacgcaggggtaaggagtcggaaaaagcgtattgggatgggacgcaggtgaatgggtaaaacaagaaagaataacaattagtaagtatggtatattccgctgttagtttcaaatagacgcccgttgattttgggttattcggtttattttgctctgccgccacggcgcgaaatgcaactcgcaaatatcgatatacgcctgtgtacgtgtgacagtttcgcgggcgtatgtgtgcgatgtgcgcgtcgccaggcttcttgtattatttatcagtaattgttcattgtccgcaattctgcaatgttttcttgtaagtccaactttggcatctttcggtgggtggcattttttgagcccttttggcgcgcctgtccacttcacacaacaatggtttttttggggcacgcacaaatcactttgacctcagcggcttgtttactgcgtgtcctttgattgaatgtacttttttcagacaatcgccgcacaattgcacttttaatacatacatttctttgaattgcacactacttttgccggacaaattataatttttttccagagtcaggtcgccatattcttttccattcatcgttggcgtgacagggttgcgctcggcagctatcgatagccatgcgataacctcagtctcatgcttaacatttttaaggtgacgtaaacgcagatgaagttaatcgttaagtctaaaaatatttgaatatgatatactttaaggttattgcagtttaagctaaatcttactaaacacaatacatatacttaaaatactttaataaatattgttttgcagttgaaaacaaaatacatttacttaaactattgaaattttgaaaagtgacatcgtaatgtgtcacatttcttgcgccacccttctttgcaatcaaaatatataaaacgggtcgtcggcttggccaccacgagacgttaaaaacactttgattcttttttgctttgataaagttttaaaccaaaacataatgagtggacggaaccgcggcaaaggaaagaagggtggaggaggaccctaccgcaatgtcaaagcgaatcacaattgtgcccgcagctttgctcagcaggccaacgagctggccagcagcagtagcagcgaaaatgaaagttccgactcggaatcctcgggagatggagcccaaaatgatctcggccagccgccggagtttgcggtggccatgtgggacctcaaccactgcgatccaaagaagtgttcgggcaggaaactggcacgcctaggactcatttcaaatcttcgactgggtcagaagtttcctggccttgtcctctcgcccgttggccagttgtgtgtaagtccgctggatcgcgatgtggtggcctcttcgggcgtggccgtgatcgactgctcgtgggccaagctggacgagacgccctttggaaggatgcgcagcccacatccgcgactgctgcccttcttggtggccgccaatcccatcaactacggaaagccctgcaagctcagctgcgtggaggccatagccgccactctatacatctgtggattcacggaagaggctcgctggtttctgggcaagttct

SEQ ID NO: 13745 - DNA, 4086 bp, DROSOPHILA
gaatggaaaagaatatggcgacctgactctggaaaaaaattataatttgtccggcaaaagtagtgtgcaattcaaagaaatttgcgccctgaagccagagcaagcgaaaccacggggaggctaacgataaggatacggaaacggagagcacggccactagccaagcacacagcaatatgggtgaagtcaagtccgtgaaagtggacaactggggagtcttcttcctgcagaagctgcagaacttctttaataaaacggattactgcgatttgacgctgcagtttcgggacaattcacagctaaaggtacaccgtctggtgctcagcgcctgcaccgactacttcaatgtactggagcagacctgcgagatcgtcgacgatgccctcatcatgcccaacgagttccaggcggacgtggtggtgcccattgtcaacttcatgtacacaggcaccctggagtttgagcttaaaatgtacggcaagctgttgcgcaccgccaaggaaatgaacatgacggtgctgttgaagctgctagaggcgcaccgtcgcaccatggagaacgttaatcgccagcaaaggccgcctagtccaaagggaatacgccggcgcacagttggacagcccagttcgggtcttccacaacagcgcgtcttgggtccttcgccgcaatcgcgaaacgtagccacacccatcgcgcaacgagccaacacacagcgcgggtcaactggcaacacaatgagccgaacatcaggtggctcaaatcgttcgccgtatggagatagtagcaatgtgaagcaggagccaacgtcaccattcgagcagctgcgaaagggttataacaataacaagagaccagcacagacaagcctgctatcgccgccatccaagaagcccagtttggaagaggttaaggaattcgctgagcaacaacggatgcgaaagcaaatcgccgctgagtacggagataacgatcctgagtacgatggaggaatgctttatgatgatgtccatgccggggacgatgatgacgatgatatgccaccgcagccatctacatctaagcagcaatccccacagggtacacagacccaactagaacatggatccaccaccattatcttgaaacaggactcacccagccagaccccaacaataattgtcaaggactcctccaacgccaagctgaatcacaccaagatcattgccgaagtcttgcgccagtatccgcacattgtaaagggccacaaaaacataaagctaaagattatgcccaataccccggcagcgccgaccgaaaaatctgctccagcgacagtaaaacccccggcgaaccagtcatccgcaactacatcgccacacaagaaactgcacgtttctttcaaagccgacaagagtacgccactaatcacagcacaacagaaggcggctagctctcagcaaaagtcgggaacctcgcagacaaccggtaaccagggaaccggggcgaatccaccagcaaatacagccgcagcccagaagagacgcattgatagtaagacaatgcacgccttgatcgctcagggagcagagaatactactgggccctggctgtgcctgagatgcggcgtaaacggacgacccattagcattccgtcgtaccgaggcttccgacgccatctgatcaacacgcacaaggagacaattgatccggcgctttgtgagcattgcgggtggaggtctgtcaacaaccgggaactgcatttccacatgtatatggagcaccagaccaagtcgctgctgtatacgtttgccgagtgcgcgctatgcaaccagtcttaccggaccaagggtgagttggaggcgcacataaacgaggtgcacacggacgacaacaagcagcagtgcatctactgcaacaaggtgttcgagcaagagctgcagctgtacagacacatgaagagctaccacaaggagcaggctttggaggatggcattatcgatgaaacggacgaagaattcctcggctcgcaagacgaggaggaagaggccgaaggagacgaagagcaggaaccagagcagactggcaaagtgcgaatcctttcggacataagtctaccagccaccagtgccatcacagtgcagcaagctcaacaggagcaactgcaagaggaagatgttgaacaggtgcagcaggaagtcaaattcgtgggcgccgatggcaatgaggtggagcttactgatgagcagcgcaaagagattctctcacagcttaaccagcagcaagcaggcgccactgccggcggtgtggtaatggtgctcagtgagccagaagcggagcacgtcaagcaggagaccgatgaaaaatccctggccggcaccgaagaggaatatgatgacagtcaaatctatagcgaactgggtgctgccgactctgtggagagcgccaaaaagaacattgctgatgaaagcaaagagtccattgacaacctggaatgggccgaaaaccttatagccgagtctgaagaacagagcaacaaggagccaaaatcggataagccgcgagatgacattagtgaaaagctaaaggagcttaccggcgactggacggaggatgagaacgatgacgatgtcgacgataagcccgctaccgcagagcttgcatccgaactagccaacaaggaccctgagccaacagtacacgaggaagaagatgatattgacttggctctccagtctctacacaagggacccgaagaggcaactgaagaaaaggcaagtgaggagtctgtcaccagtgcggacgatgcagttgacgcagtccccaatataaatagtcagcccgagaaaatggatgtggactcagaagcggcggacgagaaggcttcgaaggccgaggtccagatcaagaaagaggctgagcttgaaaacgatcaagaggaatttatcaaagaggattcaccaattccgcattccgattccgtggcggaattaagagaggcggtaactgcctctgagggcgaggatgatgtgcatctagaggccgataacatacgcaaagagctgctagatgagttaattgccgaggccgagaaacctgatcaggagaaggacattgttcaatctgaagagaatgcgacgacagaggcgttagataggtcagtaacggacgaggatgacctggtgccacctacgcaggtatctaccgaacaaatggagattgatgaaccagcagcggaaaaagcagccgaaaataatgaagatactagaacggcagacgagaaggaagccgtcgaggacaaaccaaaccagacacaggatgtaaccactgcagaaaagccgacactagaaagtgcaaaagcaggtgatgaagcaacgtcaggtgaagcagccagcgtggacaaggtcaagagcctcattagcgaatggggtgacgacgatgaggacgaggatgagaatggggttagtgcggcggcgaaggaggagctataattactagatttatttatgttctaagtttggcgattcaacgcaggtcagcagataaacgcacctgagctcggcgcgaattttcggtttctattgtaaattaaattgttaatgaagatcaaggtgaatgataagatatgcatatgcactggtttaagtgtataagatctaatctactcatctcacgtaattgtaaatcccctcccatcccaagtatgttgccctgctagcatgaaaatcgtaaatctaagaggagttccccaaatgaccttaaatgagagatcagagaccaaacaacccaacatttagctatttatgagtgtccgtttcttcacacatacaccaccaatagagcaaccaagcaacatttcacgattaggtaaacactatatatatatatacacatatgcctatttacatacatatagagatgtagttacatagatgttgttttaattcgtttaaaacagtgacatgatgtccccagaaagtaataaaatgattgcgtttaatggttggctaagtaagattaatcaaaaggaaaagaggatgccctttttttgattaacaacttaattgtaaggtttattacatataataaaagcataaaaaataacacaaa

SEQ ID NO: 13746 - protein, 1096 aa, DROSOPHILA
MGEVKSVKVDNWGVFFLQKLQNFFNKTDYCDLTLQFRDNSQLKVHRLVLSACTDYFNVLEQTCEIVDDALIMPNEFQADVVVPIVNFMYTGTLEFELKMYGKLLRTAKEMNMTVLLKLLEAHRRTMENVNRQQRPPSPKGIRRRTVGQPSSGLPQQRVLGPSPQSRNVATPIAQRANTQRGSTGNTMSRTSGGSNRSPYGDSSNVKQEPTSPFEQLRKGYNNNKRPAQTSLLSPPSKKPSLEEVKEFAEQQRMRKQIAAEYGDNDPEYDGGMLYDDVHAGDDDDDDMPPQPSTSKQQSPQGTQTQLEHGSTTIILKQDSPSQTPTIIVKDSSNAKLNHTKIIAEVLRQYPHIVKGHKNIKLKIMPNTPAAPTEKSAPATVKPPANQSSATTSPHKKLHVSFKADKSTPLITAQQKAASSQQKSGTSQTTGNQGTGANPPANTAAAQKRRIDSKTMHALIAQGAENTTGPWLCLRCGVNGRPISIPSYRGFRRHLINTHKETIDPALCEHCGWRSVNNRELHFHMYMEHQTKSLLYTFAECALCNQSYRTKGELEAHINEVHTDDNKQQCIYCNKVFEQELQLYRHMKSYHKEQALEDGIIDETDEEFLGSQDEEEEAEGDEEQEPEQTGKVRILSDISLPATSAITVQQAQQEQLQEEDVEQVQQEVKFVGADGNEVELTDEQRKEILSQLNQQQAGATAGGVVMVLSEPEAEHVKQETDEKSLAGTEEEYDDSQIYSELGAADSVESAKKNIADESKESIDNLEWAENLIAESEEQSNKEPKSDKPRDDISEKLKELTGDWTEDENDDDVDDKPATAELASELANKDPEPTVHEEEDDIDLALQSLHKGPEEATEEKASEESVTSADDAVDAVPNINSQPEKMDVDSEAADEKASKAEVQIKKEAELENDQEEFIKEDSPIPHSDSVAELREAVTASEGEDDVHLEADNIRKELLDELIAEAEKPDQEKDIVQSEENATTEALDRSVTDEDDLVPPTQVSTEQMEIDEPAAEKAAENNEDTRTADEKEAVEDKPNQTQDVTTAEKPTLESAKAGDEATSGEAASVDKVKSLISEWGDDDEDEDENGVSAAAKEEL

SEQ ID NO: 13747 - DNA, 5592 bp, DROSOPHILA
ggcagtccattcaagaggatctggttttgaatcttctgcatcctgacatggtactttatgccagcctcgggcaagttttcgccaaaacgattctccagaaaggcagactccaccgtgtacatgccgcagacgatggcatccttgcagagcttctccaggcgcgcctggagcaatcgatagtggcgatacatggacattctcttggcaatcttaggctcatctagccagtagaattcgctgagtgtgtccatggcaaccaattgtatgccaggatcattgatgatcgcgtagcgggcgtcgattagcgacgtggaaacatcatcgtttgcaaaacagttgaggaatcgcacgcgactcatgcactcgcccgcaatctcggccagctgctcctccgtggggcatttcgcagcaatcacttcgccgacagagtacgccttcagctccatcctaatgctcttggccagagattcacggttgatcttgtgactcagattgatcagcaggacgctccactggcgaccaccgaatttgtagggcaccaggcagtgggccaccaactgttggagcaccaggcttttgccactgttccctgggccggagatctccaccagcgtatcggcttcaaagccgcaggagccaaaaacggcaaagtggagttgatgtgagcccattaggttaaatttacaaatttgcgccctggcataaacaaaggagttatcgattgtggcctttatcgatgacagccacctaaagttgaattgcgcagcgctgaaacatatttaacactaaatggaactagggcatatcgaatagttaaacaacagcagcaagcgtttcgttataactttcagttagcatttagacttatttgcgcacatacataaaaaaaatccattttcaccaccctgtgttatcgcccagccgcctatcgctgctggtgcctaatttagccctaacgcctgggcgatgatagaaaaaacggcataacgcgttcttaccagttgaacatcgttttctaccattttttgtttacgtttgcaccgcgaatattcgtgcacctgcactcgcaatttgctcaaagccagcggcgctttttcgccggcaagttgctccgcaccgagttaaagcatcactcaggcggacgagctggtgtactccagttagcttctcgccccagcacttgtaattgtcattatcggcggggcgcctttgatcattcagcggcatctcgaatccgaaccaaaagtggttcttttgttctctttctgctttgtggccacctttccgcgctccccgcttaccgcttcccgtctcccgcgccgtgctttttctttctggccacctagacacgtcaacagatttggaactttgtaactggaatctggaactgggcatcggaatcggaattagggagagatgcgcgtgagcaccatccgcagcggtcggatctgccggctggcattgtgcctgctggtactgctgccgctgctgtatctgctggccaactggagcgatcaccacaagcgcgtccaggaggcgtatcacacgcgcttcggcggacccaagttcgcccaccagcgattggagggcaggcccagggaggtgcccaagctggtcgatggtaagtggctacaggatcgaggatagcaatatcagcccttgaccaggataaagaataggattgtgtcacccataacgtgagccttgccattaagattcctcactcacgtattatacaattttattatggaggactatcatcagaactaaggatacagagtagttaccatatcattgttgaaaagaccgagttgtttgcttactgcaaacccagctaaagaattcagtaatctttgctttatatcacttaaaaccggcttttgctcgttttaaccaattaattacttgccatgtatgctacatagtattcaaagaagtctttattaccacgtttagcgtgagtaaagtatggttggaggttaaaggataaccttttccaacccatatcgtacagtctattcccagtctaacttacgagcccatttcaaatatttatcgcattctattatacattctccaaaaccggctttgtaatggccctaaccaaccaactatcaaattcggatagagtgagaaaataacctcataaaagtcatttttactgcacagccaccaaaactagtgtgtctttagtcttttgtatcaaatgctaattctagtcgtagaatattccatatgaccataagatggttagatgatggcatattattggtctgtaataccccgcctttatgcataagtctgaaattataacccacacctcctgcaagcgcatacagtgagtggctgggccaatatttaaacaattgctgtaagcttgcataggtaatttgcacgcgccacactcacaatttgtttttgcgtttttcaggccttggcaactttgagccgaaagatgtgaagccacgtagcgggcctggcgagaatggcgaggcccacagcctgtcgccggacaagaagcacatgtcggacgcctccgagatggagtacggcatgaacatcgcctgctccgatgagatatcgatgcaccgatcggtgcgggacacgcggctcgaagagtgccgccactgggactaccccttcgatctgccgcgcacgagcgtcatcattgtcttccacaacgagggcttctcggtgctgatgcgcaccgtgcactcggtcatcgatcgttcgcccacgcacatgctgcacgagatcatcctggtggatgacttctccgacaaggagaacctgcgcagccagctggacgagtatgtgctgcagttcaaggggctggtcaaggtcatcaggaacaaggagcgcgaaggtctcatccgaacgagatccaggggagccatggaggctacaggtgcgtatagcccatatctcatttatgtatattgttatgtgttcttgcataacttgcataactcatgacggcttatcgcatagttaaaagaacgtgttgtatggaaaacaatagttttatcttgagatgtttgcatcaaacgctgaaacgccagctatttggaatttgaattgaagataacttcacgttccgctttgtggcaatgataaacctttaaactgcagactcattgaatttcttttacattttctcagcataatagaattgcctatcattgcaattgaagcaagattatcgtcgatttcaaacaagccttttagcataaacagtatgcatagaaatttacaaattactattttaaagcatcatcctttaaatcatcatattaacccacaaccttataaatatccacacaaacactaaactgctttgcatcccgcaggtgaggtgatcgtcttcttggacgcccattgcgaggtaaacaccaactggctgccgcccttgctggcgcccatctaccgggatcgcactgtgatgacagtgcccattatcgatggcattgaccacaagaactttgagtaccggccggtttatggcacggacaaccacttccgcggcatcttcgaatggggcatgctgtacaaggagaacgaggtgccacgtcgcgagcagcgccgccgtgctcacaactcggaaccctatcgcagtcccacgcacgccggcggcctgttcgccatcaatagggagtacttcctggagctgggcgcctacgatccgggtctgctggtctggggcggcgagaacttcgaattgagcttcaagatctggcagtgtggcggcagcatcgagtgggtgccatgctctcgcgtgggtcacgtctatcgcggctttatgccctacaatttcggcaaactggctagcaagaagaagggtccattgatcacgatcaactacaagcgcgtcatcgagacgtggttcgacgacacgcacaaggagtacttctatacgcgcgagccgcttgcccgctacctggacatgggcgacattagcgagcaactggcgctgaagaagcgactgaactgcaagagcttccagtggttcatggaccacatcgcctacgatgtgtacgacaagttcccgggtctgccggccaacctgcactggggcgagctgcgctcggtggcctccgacggatgcctggactcgatgggccaccagccgccggccatcatgggcctcacatactgccatggaggcggaaataatcaactggttcggctcaatgccgctggccagttgggcgtcggcgagcgctgcgtggaggccgatcggcagggcatcaaactggccgtgtgtcgtctggggacagtcgacggtccttggcagtacaacgagcacacgaagcacctgatgcatcgcgtccacaagaaatgcatggccctgcatccggccacgcagcaattgtcattgggtcactgcgatgttaacgatagctaccagcagtggtggttcaaggagatacgcccacgctggtaagtccagcatgtttgggaggagcagcaggaggaggaggatcaaggaatggatcacaagggtttcagccggggcaacgggggcgatattttagacaaaagcaatttagtgaaaatgagaaatggaattgttgttggttttgtaacgcatataagtattgatatacacacgaaaaacacaagatatcacacacatctgcatttatgacgcgaactgtatgtacatatgcactgtcggcacttggaaatcgcctgggcaaccgggattcagacaagggcattcaatgctcggcgaataaataaatccacaaggatattattaaattattaaagcttaagaatttcgattttgtaaaacaatgtcgtaaggaatcgcgaacaattgtatttccatgtaagcattagaacaattgcttttagaccatatttgtagtgcatgaagtgaatgcaattttcaaaatcgtgtgtgtgtgttagtagtagtcgtacttgaaaactgttttccacttttgtcacgaaagatcaaactccacaaaatgcacttagtgcagagcgtacgaaaatcatcacaattagctgatagtgaacccattcccatttcgatcggcgaatctcatacaatagatattcaattgatatttgggaggatccaagcctgggggatttccgtgccgacctcgtgtgtgtgtgtccttgcgtatgagtgagagaatgcgatgggtatagagcggaagcgaataagagcgagatagcgcgatggcgggatggcgagtcgagtgcaatagaggatttatgaaacgggaacgggacgcgatgacagggccgcagattgttttgctttatgattgccaactgaaaaaatgaatgtactaaccttagtctatactcctgcaagtccaactaatcctagcttagtttcaacgctgccacattccaatctaatccattataatctattctaattccaatccaatccaatccgaaccgaaccaatcgagtctgcagcgaagctcggctctcttactactaatcccattatttttttttaaactcttgattttcgtaaagctctctgtaccaggtagtcgtaatcgtaattgatcgttgcaagtgcttcgggagtttgatttttgaaaacaatattttacattc

SEQ ID NO: 13748 - DNA, 2340 bp, DROSOPHILA
gttgaacatcgttttctaccattttttgtttacgtttgcaccgcgaatattcgtgcacctgcactcgcaatttgctcaaagccagcggcgctttttcgccggcaagttgctccgcaccgagttaaagcatcactcaggcggacgagctggtgtactccagttagcttctcgccccagcacttgtaattgtcattatcggcggggcgcctttgatcattcagcggcatctcgaatccgaaccaaaagtggttcttttgttctctttctgctttgtggccacctttccgcgctccccgcttaccgcttcccgtctcccgcgccgtgctttttctttctggccacctagacacgtcaacagatttggaactttgtaactggaatctggaactgggcatcggaatcggaattagggagagatgcgcgtgagcaccatccgcagcggtcggatctgccggctggcattgtgcctgctggtactgctgccgctgctgtatctgctggccaactggagcgatcaccacaagcgcgtccaggaggcgtatcacacgcgcttcggcggacccaagttcgcccaccagcgattggagggcaggcccagggaggtgcccaagctggtcgatggccttggcaactttgagccgaaagatgtgaagccacgtagcgggcctggcgagaatggcgaggcccacagcctgtcgccggacaagaagcacatgtcggacgcctccgagatggagtacggcatgaacatcgcctgctccgatgagatatcgatgcaccgatcggtgcgggacacgcggctcgaagagtgccgccactgggactaccccttcgatctgccgcgcacgagcgtcatcattgtcttccacaacgagggcttctcggtgctgatgcgcaccgtgcactcggtcatcgatcgttcgcccacgcacatgctgcacgagatcatcctggtggatgacttctccgacaaggagaacctgcgcagccagctggacgagtatgtgctgcagttcaaggggctggtcaaggtcatcaggaacaaggagcgcgaaggtctcatccgaacgagatccaggggagccatggaggctacaggtgaggtgatcgtcttcttggacgcccattgcgaggtaaacaccaactggctgccgcccttgctggcgcccatctaccgggatcgcactgtgatgacagtgcccattatcgatggcattgaccacaagaactttgagtaccggccggtttatggcacggacaaccacttccgcggcatcttcgaatggggcatgctgtacaaggagaacgaggtgccacgtcgcgagcagcgccgccgtgctcacaactcggaaccctatcgcagtcccacgcacgccggcggcctgttcgccatcaatagggagtacttcctggagctgggcgcctacgatccgggtctgctggtctggggcggcgagaacttcgaattgagcttcaagatctggcagtgtggcggcagcatcgagtgggtgccatgctctcgcgtgggtcacgtctatcgcggctttatgccctacaatttcggcaaactggctagcaagaagaagggtccattgatcacgatcaactacaagcgcgtcatcgagacgtggttcgacgacacgcacaaggagtacttctatacgcgcgagccgcttgcccgctacctggacatgggcgacattagcgagcaactggcgctgaagaagcgactgaactgcaagagcttccagtggttcatggaccacatcgcctacgatgtgtacgacaagttcccgggtctgccggccaacctgcactggggcgagctgcgctcggtggcctccgacggatgcctggactcgatgggccaccagccgccggccatcatgggcctcacatactgccatggaggcggaaataatcaactggttcggctcaatgccgctggccagttgggcgtcggcgagcgctgcgtggaggccgatcggcagggcatcaaactggccgtgtgtcgtctggggacagtcgacggtccttggcagtacaacgagcacacgaagcacctgatgcatcgcgtccacaagaaatgcatggccctgcatccggccacgcagcaattgtcattgggtcactgcgatgttaacgatagctaccagcagtggtggttcaaggagatacgcccacgctggtaagtccagcatgtttgggaggagcagcaggaggaggaggatcaaggaatggatcacaagggtttcagccggggcaacgggggcgatattttagacaaaagcaatttagtgaaaatgagaaatggaattgttgttggttttgtaacgcata

SEQ ID NO: 13749 - protein, 591 aa, DROSOPHILA
MRVSTIRSGRICRLALCLLVLLPLLYLLANWSDHHKRVQEAYHTRFGGPKFAHQRLEGRPREVPKLVDGLGNFEPKDVKPRSGPGENGEAHSLSPDKKHMSDASEMEYGMNIACSDEISMHRSVRDTRLEECRHWDYPFDLPRTSVIIVFHNEGFSVLMRTVHSVIDRSPTHMLHEIILVDDFSDKENLRSQLDEYVLQFKGLVKVIRNKEREGLIRTRSRGAMEATGEVIVFLDAHCEVNTNWLPPLLAPIYRDRTVMTVPIIDGIDHKNFEYRPVYGTDNHFRGIFEWGMLYKENEVPRREQRRRAHNSEPYRSPTHAGGLFAINREYFLELGAYDPGLLVWGGENFELSFKIWQCGGSIEWVPCSRVGHVYRGFMPYNFGKLASKKKGPLITINYKRVIETWFDDTHKEYFYTREPLARYLDMGDISEQLALKKRLNCKSFQWFMDHIAYDVYDKFPGLPANLHWGELRSVASDGCLDSMGHQPPAIMGLTYCHGGGNNQLVRLNAAGQLGVGERCVEADRQGIKLAVCRLGTVDGPWQYNEHTKHLMHRVHKKCMALHPATQQLSLGHCDVNDSYQQWWFKEIRPRW

SEQ ID NO: 13750 - DNA, 4203 bp, DROSOPHILA
aaggcgcgttttggtccggagaaaagtttgaccaacaacatgacgccacggatgctggaggatgaagcgaacttttccggacgtgctgccacgcccccgcagcagcccatcaatgcggacgagatcatcaatttgaccaactcaccggacaaggagccctccgattcggtggacacgattgcggattcggatgacggtctaagcgccgtgggaatagttaacaccggtgacaccggcgactttggcgacctcaattgctgcgtgtgcggcgagatggttttcacggccaccaatcggctgattgagtgctccaagtgcggtgccatgtaccatcaggagtgccacaagccgcccataaccaaggaggaggcggccgatgaccaggagcagaactggcagtgcgacacgtgctgcaacaagccaacgagcagcgggaggacaacatcctctgcagcggccgtaacgccaactgtcttcatagccgacgaacccatgccgttgaccagcaaagccaaatcgtcggtcgcgtcgtcgcgctcatcgaactcttccaactcctcgtcacccttctaccggcccgagcccagcagttccacgaatgccagcagcagtagcagcagcaagcatggccacaagtcctcctcttcgtcgtcgtccaaatcgcacaaggaagaacgatcctctaagtccacggcggcgtcttctcttagcgccatcggcggaatggagaagcacaacagcagtggcacctcatcgcgacgcagcggctccagcaccaaatccagctccaagagcagttcctccaagcatcacgaaagcggcagcagcagcaagcgcagatccaagcagtaatttagcatctctaataattaagtataaagttacaatccgcataaaattctgaacgttcattcataataataattcaataattcattttcaataaatgatttttaaagatatgtacgtgctatcgaattcagtaaatgtaggtaaaagtaagaaaatatttcaagtttttattaatgaggttacaaatgtaaaaatacagaaaacaaaggctcctatccctggtatttccgcacagtgacggctggtgtccgcggactacggccgggcgtggaggagtcgccatggccgtttaccttgcgcaggttaactcgggtcacaggtgaggcctcctccttcgaactggacgccaacgcgctgcgggatgagggtgtacgtgaatcaaccgccgtcgccttatcctggtccgctttctttttgcgtttgacattcacaattacgttggcatccatgctaacgtcgagctcgaagttaaactcataggtcttcttggaacgcggctgtggagtgaggtcatcgttgatcacggttttgccaccgggacgtccacgcagcgaaatagacgggctgaaattgatcttggcattgggagtacggagccgcgctgctgttggtgtctgtggcttggggctggccttcggcgtgctccttggcttgggactggccttgggcgtagctctctccctgggtgttgacttgggctcagtcttaacgcgcttctggctgggtggtgaactatctgcgactcgcttcaagggcgataccttggcgtttcgggctgatggggtgacctttttggctgtcttcttgcgatgtgacttctcctcctcctcctcatcatcttcgctggcggagattttttcgtccagtgatgagttcaagactggcgaatcaattttttttgctttcctggctgttgctgccttgctcgtgccgggcggacttagattattgttgctgctggtctgtggcttcatcttaaagtcgagatctccgttgtttggaattttcagctgcttcagcgcacttgagaaccaactgcgacacttgtcgtagtccggctcctggttgtgtgttagttttgagacatacttcatgaaatccccaattggcgggggcactcccttcggaaacagcgtcttcagactctcgcctatgttatccataaatgcttccttggccttttgaactttggggggtacagccagtagtttctgcgtgacccacggcaactccgcgcccagccactcgatgagattgtaaccgagtatctccagatcagctcgtctggttggcacgcccagatgagcatcccttgatgtgtattctatggtgccattatgcatcttcttggggtccggcttgaagtcaccggtgacgaagtgtgaggccaggccgaaatccaccaggtacgcctgcgcagcgccgcctttttccaggcccagcagtatgttggctgccttaagatcggcatgaacgtagccgttgctgtgcatgtactgatagacgtccagcatctgaatggccagtcggtagacagtgccctcgggcagtcgcttgccgttctgttccagaaacttggtcaaatcgctgccgtagcgcggcatgactataaatcgatgcttttcaccattgacctccacggaaccattagccagtatgtagggcatgcccagggacttgagaccgtgcttctgcatgaactgtttgatgtcctccagcttggcgttgcgcaggtagaagtgcatctccacgaacagaggaccattgccatgtggctcctaaaaatacgattataatagcaaatctccacaaaaaaaaaacgagcggcactcacgcatttgaccacagcatcgtagttcttctcacccactttgcaagccgcgtagatctcaccgaatcctccaactccgatcgagggtccaatgcgccactggcctttggctaaatcggtgaaaactgtgccctccttcaccttctccggcatcttgtacagcttgctcttggccttcttggccgacaccaccttcttggccggagcggcggctttcggcttggctacacgcggcattctctgggcaagatcgtcgttaaatagcggccaagtataatattcgcaaattccgctcgaaatgccgggccatcagggttgccaatcggcgcggggagtagcgtccttcagggttgtcaagtgagtgacagcttaaaaaaaaatataacccagtaggactacttgtaaaaacgacgtatttccagggctgttgccgagtcattgaaacataaaaataaaaaaggatgattatgatttcaaggatatattacgatagacagctctgcaaaacggcgccacttggcaatgtgcggccacaaaaggaagctaccatctaggggtgagggcatatcgattggccacacatcgatatattccgttccacccctggcgtccgctgacggcgtcttttccccgaaaaaatttcaagtagtcgaaaccgaattccgtagaaacaactcgcacgctccggtttcgtgttgcaacaaaataggcattcccatcgcggcagttagaatcaccgagtgcccagagtcacgttcgtaagcaggcgcagtttacaggcagcagaaaaatcgattgaacagaaatggtaatattgcggtgaatttttgagcggcagcgcatctcgcttttcccactgcgcgtgccccccgcgaattaaatattgatgcggggattgcggagacgcggacaacaaagtgcacgcaaagtggacaccacgtaggccgcaacaacaaggagcagcgaaatcggcgggcatttgttattgtgctgctgcgggcaatcggccgtaacctcactttggcagcggtgcctccattttgtgttttcttctgcgactcgtgccacattcgctttaattcgttattttaagaaatgcattgtgctgtgtctattcgcaggctggcggtaaagcaggcaaggattcgggcaaggccaaggcgaaggcggtatcgcgttccgcgcgcgcgggtcttcaggtgagttttacaatctgtacctcggtttttggcgccttttcggtacccacctcgccaacgagcatattccaccacactaacagggtgcccgccttcgttggttggttggggttgacaaaaacataaacaagccagccggtcaagccaattaaccagttacctgcctcttatgtcccggacagttccccgtgggtcgcatccatcgtcatctcaagagccgcactacgtcacatggacgcgtcggagccactgcagccgtgtactccgctgccatattggaatacctgaccgccgaggtaagtgtgcttccgccgagttttc

SEQ ID NO: 13751 - DNA, 2027 bp, DROSOPHILA
ccaagtggcgccgttttgcagagctgtctatcctgtcactcacttgacaaccctgaaggacgctactccccgcgccgattggcaaccctgatggcccggcatttcgagcggaatttgcgaatattatacttggccgctatttaacgacgatcttgcccagagaatgccgcgtgtagccaagccgaaagccgccgctccggccaagaaggtggtgtcggccaagaaggccaagagcaagctgtacaagatgccggagaaggtgaaggagggcacagttttcaccgatttagccaaaggccagtggcgcattggaccctcgatcggagttggaggattcggtgagatctacgcggcttgcaaagtgggtgagaagaactacgatgctgtggtcaaatgcgagccacatggcaatggtcctctgttcgtggagatgcacttctacctgcgcaacgccaagctggaggacatcaaacagttcatgcagaagcacggtctcaagtccctgggcatgccctacatactggctaatggttccgtggaggtcaatggtgaaaagcatcgatttatagtcatgccgcgctacggcagcgatttgaccaagtttctggaacagaacggcaagcgactgcccgagggcactgtctaccgactggccattcagatgctggacgtctatcagtacatgcacagcaacggctacgttcatgccgatcttaaggcagccaacatactgctgggcctggaaaaaggcggcgctgcgcaggcgtacctggtggatttcggcctggcctcacacttcgtcaccggtgacttcaagccggaccccaagaagatgcataatggcaccatagaatacacatcaagggatgctcatctgggcgtgccaaccagacgagctgatctggagatactcggttacaatctcatcgagtggctgggcgcggagttgccgtgggtcacgcagaaactactggctgtaccccccaaagttcaaaaggccaaggaagcatttatggataacataggcgagagtctgaagacgctgtttccgaagggagtgcccccgccaattggggatttcatgaagtatgtctcaaaactaacacacaaccaggagccggactacgacaagtgtcgcagttggttctcaagtgcgctgaagcagctgaaaattccaaacaacggagatctcgactttaagatgaagccacagaccagcagcaacaataatctaagtccgcccggcacgagcaaggcagcaacagccaggaaagcaaaaaaaattgattcgccagtcttgaactcatcactggacgaaaaaatctccgccagcgaagatgatgaggaggaggaggagaagtcacatcgcaagaagacagccaaaaaggtcaccccatcagcccgaaacgccaaggtatcgcccttgaagcgagtcgcagatagttcaccacccagccagaagcgcgttaagactgagcccaagtcaacacccagggagagagctacgcccaaggccagtcccaagccaaggagcacgccgaaggccagccccaagccacagacaccaacagcagcgcggctccgtactcccaatgccaagatcaatttcagcccgtctatttcgctgcgtggacgtcccggtggcaaaaccgtgatcaacgatgacctcactccacagccgcgttccaagaagacctatgagtttaacttcgagctcgacgttagcatggatgccaacgtaattgtgaatgtcaaacgcaaaaagaaagcggaccaggataaggcgacggcggttgattcacgtacaccctcatcccgcagcgcgttggcgtccagttcgaaggaggaggcctcacctgtgacccgagttaacctgcgcaaggtaaacggccatggcgactcctccacgcccggccgtagtccgcggacaccagccgtcactgtgcggaaataccagggataggagcctttgttttctgtatttttacatttgtaacctcattaataaaaacttgaaatattttctt

SEQ ID NO: 13752 - protein, 599 aa, DROSOPHILA
MPRVAKPKAAAPAKKVVSAKKAKSKLYKMPEKVKEGTVFTDLAKGQWRIGPSIGVGGFGEIYAACKVGEKNYDAVVKCEPHGNGPLFVEMHFYLRNAKLEDIKQFMQKHGLKSLGMPYILANGSVEVNGEKHRFIVMPRYGSDLTKFLEQNGKRLPEGTVYRLAIQMLDVYQYMHSNGYVHADLKAANILLGLEKGGAAQAYLVDFGLASHFVTGDFKPDPKKMHNGTIEYTSRDAHLGVPTRRADLEILGYNLIEWLGAELPWVTQKLLAVPPKVQKAKEAFMDNIGESLKTLFPKGVPPPIGDFMKYVSKLTHNQEPDYDKCRSWFSSALKQLKIPNNGDLDFKMKPQTSSNNNLSPPGTSKAATARKAKKIDSPVLNSSLDEKISASEDDEEEEEKSHRKKTAKKVTPSARNAKVSPLKRVADSSPPSQKRVKTEPKSTPRERATPKASPKPRSTPKASPKPQTPTAARLRTPNAKINFSPSISLRGRPGGKTVINDDLTPQPRSKKTYEFNFELDVSMDANVIVNVKRKKKADQDKATAVDSRTPSSRSALASSSKEEASPVTRVNLRKVNGHGDSSTPGRSPRTPAVTVRKYQG

SEQ ID NO: 13753 - DNA, 5824 bp, DROSOPHILA
gcgttaattgcccttaagcatataattataattgaggttcttgtccatcaggtgatcatgaagtacctgctacgcaaggagagcctcaccgcggccgtgaacaatggccgcctccatcatcagttggctcccatgcgcgtgagctatgagcaggaggtggacagcagcgttaccgactacctgaagcaggtgggccacgagatgtacgaggagcccgtcggctccagctttgcagcagtgaccgccattggggcgctggagcagccggagccattctatgatcgccgtcgcatcggcagcgccctcactctggccaaaaccaacaagatgcagcattaggatgcgtgtgattttatttatttaatctagttcgtaagtcgcatgagccgtggcctgcgagtaatgtttaccagtatttcgaatagagagtgttttcgaaaattccttttttatgtacataactaccaggctgtgagtgcccgatatatccaaataaacggatttttgttatcctttttccacaagtgcctaggtatctattattcgaggtggattagtgtacacaaactaactaatttttggatgtgccagttttggttggatctcggtaccaagtcgcggatggaccagactaaattgtaccgtaggtacgtgtgaagctgcttcctggaatactgtactctccagcttgtacctagtagacagaaattcaaagaaaagtgggcgtgaaaagtggttacaatgtaccttcgaatttccgcgcgaatgtaggcaggattttcaaaaaaaaaaaaaaaaagaacaggacacgagttcgtcgatggaatcggtcgtcgctgtgcctcgcgttgcgtcgtctgcaacatgttgcacaacatgcggcggggtgaagtgaaaatgtgtatggtggtggtggtgggtctgctggctgggcaacattttcattttcgactgcgtttgttaccacgaaagacttaaatgccgaaccgaacgagttcttcagttgtttacaatttgtcgttgagggtggattacttcgtcgcgagtttcgttcgtgcatgatgcggttgtggttgattgtatacatacatactatgcacaaatccagttctcattttgttattttacaaattctcagcgagcgcatgaactggcagcctatagcgagcagctaatcacaatatttacggcagattcgtggactcaaggaaattcagccagcagccaatcgattttctagtgttatcgaaaaacatttttcattccttcatttcgttcaacatcaaatcaagtcgagtcgaatcaaatgaaatccaatcaaatcacaaaatcacatcgcatcagctgaaccgaaccgaatcgaatcggatcgaatcgaatcgaattcaatcgaatcgagttgaatcgaactgaatcgtcttgaatggaatcgcactgaaacgaacgagaaggaataataatagaagtaacaatactagttactactaacaatactctgtaatagtaatagtaagaggaacaggaataggaatacacatactccaaagcgataatgagttgctacagaaaaaggcactttctattgtggctcttgcgtgctgtgtgtatgttgcacttaaccgcgagaggggcatatgccacagttgggttgcaaggagtgccgacatggatatatctcggcctcaagtcccccttcatcgagtttggcaaccaggtggagcagctggccaattccagcataccactgaacatgaccaaggacgagcaggccaatatgcatcaagagggcctacgcaagctcggtacgttcataaagccagtggacctgcgggactcggagactggcttcgtcaaggccgatctcaccaagagactggtattcgatagaccgaacaacattacatctcgccctattcacccgatacaggaggagatggatcagaagcagataatcctgctcgacgaggataccgacgagaatggcctgccagccagtctcaccgacgaggatcgcaagtttatagtgccgatggcgctcaagaatatatcgcccgatccacgctgggcggccactacaccgagtccctccgctttgcagccgaacgctaaagccatctcgaccattgtgccctcgcctctggcccaggtcgagggggatcccacgtccaacatcgatgacctgaagaagcacatactcttcttgcacaacatgaccaagaccaattcgaacttcgagtcgaaattcgttaaattcccgagcctgcaaaaggacaaggccaagacatcgggagctggcggttcgccgcccaatcccaagcggccccagcggccgattcatcagtattccgcgcccatagccccaccaacacccaaggtgcccgcgccagatggcggcggcgtaggaggagcagcttacaatcccggagagcagccaattggtggctactatcagaacgaggaactagcgaataatcaatcccttcttaaaccaacagataccgactcccatccagcggccggcggtagcagccatggccagaagaatcccagcgagccccaggtgatactgctcaacgagacactctccacggagacctcaatcgaagcggatcgcagtccatcgataaaccagcccaaggcgggatcgcctgcgcgcacaacaaagcgaccaccttgcctgcgcaatcccgagtccccgaaatgcatacgtcagcgtcggcgggaggagcaacagcggcagcgggagcgggacgagtggttccgcggtcagtcgcagtacatgcagccccggttcgagccgatcatacagacgattaacaatacgaagagatttgccgtatcaatcgagattccagactcctttaaagtatcctccgagggatcggatggggagttgctttcgcgagtcgaacgctcgcagcccagcattagtagtagtagtagtagcagtagtagcagtagtaggaaaatcatgccagactatattaaggtatccatggagaacaacacatccgtcacggattattttaagcacgacgttgtgatgacatcggcagatgtcgccagcgatagggaattccttatcaagaacatggaggagcacggaggcgctggctccgcgaacagtcatcacaatgatacgactccaactgcagacgcatattcggagacaatcgatcttaatcccaataactgctatagcgcaataggtctaagcaacagccaaaagaagcaatgtgttaagcacaccagcgtgatgccggccataagtcgtggtgcccgtgccgccatccaggagtgccagtttcagttcaagaatcgccgctggaactgcagcacaacgaacgacgagaccgtatttggtcccatgaccagcctggctgctcccgaaatggccttcatccacgccctggccgcggccacggtgaccagcttcatagctcgcgcctgccgggatggccaactggcctcctgcagctgctcccgcggcagtcgacccaaacagctccacgacgactggaagtggggcggctgtggcgacaacctggagttcgcctacaagttcgccacggacttcatcgattcgcgggagaaggaaaccaatcgcgagacgcgtggcgttaagagaaaacgcgaggagatcaacaagaatcgcatgcattccgatgacacgaatgcttttaacataggtattaaacgtaacaaaaacgtagatgctaaaaacgatacaagtttggtagtgagaaacgttaggaaaagcactgaggctgaaaacagtcacatactcaatgagaactttgatcagcacctattggaactagagcagcgcattacgaaggagatacttacatccaagatagacgaggaggagatgattaagctgcaggagaagatcaaacaggagattgtcaacaccaagttcttcaagggtgagcagcagccgcgcaagaagaagcgaaaaaaccagagagccgccgccgatgcgcccgcctatccgaggaacggcatcaaggagagctacaaggatggcggcatattgccgcgcagcacggccactgtcaaggccaggagcctgatgaacttgcacaacaacgaggccggacgtcgggcggtgatcaagaaggccaggataacgtgcaagtgccacggcgtgtccggctcctgcagcctgatcacctgctggcagcaattgtcctccatccgggagattggcgactatctgcgcgagaagtacgagggcgccaccaaggtgaagatcaacaagcgtggccgcctccagatcaaggacttgcaattcaaggtgccgaccgctcacgatcttatttacctagacgaaagtcccgactggtgccgcaatagctatgcgctgcattggccgggaacgcacggacgtgtgtgccacaaaaactcgtcgggattggagagctgtgccatcctctgctgcggccggggctataatacgaagaacattatagttaacgaacgctgcaattgcaaatttcactggtgttgccaggttaaatgtgaagtttgtacgaaggtactcgaggagcacacatgtaaatagagcgttgattgaattcgaatgtcttaatgtttgtgactaagccatgaaggaaataatcgtatttaaacagataattatttattgaaattacatttaaattaatgattgtatttaataataatttttactaatttaccggcttttaagcactaccaaaatcaatcggcggataacattaaaaagccccccccccccccctcctctccattttaattgccattaccatacaccatcatattgcttcttcttaaaatgctaagaaaacgataaaaaaggaaaacgaaaacgaaaaaaaaaactgctaaacaaaaccaccttacttatgtatagcttttagaaatcattagttttaagtataattctggtagggttggccttcttcaaaaacaaaaaaagaacatagtgaaggtttcaacacaattttaaagaactgttgtattttttttaattaagataatattactgatatataatattaaatatattactgaatggaataagtcataaaagcgaactttccttctagatctatatggactataattttctttgttcgagcgggtaaaactaggaagatatcacggaaattaaagtatatttgagttcgtaactatctagataatgtagaagttataccttttttttaacttaattagttgcacagattactttctcactcataggccttgaaattgtctaataaaggagtaataacaaatataatttctaatccctaaaaggaagatattattaaagttaaattgttaaactatatacaattttcttaacctatcaactctatatacaatttaatcaactctatatactctatatacaatcgtttacttctttcagttcctagcatcattttgtcctaagattaataataataatttaactatgttaactgggctgagtcagcaatgcctcagtaatttccttgctagtatttgtatccaaatgaattccattgctaaacgacagcggcagtccattcaagaggatctggttttgaatcttctgcatcctgacatggtactttatgccagcctcgggcaagttttcgccaaaacgattctccagaaaggcagactccaccgtgtacatgccgcagacgatggcatccttgcagagcttctccaggcgcgcctggagcaatcgatagtggcgatacatggacattctcttggcaatcttaggctcatctagccagtagaattcgctgagtgtgtccatggcaaccaattgtatgccagg

SEQ ID NO: 13754 - DNA, 3511 bp, DROSOPHILA
cagttgtttacaatttgtcgttgagggtggattacttcgtcgcgagtttcgttcgtgcatgatgcggttgtggttgattgtatacatacatactatgcacaaatccagttctcattttgttattttacaaattctcagcgagcgcatgaactggcagcctatagcgagcagctaatcacaatatttacggcagattcgtggactcaaggaaattcagccagcagccaatcgattttctagtgttatcgaaaaacatttttcattccttcatttcgttcaactaacaatactagttactactaacaatactctgtaatagtaatagtaagaggaacaggaataggaatacacatactccaaagcgataatgagttgctacagaaaaaggcactttctattgtggctcttgcgtgctgtgtgtatgttgcacttaaccgcgagaggggcatatgccacagttgggttgcaaggagtgccgacatggatatatctcggcctcaagtcccccttcatcgagtttggcaaccaggtggagcagctggccaattccagcataccactgaacatgaccaaggacgagcaggccaatatgcatcaagagggcctacgcaagctcggtacgttcataaagccagtggacctgcgggactcggagactggcttcgtcaaggccgatctcaccaagagactggtattcgatagaccgaacaacattacatctcgccctattcacccgatacaggaggagatggatcagaagcagataatcctgctcgacgaggataccgacgagaatggcctgccagccagtctcaccgacgaggatcgcaagtttatagtgccgatggcgctcaagaatatatcgcccgatccacgctgggcggccactacaccgagtccctccgctttgcagccgaacgctaaagccatctcgaccattgtgccctcgcctctggcccaggtcgagggggatcccacgtccaacatcgatgacctgaagaagcacatactcttcttgcacaacatgaccaagaccaattcgaacttcgagtcgaaattcgttaaattcccgagcctgcaaaaggacaaggccaagacatcgggagctggcggttcgccgcccaatcccaagcggccccagcggccgattcatcagtattccgcgcccatagccccaccaacacccaaggtgcccgcgccagatggcggcggcgtaggaggagcagcttacaatcccggagagcagccaattggtggctactatcagaacgaggaactagcgaataatcaatcccttcttaaaccaacagataccgactcccatccagcggccggcggtagcagccatggccagaagaatcccagcgagccccaggtgatactgctcaacgagacactctccacggagacctcaatcgaagcggatcgcagtccatcgataaaccagcccaaggcgggatcgcctgcgcgcacaacaaagcgaccaccttgcctgcgcaatcccgagtccccgaaatgcatacgtcagcgtcggcgggaggagcaacagcggcagcgggagcgggacgagtggttccgcggtcagtcgcagtacatgcagccccggttcgagccgatcatacagacgattaacaatacgaagagatttgccgtatcaatcgagattccagactcctttaaagtatcctccgagggatcggatggggagttgctttcgcgagtcgaacgctcgcagcccagcattagtagtagtagtagtagcagtagtagcagtagtaggaaaatcatgccagactatattaaggtatccatggagaacaacacatccgtcacggattattttaagcacgacgttgtgatgacatcggcagatgtcgccagcgatagggaattccttatcaagaacatggaggagcacggaggcgctggctccgcgaacagtcatcacaatgatacgactccaactgcagacgcatattcggagacaatcgatcttaatcccaataactgctatagcgcaataggtctaagcaacagccaaaagaagcaatgtgttaagcacaccagcgtgatgccggccataagtcgtggtgcccgtgccgccatccaggagtgccagtttcagttcaagaatcgccgctggaactgcagcacaacgaacgacgagaccgtatttggtcccatgaccagcctggctgctcccgaaatggccttcatccacgccctggccgcggccacggtgaccagcttcatagctcgcgcctgccgggatggccaactggcctcctgcagctgctcccgcggcagtcgacccaaacagctccacgacgactggaagtggggcggctgtggcgacaacctggagttcgcctacaagttcgccacggacttcatcgattcgcgggagaaggaaaccaatcgcgagacgcgtggcgttaagagaaaacgcgaggagatcaacaagaatcgcatgcattccgatgacacgaatgcttttaacataggtattaaacgtaacaaaaacgtagatgctaaaaacgatacaagtttggtagtgagaaacgttaggaaaagcactgaggctgaaaacagtcacatactcaatgagaactttgatcagcacctattggaactagagcagcgcattacgaaggagatacttacatccaagatagacgaggaggagatgattaagctgcaggagaagatcaaacaggagattgtcaacaccaagttcttcaagggtgagcagcagccgcgcaagaagaagcgaaaaaaccagagagccgccgccgatgcgcccgcctatccgaggaacggcatcaaggagagctacaaggatggcggcatattgccgcgcagcacggccactgtcaaggccaggagcctgatgaacttgcacaacaacgaggccggacgtcgggcggtgatcaagaaggccaggataacgtgcaagtgccacggcgtgtccggctcctgcagcctgatcacctgctggcagcaattgtcctccatccgggagattggcgactatctgcgcgagaagtacgagggcgccaccaaggtgaagatcaacaagcgtggccgcctccagatcaaggacttgcaattcaaggtgccgaccgctcacgatcttatttacctagacgaaagtcccgactggtgccgcaatagctatgcgctgcattggccgggaacgcacggacgtgtgtgccacaaaaactcgtcgggattggagagctgtgccatcctctgctgcggccggggctataatacgaagaacattatagttaacgaacgctgcaattgcaaatttcactggtgttgccaggttaaatgtgaagtttgtacgaaggtactcgaggagcacacatgtaaatagagcgttgattgaattcgaatgtcttaatgtttgtgactaagccatgaaggaaataatcgtatttaaacagtcctctccattttaattgccattaccatacaccatcatattgcttcttcttaaaatgct

SEQ ID NO: 13755 - protein, 1004 aa, DROSOPHILA
MSCYRKRHFLLWLLRAVCMLHLTARGAYATVGLQGVPTWIYLGLKSPFIEFGNQVEQLANSSIPLNMTKDEQANMHQEGLRKLGTFIKPVDLRDSETGFVKADLTKRLVFDRPNNITSRPIHPIQEEMDQKQIILLDEDTDENGLPASLTDEDRKFIVPMALKNISPDPRWAATTPSPSALQPNAKAISTIVPSPLAQVEGDPTSNIDDLKKHILFLHNMTKTNSNFESKFVKFPSLQKDKAKTSGAGGSPPNPKRPQRPIHQYSAPIAPPTPKVPAPDGGGVGGAAYNPGEQPIGGYYQNEELANNQSLLKPTDTDSHPAAGGSSHGQKNPSEPQVILLNETLSTETSIEADRSPSINQPKAGSPARTTKRPPCLRNPESPKCIRQRRREEQQRQRERDEWFRGQSQYMQPRFEPIIQTINNTKRFAVSIEIPDSFKVSSEGSDGELLSRVERSQPSISSSSSSSSSSSRKIMPDYIKVSMENNTSVTDYFKHDVVMTSADVASDREFLIKNMEEHGGAGSANSHHNDTTPTADAYSETIDLNPNNCYSAIGLSNSQKKQCVKHTSVMPAISRGARAAIQECQFQFKNRRWNCSTTNDETVFGPMTSLAAPEMAFIHALAAATVTSFIARACRDGQLASCSCSRGSRPKQLHDDWKWGGCGDNLEFAYKFATDFIDSREKETNRETRGVKRKREEINKNRMHSDDTNAFNIGIKRNKNVDAKNDTSLVVRNVRKSTEAENSHILNENFDQHLLELEQRITKEILTSKIDEEEMIKLQEKIKQEIVNTKFFKGEQQPRKKKRKNQRAAADAPAYPRNGIKESYKDGGILPRSTATVKARSLMNLHNNEAGRRAVIKKARITCKCHGVSGSCSLITCWQQLSSIREIGDYLREKYEGATKVKINKRGRLQIKDLQFKVPTAHDLIYLDESPDWCRNSYALHWPGTHGRVCHKNSSGLESCAILCCGRGYNTKNIIVNERCNCKFHWCCQVKCEVCTKVLEEHTCK

SEQ ID NO: 13756 - DNA, 12971 bp, DROSOPHILA
ctacagctctaatgcgtttacctaaggcaaaagtaaatctcaaactctgaattcctttacactagctgatggagatcaaatctgtaggtctcggttccaaaaaacgctccagttaagcatgtgcagtattaaagtaaaagctaacgaaaccgaagaactaaaaaccacaagaataataacattaattcatagagttacataagcaaaatacgtatgattaagccatagagggtgagataactatgtagataaagagctaaaaacgagcaaacaaagaaacatgatatatagaaatatataaagtagttattatgaatattgatactgaaacaaaatagaatgtgcctgcgtaatatatttttagccaaaaaagtaaaacgaaaaaatgaaaactgaaaactgaaaaacaagtaaaccaaagttgagcattaaaaagtgaagaaaaaacaatgaaaaactgaaaacgatttgtattagagaaagttcaaaattcaaggataatgttttttgttgatttttttgttttgttcactaaactgtaattcgaatcaattggcggcataacactccaagagcagacatacgtaaaaaggttcctataatgttaatcaaaaacacactaaaagctccagacaaaactggctaaatgaggtccatcgagattgcatcccgatgctgaccaaatataaattctatttcgaaaccgacaattttacaattgtagtttataaagcccaaagagaaaacaagcagccatatgtacagcgattgtacaaccgtttgtatgccattttagtttgcgaaattgtctgaggggcgaaaacaaatgtatctagtacgagtatcttgtatctgcgttgcctgaaggaatgtatttggaggcggcaaatctattttggtgaacaataaacagcaaacgagaagactagctggcttttcattggtctctctgttagcggaacttcgatgagcccaagactaattcgtactttaatgtatcttacagtttcccgacgctccctggaaatgcgagtccgagccacagatccgcgtccctgccccaagtgcggaaaaatctaccgctccgcccacacgctacgcacccatctggaggacaagcacaccgtgtgccccggctatcgatgtgtgctctgcggcacggtggccaagtcccgcaactctttgcactcgcatatgtcgcgccaacatcgcggcatctccaccaaggacctgcccgtcctgcccatgcccagtgctttcgatccagagctcgcctcgcgccttctggccaaggcgggcgtcaagatctcacccgctgagctgagggccagagcctcgcccaccggcggaagtggcagcagcggcggaggcggcggaggtggtagcagccaggccaagttggatttaagcaacgctagcggtggacccatggacgatgccgaggactcggacgacgatcccgaggacctgaccacgggcaacggattgtatggaatgggcggaagcagcagcgacctgagccgttaccacgagagcctgttgagcaacttcggtcacgccaggatgcgaaatgaggcggctgccgtggcggccactgcagctgctcttggtcaacccaaggacttgggcgttcagctgccaaacagcaacgcgcctgggcaatccctgctggacacctatctgcagttcatcacggagaatacattcggtgagttttacctttgcatattaagtttttccagtaagtaattcgtctcctcaccctcgacaataggcatgggcatgtcccaggagcaggccgctgcagcagcactgcgcgccaagatggcccagcttaacgcgatgggacacagtctggacaacctgccgccgggccttcttcccggacaattcgacctgagcaagctggccgccggaaatcccgcctttggacagagcggacccggactaaccattgagccgataatgcgacacgaacaggcagcgggaaacctctcgccgaaccgaccactggctctcaactcgggcggcaggatgatgggtcacgatgaaatggcggaaaatgatggcgacatgcggcgggaaggttcggaacccatggatctgggcctggacaacaaccagtcgggcagcaaccatgaggtggccaactccgatgccgaggagaactactcggaggatgagggagtgcacaacacataggaggagcaagagactccagcgagggaaccacgaatatgaacatgaacatgaacataaacaaatgtataccgattacccatggaacatatgtaacgagtagccttatcctcatgtataccagtttatgtgtacgatacgatacaatacgatagtgaaacctaggactaaaatcatatttgtgccgctgccagagctggcctagtagaattctatgttgtgcttttaaaactactactactactactacagatatatgtagtatacctctatatatagatatatcgctatacacatgtatatttataatttatatacacaagtacctgctgtgtatacaagtcgatgaggagaagaaatgaaaagagccccagacaacccatcctgcatgaaaaagaaaacgtaatggtagtcttagagtactaagttagatttcacattgaaagagatgcctgtaaatacattaaaagaaaaacttgaatatgttaggccaacagcagcccccaaacgatccgtcgtaattagtattgtaccagacgccagcagataattcagatgtgccatgcatgccacagccttccagttccaagtctagccagtctataccagtgcttaccatatctcaggaacacttgcggacaaatccgaacaactcaaccgaactacctcagccagcgaaagagctgaatccccgaaacgaacctcagacttccatgagttgtgactggtcctgcactccatcttcatgaaacttgccaattttcagcagcagatatctgctcttagacttagaatcctatcgcgaggggatcagcaaacaagaaatttaatgtttatacaactaacatacggtatacagtgcacgctcggtatacgtatttacacttaaatatacaaaacatatgaatgcctgtacttatttgtcagagaattgaatacctcagcatactcagcattcggtcgtcagcactcgaaggtggaacccccttaatgatatccagtgcgaatcataagcatatacttatacttaaactaggctagttagtttatgtggcagcactgcaagcaagacatagatagatgtaactacttgtttcctgaatgtatgtatttagttggaatatgcctcagttattctaggtttatggttagcttcaatcggagatgagcatagactctacaagagtcgatacaacttgccttatgaccaacatatgtgttaatttagtaattttctacctcaattaatttaaatgtattttacttggatatttatttgtaagtccttaactgcactctgtaatatgtaacttatttcactggcatgcgtgtttttaaaaatcttacttaagagccacctaacagcatagcgagatataaataaaaaaaaattaagaacacgagagtatctttagtttttattacccggtttaaagttttatttggttctagacactttttcctctcactctcgcccaaattttggcgcaagcggagtgcaatagattgcatttttaggcttgaaatgcatttatggctaatgcgatttggttaagacgttagaataaaatatattagttaaagtcgttacataagcaatataagtagacattcatgtgcttagaaagttatataaatatttattgacattacaataaagccgcgttatgaagacaatgtgtgttttactcaaaatatgcggatccatttaataattggtaatattgaatacaatttaattaaaatatatacctaacaaggatgagacgtttaagtacaacacattaaatgcaatatttctaatagctcggaactctgtatgaactcatattgatgacacccaaaattaacctaagcccaaacacatacacatatgtacacaaatataatacctagtgacttatttatctgatgtagttgtttcatatttcgcgagtttttcccgcagagcatccaaatcatcatttcgaatcgccaaaattcgcttggcggcttcatacttatatttgattgccaaaatttccttcttttgggactcacactgtgcctgcaaaaacaatattttatataagaactacttgagtaacgattcgaaatagcaaccttcaatgcactggtttgtccagctgagagtgaggtaatattcgaggtatcactgttttcgttttgcctaagtttctctttcagttcctggatgagatggtaacggtagcgcaacatgcgaaccgcttcctgatactttacgttcgttttctcaaggattgtctcaagatcggattccgtctgagtttgagcggctacggtagcaggtttagctgcttgtgccatttggttagattctggttccttggctgatgccgtagtgaggtcattaatcctagcattaagatcttgaagtttcattttaagccgtttctgctcaacctttgccttgtcttgctcctcaataactcgcttcgttagttgcgcattctcatccttcagcggatgatggtccagctccatctttagtgccgtcacttgactttcacgaatgaaaagctcacgctggcagtcctgaagcttggaattcagctccgcacagttgcagttgttgtctgaaattgaattcattgagtgggaaaaccagaggaaatacactgcaactactcataccaacgggatctgtcatgatgccaaattcccgaacgtcgttccagtaagactgccgtcgctcatcgtggacgctgattcgtcgattcttccgtatttcggattcaaaggtaatcgatttctgcgaaaattataatacatttagagatctattatggctagaggcgtttaaacattgttttaccctcggcactgggttccgatctagactttttcttggccgcaacgcggctatttccgtctcaagcttagccacaatatcgttagccgagcacaacttttcctcgaggttgcgtttgtcttctaaaagacttgagattgttctgtccatgctttctttctcagactgaaaactggcttccttggatttctaaaaatcattttttgaaatcatttaaaaatctagcaacaggatatcacacttaccagagttgaccggagctcttcgcactcgcttatcaattcctgaaccttactttcattttgcacctctttggattgctaaaagaaatcaatgaataattttctgtgaatgatcgtgtgagctcctctattaccatatcaaatcgtagcttttcgcactctcttgtcacttcgtcaaccttctgttgccatccaaggttattttccaacgttttcttcaactgctctttagtttcttgcagatcgagtcgtatctggtctgagttttcctttaggatcattttcgtgtttaaaaaaacaatttcatataattataacgctaagaaaaaagcttaccagatcagagcacagctcctcacacttctttgtgagttctccaattctgttgcggcccagctccacctccttggtaagctccgtgtgcctttgatatatttctgatttattgtctcgcaactgctgttcaaggctagtttttgcatcttccagtttgactaatttttcttttagggagatacacatcttactctcctcatccagcatgttccgcagattttgggaatttctcagctgttctttgagttcttcatttccggactctagcatatctttagtttcttgcatggaattgagcttcaagaggagctcgtttatagacccttttagattagccgcctcacgtgtgaacttttctgcctggtttgccatccgctcctcgacatctttgagctgcgttaccagagtcatttgttcggcactcgcggttgccttggcatccatagcggccttcagttcttcgcgtagctcattaatttccacatctcgactcgatattcccttttgggaatcaatcaattccgtgtgcaggctcatcactttcttttgcaagtttgatgatagttcatttgcctcggcaagacagatttttaggcgttcgtgctgcgataccaaatcgtcatagagaatgactttatgttgtgcctccttcaggacttcttcgagatcggttatcttgaaagtaaatgtctcgagcttagtttcgaaatcacacttttccttctcattccggttgcttagaactttcatttcagcttggagttcctgaagtttttccatggtgcacgaatgctctgaattcgctttttgaatctctgattccagggacaacttctcgagcctacatttatccaattccagaacctgctggtcacacttttcctcgagctcaataatccttttctttgaagaggccacaatcaattccagctttttaatatgtgcttctatttcgaaactgatttgatctcgagtaagcgattccatttgcaactgctcctgcgtcttactgcactgcttctctaattcgatgttgtcctttgttaatttattgactgccaagtcctgctcagcttttgttttctccaactcagcaatggtgtctgacatgacacgtcctccatttatcatctgctccagtgtctttttgacctcctcaagcttcgaggctcccttatcgcgatcttctttcgtttgattcaattgctccattagggtggctctcacctcgtttatttccgctctaaaggcatcttccatttttgattgttgggtgctagcctcagctagcttattcttaagagtttccctgatagtctccatttctgcctggtgctggacaatcaaattgtttctttcctccacagcctgagaaatattttctttatgagcagatttaagcgcttccaactccgcctgacaacgaaccgtaacgctggagagtgtctcctctacctgcaatagcttctcctttaactcggccacattgctctcatagcgatccttagtctcctgcaattcagcgtagaacttggcttggttctctttctcattcgtttcaatttggagcaggaactccattcgcaaagcacttatctcatcatcttttatccttcgcacatcgtgtagctcatctttggctgcatttagcaattgattaagtttctcgatctgactatcatattgggaggaaagtagtatctgatccggctttgcatccgcaagactgagagattctgtcgctttatgatactgttcaacgagctgcgcgtttttcttttgaagctgatcgataaggcataggtcatcggagagcttctgcgcctgacgatccagtagttcttgtttttgcttagtgtcctcatccaactcggctagcctcacctccatcgataagcagcgctcactcatttcctcaaaatccgtctgtagtctcgctatgttcccgtctttcaactggatctgccttaaatggttttcaagttctgcttttagatcagaaacttgtgactgcaattctgttatggatgtctttagcgtggccacctcctgttctcgtctactgggagatgtagggcatcctggaagggtatcctcgtcaggtggaactcggagcagactctcgctcatcgagctctcccttgttactctatcctgcagctcctcgtataccattgtcatctccgcattttgtttttccagggactcgatctgccgctggtagtcctcaaccttgttaattataacgctcttttcgaggagtgccgactctaggttagtcatctgctctcgcatttcattgatggttgcctctgttgcctccataagtgcactcttctcttcgatttcctgttccagctgcgaaataatatcaagcaatcgcttctcctctcccatatctacatgttcctggctaagtcgctttatctgaaatctgtgtcgcttgagaaagcctttgagacaaataggttcagttgcatcggattgacgattgtcttcctcgatgtactcagcagactcaaggcaaagcttaagtcctggctcgctctgatccagtttcatttggttggctctaaagaggcgactgatgccggaatgatgctgcagctctatctgttggacggactcagaaagctgaacaaactggtgtagaaggtttatatcctgcttctgttcgtcaaaatcggagcttataccggaactcctcatagactcctcaacgtgactcgtgggtcgttgctttatctcctctcgcagggcatcgttctcctggacactctccatcagttgattggaaaggcaatcgtattcccgctgcatctcttcaaagttcgtctccagttctttgattttcgctgtaagttcgtgattttgtattcgaagcttttccacagtagattcagagttttggacttccgtaagcatgttttgggcctcctccaatcgttcattgagggatgcgatatcggcttgaaacttcgtgttgtcattttgaagccgttgaaactcagcgctggaggcacttcttgccctgctttctaactgctcatactcctcctgcaatttctggtatttctcctgcacgtgctcgtgcttttcatgtagggttgtgatgcccgcttgttgagcttgccactgttggtccagagcgtcgtacctttcctgaagttgtccaaaggcattctgggatgtggatagctctttcgaaagtcgctcgcaatcagtcgccttttggataatctccgagcttgccaggttaaaggcagattcaacgctctctaacttgtcgcgaacagagacgatttccaaccggagctgatcacactcgcatgaatttttcttggactctaaatctgcaatcagcttctccagttcctcacacttgttgcatatactgtcgccggcgatgtcttcctgctctggggcaatggaaagcatgtggccctccttgctgttccgtaagacatcgcgggttaaattgtcgagggacttttgaagactctctatagtcgactccttttctaaaagggcagagagtaagtcatccacgcgaagtttcgatgatttcttgtgagcctcaaactcaaactcgaggcccacggccacctgattttccacttccattattctcatagtctgctttagagtactcagtttctcttccaattcgctgatttttgaattcgcagcctcattatccgctcttaggctggttacttccttttccagagcatcataactataagaagatacacaagtagtaaactattgttaaacactaaaactataataaaataaatcaaacaaacaggtattgtggagtggtgttctataaacaaaatttactgttaaaaactgaaacatatacttaagtgttttgtttttatagaatggaatagaatatcgctgcactagttttacagatttgtatgaataggtatgttagattttgggttgactgcttaaagcacaaaagtcgagttacgtttacatcgttttttacgatgcaggcactatgttttggacgacagattccttgacagaaaacacctcattaactcaccgctccttttcggctaacgattcttgctctaaattatcccgctgtgctgtaacctcggccagcttttcttttaaaccctgcacctcttcgcactccacctcaaaatgcttctctaagctggtgaacatttgcaggtcctggatttccttcttgattttatccgttctgtgcaggcaaataagtgcagggatcgggtcggggtatgtggatgcgattgttatgtgatgaatgttatggaggatgatcaaaaagcttgcagaagtacttacgttaagggacccttgggagtgaggggcaggtctggcagttgcctgatggtcaacatgggtttgaggacatctgggcgaggggagccaaaatcaatgcattctgccgggagaaattcctcactaatggagttgctctcggtaccgatatccagggaacccaaaatgtttatggtctttggaatgttgtcccatcgtttgcctgcatttgaagtgtgaaaaaacactggttttggaaggtgtgagacctttggaaattggtcaattcgatcttcagttgtgccggtctctgctagctccaaatgcgatcccgatgcagtgggacaccaagtacggcgacgcttctgctgacccttgtcgctcagggagtgaccacagattatcttgtgcatgtcgtgttttatttgtctctccagatgctctaccttttgctggttctcgtttttgcgctcttcttcggccagcttatccttaagcacctttatttctcgctccagccgcttcatcattgtggcgtcagataccatctcgttgacttggggcttaatgcgaattttcttggctcgcgtggcgaaactaagggtagactgcgactcttccatgatcgatggtttgattgtgcaaatgatggatgtgaatgcattgccgcccaaagaagcctgcagaatgcgcgtcagcttggaatcgcggtagttggtaaatctattgtccgcgttttccgacagacttttgataacgttactgagaaaaagtaagctcttgtttatatgaccgccctctttgaggcgcgctcctcgagcacccgtttggtccgcccgctctgacccagccagatccaccaggttcaacacgctttgaatcactgcgtcgtcatcgctgtggtccgactttcgggactcgatgatctgtgggatacatgttgcagattatcggaaagaaaatagcaggctgcacttactatcttaaatatggcatgcgaacggctggaccgctcgttcatgttcgtctcgcccacggtgcgctccttattgcccaagcatagcaggcgcaggaggtcaacctcgctggttatgatgcactcctcgcagttcacattcacaatcccatttccggactcatggatcttgaggtcctgattcttcttgttcagcagatcgtagatcttctcgttgtagatctcgatgtagcccacgcgcagcagaaagtcccgctccgtctcactggagatctgttgaaagatctccttggcggctagcaccatgacgcccggattctgttcgtcgcccatcatggtgtacgtcttgcctgaaatgcatgcccggttttaggtataccgccgcgtatatatagcacagtacccacccgacgacgtctggccgtaggcaaaaatagttccgttgaagccctgcatgcaggcgtgcactatgtgcttggccatccggtcgaacacctcctggttgctggcgccctcgtcgaacacatagtctgccaaacggaatggaatgtaaatgagataaaggtcttgtggatcaggatacgctcaacgctctaaccactcaccgaagacatagggctccgcatggctgtccgccaagtggatggagcggcgctccttcacctgccagagtgaagtgagcccgggctcgcagggacgcaccttgatgcagacctggatggagctggcgttcttcgcagacatcttggcgccttcttggtctcaatgctttatgataaacagaacgcagttcataaacaaacataaaattcaatgttttacagtaaacaaacattgatcgacatctttgttgctcgttaaattcgaacaaatgccgctttgcaaaatcagggatgtatatgcttcgatatcttcgagtggcgctaacgactcgatagataaatcggttcatcgattgttatcatagttccaaatagggctgcaaaaataaaaacagaaacacattatgttcttatcccacagggctgcattaacattcctgatcaagggtcgctacggcatatatatattctaagacgttgtgttcttattggtagggcatgctaactaacaaagttctatgactcaatactttaaggtcaaacagaaaatagaacaagctcttaaatacatgcgaaaactacggtttaaatttcatataagttcgtattttttctactaattcataacttctattcatagcacacatataatgtggaaagtatttgattccaaaacaaatatttgaaataaattataactaagctccctaatataaccactataatattttccaaattttcaattttcctattttttttaatagtgaacaactgggattattattccaatgaaatctcatgtttatatcagacagtattcttctgtatgcattaaacaatcccctcagcttttgtctgtctgtaagtaagcatttaatttagcggtctttactattttggaaatatagataataataatctatattatatatcacgaaaaagctcggaaaaagttttatgttcgaagcctattggattatattttcatattcgccgaaagctcctcaaacttttaaattgaactggctcgcgcctatttactggttccgtatttcgatctggttcgcttccgaagcggtatttgttcgaatttacaaagagaaactaacatgtcgatcaaactagcttttataaaacgttaaaatctgtttgtgtctgttcattgtgcatgtcaaacacgtttcccacaagtcgcaaagatgtctacgaagaacgccagctccatccaggtctgcatcaaggtgcgtccctgcgagcccgggctcacttcactctggcaggtgaaggagggccgctccatccagttggcggacagccatgcggagccctatgtcttcggtgagtggttagagcgttgagcgtatcctgatctacaagacctttatctcatttacattccattccgtttggcagactatgtgttcgacgagggcgccagcaaccaggaggtgttcgaccggatggccaagcacata

SEQ ID NO: 13757 - DNA, 10050 bp, DROSOPHILA
tcttagaatatatatatgccgtagcgacccttgatcaggaatgttaatgcagccctgtgggataagaacataatgtgtttctgtttttatttttgcagccctatttggaactatgataacaatcgatgaaccgatttatctatcgagtcgttagcgccactcgaagatatcgaagcatatacatccctgattttgcaaagcggcatttgttcgaatttaacgagcaacaaagatgtcgatcaatgtttgtttactgtaaaacattgaattttatgtttgtttatgaactgcgttctgtttatcataaagcattgagaccaagaaggcgccaagatgtctgcgaagaacgccagctccatccaggtctgcatcaaggtgcgtccctgcgagcccgggctcacttcactctggcaggtgaaggagcgccgctccatccacttggcggacagccatgcggagccctatgtcttcgactatgtgttcgacgagggcgccagcaaccaggaggtgttcgaccggatggccaagcacatagtgcacgcctgcatgcagggcttcaacggaactatttttgcctacggccagacgtcgtcgggcaagacgtacaccatgatgggcgacgaacagaatccgggcgtcatggtgctagccgccaaggagatctttcaacagatctccagtgagacggagcgggactttctgctgcgcgtgggctacatcgagatctacaacgagaagatctacgatctgctgaacaagaagaatcaggacctcaagatccatgagtccggaaatgggattgtgaatgtgaactgcgaggagtgcatcataaccagcgaggttgacctcctgcgcctgctatgcttgggcaataaggagcgcaccgtgggcgagacgaacatgaacgagcggtccagccgttcgcatgccatatttaagataatcatcgagtcccgaaagtcggaccacagcgatgacgacgcagtgattcaaagcgtgttgaacctggtggatctggctgggtcagagcgggcggaccaaacgggtgctcgaggagcgcgcctcaaagagggcggtcatataaacaagagcttactttttctcagtaacgttatcaaaagtctgtcggaaaacgcggacaatagatttaccaactaccgcgattccaagctgacgcgcattctgcaggcttctttgggcggcaatgcattcacatccatcatttgcacaatcaaaccatcgatcatggaagagtcgcagtctacccttagtttcgccacgcgagccaagaaaattcgcattaagccccaagtcaacgagatggtatctgacgccacaatgatgaagcggctggagcgagaaataaaggtgcttaaggataagctggccgaagaagagcgcaaaaacgagaaccagcaaaaggtagagcatctggagagacaaataaaacacgacatgcacaagataatctgtggtcactccctgagcgacaagggtcagcagaagcgtcgccgtacttggtgtcccactgcatcgggatcgcatttggagctagcagagaccggcacaactgaagatcgaattgaccaatttccaaaggtctcacaccttccaaaaccagtgttttttcacacttcaaatgcaggcaaacgatgggacaacattccaaagaccataaacattttgggttccctggatatcggtaccgagagcaactccattagtgaggaatttctcccggcagaatgcattgattttggctcccctcgcccagatgtcctcaaacccatgttgaccatcaggcaactgccagacctgcccctcactcccaagggtcccttaacaacggataaaatcaagaaggaaatccaggacctgcaaatgttcaccagcttagagaagcattttgaggtggagtgcgaagaggtgcagggtttaaaagaaaagctggccgaggttacagcacagcgggataatttagagcaagaatcgttagccgaaaaggagcgttatgatgctctggaaaaggaagtaaccagcctaagagcggataatgaggctgcgaattcaaaaatcagcgaattggaagagaaactgagtactctaaagcagactatgagaataatggaagtggaaaatcaggtggccgtgggcctcgagtttgagtttgaggctcacaagaaatcatcgaaacttcgcgtggatgacttactctctgcccttttagaaaaggagtcgactatagagagtcttcaaaagtccctcgacaatttaacccgcgatgtcttacggaacagcaaggagggccacatgctttccattgccccagagcaggaagacatcgccggcgacagtatatgcaacaagtgtgaggaactggagaagctgattgcagatttagagtccaagaaaaattcatgcgagtgtgatcagctccggttggaaatcgtctctgttcgcgacaagttagagagcgttgaatctgcctttaacctggcaagctcggagattatccaaaaggcgactgattgcgagcgactttcgaaagagctatccacatcccagaatgcctttggacaacttcaggaaaggtacgacgctctggaccaacagtggcaagctcaacaagcgggcatcacaaccctacatgaaaagcacgagcacgtgcaggagaaataccagaaattgcaggaggagtatgagcagttagaaagcagggcaagaagtgcctccagcgctgagtttcaacggcttcaaaatgacaacacgaagtttcaagccgatatcgcatccctcaatgaacgattggaggaggcccaaaacatgcttacggaagtccaaaactctgaatctactgtggaaaagcttcgaatacaaaatcacgaacttacagcgaaaatcaaagaactggagacgaactttgaagagatgcagcgggaatacgattgcctttccaatcaactgatggagagtgtccaggagaacgatgccctgcgagaggagataaagcaacgacccacgagtcacgttgaggagtctatgaggagttccggtataagctccgattttgacgaacagaagcaggatataaaccttctacaccagtttgttcagctttctgagtccgtccaacagatagagctgcagcatcattccggcatcagtcgcctctttagagccaaccaaatgaaactggatcagagcgagccaggacttaagctttgccttgagtctgctgagtacatcgaggaagacaatcgtcaatccgatgcaactgaacctatttgtctcaaaggctttctcaagcgacacagatttcagataaagcgacttagccaggaacatgtagatatgggagaggagaagcgattgcttgatattatttcgcagctggaacaggaaatcgaagagaagagtgcacttatggaggcaacagaggcaaccatcaatgaaatgcgagagcagatgactaacctagagtcggcactcctcgaaaagagcgttataattaacaaggttgaggactaccagcggcagatcgagtccctggaaaaacaaaatgcggagatgacaatggtatacgaggagctgcaggatagagtaacaagggagagctcgatgagcgagagtctgctccgagttccacctgacgaggatacccttccaggatgccctacatctcccagtagacgagaacaggaggtggccacgctaaagacatccataacagaattgcagtcacaagtttctgatctaaaagcagaacttgaaaaccatttaaggcagatccagttgaaagacgggaacatagcgagactacagacggattttgaggaaatgagtgagcgctgcttatcgatggaggtgaggctagccgagttggatgaggacactaagcaaaaacaagaactactggatcgtcaggcgcagaagctctccgatgacctatgccttatcgatcagcttcaaaagaaaaacgcgcagctcgttgaacagtatcataaagcgacagaatctctcagtcttgcggatgcaaagccggatcagatactactttcctcccaatatgatagtcagatcgagaaacttaatcaattgctaaatgcagccaaagatgagctacacgatgtgcgaaggataaaagatgatgagataagtgctttgcgaatggagttcctgctccaaattgaaacgaatgagaaagagaaccaagccaagttctacgctgaattgcaggagactaaggatcgctatgagagcaatgtggccgagttaaaggagaagctattgcaggtagaggagacactctccagcgttacggttcgttgtcaggcggagttggaagcgcttaaatctgctcataaagaaaatatttctcaggctgtggaggaaagaaacaatttgattgtccagcaccaggcagaaatggagactatcagggaaactcttaagaataagctagctgaggctagcacccaacaatcaaaaatggaagatgcctttagagcggaaataaacgaggtgagagccaccctaatggagcaattgaatcaaacgaaagaagatcgcgataagggagcctcgaagcttgaggaggtcaaaaagacactggagcagatgataaatggaggacgtgtcatgtcagacaccattgctgagttggagaaaacaaaagctgagcaggacttggcagtcaataaattaacaaaggacaacatcgaattagagaagcagtgcagtaagacgcaggagcagttgcaaatggaatcgcttactcgagatcaaatcagtttcgaaatagaagcacatattaaaaagctggaattgattgtggcctcttcaaagaaaaggattattgagctcgaggaaaagtgtgaccagcaggttctggaattggataaatgtaggctcgagaagttgtccctggaatcagagattcaaaaagcgaattcagagcattcgtgcaccatggaaaaacttcaggaactccaagctgaaatgaaagttctaagcaaccggaatgagaaggaaaagtgtgatttcgaaactaagctcgagacatttactttcaagataaccgatctcgaagaagtcctgaaggaggcacaacataaagtcattctctatgacgatttggtatcgcagcacgaacgcctaaaaatctgtcttgccgaggcaaatgaactatcatcaaacttgcaaaagaaagtgatgagcctgcacacggaattgattgattcccaaaagggaatatcgagtcgagatgtggaaattaatgagctacgcgaagaactgaaggccgctatggatgccaaggcaaccgcgagtgccgaacaaatgactctggtaacgcagctcaaagatgtcgaggagcggatggcaaaccaggcagaaaagttcacacgtgaggcggctaatctaaaagggtctataaacgagctcctcttgaagctcaattccatgcaagaaactaaagatatgctagagtccggaaatgaagaactcaaagaacagctgagaaattcccaaaatctgcggaacatgctggatgaggagagtaagatgtgtatctccctaaaagaaaaattagtcaaactggaagatgcaaaaactagccttgaacagcagttgcgagacaataaatcagaaatatatcaaaggcacacggagcttaccaaggaggtggagctgggccgcaacagaattggagaactcacaaagaagtgtgaggagctgtgctctgatctggaaaactcagaccagatacgactcgatctgcaagaaactaaagagcagttgaagaaaacgttggaaaataaccttggatggcaacagaaggttgacgaagtgacaagagagtgcgaaaagctacgatttgatatgcaatccaaagaggtgcaaaatgaaagtaaggttcaggaattgataagcgagtgcgaagagctccggtcaactctgaaatccaaggaagccagttttcagtctgagaaagaaagcatggacagaacaatctcaagtcttttagaagacaaacgcaacctcgaggaaaagttgtgctcggctaacgatattgtggctaagcttgagacggaaatagccgcgttgcggccaagaaaaagtctagatcggaacccagtgccgaggaaatcgattacctttgaatccgaaatacggaagaatcgacgaatcagcgtccacgatgagcgacggcagtcttactggaacgacgttcgggaatttggcatcatgacagatcccgttggtatgagtagttgcagtgtatttcctctggttttcccactcaatgaattcaatttcagacaacaactgcaactgtgcggagctgaattccaagcttcaggactgccagcgtgagcttttcattcgtgaaagtcaagtgacggcactaaagatggagctggaccatcatccgctgaaggatgagaatgcgcaactaacgaagcgagttattgaggagcaagacaaggcaaaggttgagcagaaacggcttaaaatgaaacttcaagatcttaatgctaggattaatgacctcactacggcatcagccaaggaaccagaatctaaccaaatggcacaagcagctaaacctgctaccgtagccgctcaaactcagacggaatccgatcttgagacaatccttgagaaaacgaacgtaaagtatcaggaagcggttcgcatgttgcgctaccgttaccatctcatccaggaactgaaagagaaacttaggcaaaacgaaaacagtgatacctcgaatattacctcactctcagctggacaaaccagtgcattgaaggttgctatttcgaatcgttactcaagtagttcttatataaaatattgtttttgcaggcacagtgtgagtcccaaaagaaggaaattttggcaatcaaatataagtatgaagccgccaagcgaattttggcgattcgaaatgatgatttggatgctctgcgggaaaaactcgcgaaatatgaaacaactacatcagataaataagtcactaggtattatatttgtgtacatatgtgtatgtgtttgggcttaggttaattttgggtgtcatcaatatgagttcatacagagttccgagctattagaaatattgcatttaatgtgttgtacttaaacgtctcatccttgttaggtatatattttaattaaattgtattcaatattaccaattattaaatggatccgcatattttgagtaaaacacacattgtcttcataacgcggctttattgtaatgtcaataaatatttatataactttctaagcacatgaatgtctacttatattgcttatgtaacgactttaactaatatattttattctaacgtcttaaccaaatcgcattagccataaatgcatttcaagcctaaaaatgcaatctattgcactccgcttgcgccaaaatttgggcgagagtgagaggaaaaagtgtctagaaccaaataaaactttaaaccgggtaataaaaactaaagatactctcgtgttcttaatttttttttatttatatctcgctatgctgttaggtggctcttaagtaagatttttaaaaacacgcatgccagtgaaataagttacatattacagagtgcagttaaggacttacaaataaatatccaagtaaaatacatttaaattaattgaggtagaaaattactaaattaacacatatgttggtcataaggcaagttgtatcgactcttgtagagtctatgctcatctccgattgaagctaaccataaacctagaataactgaggcatattccaactaaatacatacattcaggaaacaagtagttacatctatctatgtcttgcttgcagtgctgccacataaactaactagcctagtttaagtataagtatatgcttatgattcgcactggatatcattaagggggttccaccttcgagtgctgacgaccgaatgctgagtatgctgaggtattcaattctctgacaaataagtacaggcattcatatgttttgtatatttaagtgtaaatacgtataccgagcgtgcactgtataccgtatgttagttgtataaacattaaatttcttgtttgctgatcccctcgcgataggattctaagtctaagagcagatatctgctgctgaaaattggcaagtttcatgaagatggagtgcaggaccagtcacaactcatggaagtctgaggttcgtttcggggattcagctctttcgctggctgaggtagttcggttgagttgttcggatttgtccgcaagtgttcctgagatatggtaagcactggtatagactggctagacttggaactggaaggctgtggcatgcatggcacatctgaattatctgctggcgtctggtacaatactaattacgacggatcgtttgggggctgctgttggcctaacatattcaagtttttcttttaatgtatttacaggcatctctttcaatgtgaaatctaacttagtactctaagactaccattacgttttctttttcatgcaggatgggttgtctggggctcttttcatttcttctcctcatcgacttgtatacacagcaggtacttgtgtatataaattataaatatacatgtgtatagcgatatatctatatatagaggtatactacatatatctgtagtagtagtagtagtagttttaaaagcacaacatagaattctactaggccagctctggcagcggcacaaatatgattttagtcctaggtttcactatcgtattgtatcgtatcgtacacataaactggtatacatgaggataaggctactcgttacatatgttccatgggtaatcggtatacatttgtttatgttcatgttcatgttcatattcgtggttccctcgctggagtctcttgctcctcctatgtgttgtgcactccctcatcctccgagtagttctcctcggcatcggagttggccacctcatggttgctgcccgactggttgttgtccaggcccagatccatgggttccgaaccttcccgccgcatgtcgccatcattttccgccatttcatcgtgacccatcatcctgccgcccgagttgagagccagtggtcggttcggcgagaggtttcccgctgcctgttcgtgtcgcattatcggctcaatggttagtccgggtccgctctgtccaaaggcgggatttccggcggccagcttgctcaggtcgaattgtccgggaagaaggcccggcggcaggttgtccagactgtgtcccatcgcgttaagctgggccatcttggcgcgcagtgctgctgcagcggcctgctcctgggacatgcccatgccgaatgtattctccgtgatgaactgcagataggtgtccagcagggattgcccaggcgcgttgctgtttggcagctgaacgcccaagtccttgggttgaccaagagcagctgcagtggccgccacggcagccgcctcatttcgcatcctggcgtgaccgaagttgctcaacaggctctcgtggtaacggctcaggtcgctgctgcttccgcccattccatacaatccgttgcccgtggtcaggtcctcgggatcgtcgtccgagtcctcggcatcgtccatgggtccaccgctagcgttgcttaaatccaacttggcctggctgctaccacctccgccgcctccgccgctgctgccacttccgccggtgggcgaggctctggccctcagctcagcgggtgagatcttgacgcccgccttggccagaaggcgcgaggcgagctctggatcgaaagcactgggcatgggcaggacgggcaggtccttggtggagatgccgcgatgttggcgcgacatatgcgagtgcaaagagttgcgggacttggccaccgtgccgcagagcacacatcgatagccggggcacacggtgtgcttgtcctccagatgggtgcgtagcgtgtgggcggagcggtagatttttccgcacttggggcagggacgcggatctgtggctcggactcgcatttccagggagcgtcgggaaactgtaa

SEQ ID NO: 13758 - protein, 2013 aa, DROSOPHILA
MSAKNASSIQVCIKVRPCEPGLTSLWQVKERRSIHLADSHAEPYVFDYVFDEGASNQEVFDRMAKHIVHACMQGFNGTIFAYGQTSSGKTYTMMGDEQNPGVMVLAAKEIFQQISSETERDFLLRVGYIEIYNEKIYDLLNKKNQDLKIHESGNGIVNVNCEECIITSEVDLLRLLCLGNKERTVGETNMNERSSRSHAIFKIIIESRKSDHSDDDAVIQSVLNLVDLAGSERADQTGARGARLKEGGHINKSLLFLSNVIKSLSENADNRFTNYRDSKLTRILQASLGGNAFTSIICTIKPSIMEESQSTLSFATRAKKIRIKPQVNEMVSDATMMKRLEREIKVLKDKLAEEERKNENQQKVEHLERQIKHDMHKIICGHSLSDKGQQKRRRTWCPTASGSHLELAETGTTEDRIDQFPKVSHLPKPVFFHTSNAGKRWDNIPKTINILGSLDIGTESNSISEEFLPAECIDFGSPRPDVLKPMLTIRQLPDLPLTPKGPLTTDKIKKEIQDLQMFTSLEKHFEVECEEVQGLKEKLAEVTAQRDNLEQESLAEKERYDALEKEVTSLRADNEAANSKISELEEKLSTLKQTMRIMEVENQVAVGLEFEFEAHKKSSKLRVDDLLSALLEKESTIESLQKSLDNLTRDVLRNSKEGHMLSIAPEQEDIAGDSICNKCEELEKLIADLESKKNSCECDQLRLEIVSVRDKLESVESAFNLASSEIIQKATDCERLSKELSTSQNAFGQLQERYDALDQQWQAQQAGITTLHEKHEHVQEKYQKLQEEYEQLESRARSASSAEFQRLQNDNTKFQADIASLNERLEEAQNMLTEVQNSESTVEKLRIQNHELTAKIKELETNFEEMQREYDCLSNQLMESVQENDALREEIKQRPTSHVEESMRSSGISSDFDEQKQDINLLHQFVQLSESVQQIELQHHSGISRLFRANQMKLDQSEPGLKLCLESAEYIEEDNRQSDATEPICLKGFLKRHRFQIKRLSQEHVDMGEEKRLLDIISQLEQEIEEKSALMEATEATINEMREQMTNLESALLEKSVIINKVEDYQRQIESLEKQNAEMTMVYEELQDRVTRESSMSESLLRVPPDEDTLPGCPTSPSRREQEVATLKTSITELQSQVSDLKAELENHLRQIQLKDGNIARLQTDFEEMSERCLSMEVRLAELDEDTKQKQELLDRQAQKLSDDLCLIDQLQKKNAQLVEQYHKATESLSLADAKPDQILLSSQYDSQIEKLNQLLNAAKDELHDVRRIKDDEISALRMEFLLQIETNEKENQAKFYAELQETKDRYESNVAELKEKLLQVEETLSSVTVRCQAELEALKSAHKENISQAVEERNNLIVQHQAEMETIRETLKNKLAEASTQQSKMEDAFRAEINEVRATLMEQLNQTKEDRDKGASKLEEVKKTLEQMINGGRVMSDTIAELEKTKAEQDLAVNKLTKDNIELEKQCSKTQEQLQMESLTRDQISFEIEAHIKKLELIVASSKKRIIELEEKCDQQVLELDKCRLEKLSLESEIQKANSEHSCTMEKLQELQAEMKVLSNRNEKEKCDFETKLETFTFKITDLEEVLKEAQHKVILYDDLVSQHERLKICLAEANELSSNLQKKVMSLHTELIDSQKGISSRDVEINELREELKAAMDAKATASAEQMTLVTQLKDVEERMANQAEKFTREAANLKGSINELLLKLNSMQETKDMLESGNEELKEQLRNSQNLRNMLDEESKMCISLKEKLVKLEDAKTSLEQQLRDNKSEIYQRHTELTKEVELGRNRIGELTKKCEELCSDLENSDQIRLDLQETKEQLKKTLENNLGWQQKVDEVTRECEKLRFDMQSKEVQNESKVQELISECEELRSTLKSKEASFQSEKESMDRTISSLLEDKRNLEEKLCSANDIVAKLETEIAALRPRKSLDRNPVPRKSITFESEIRKNRRISVHDERRQSYWNDVREFGIMTDPVGMSSCSVFPLVFPLNEFNFRQQLQLCGAEFQASGLPA

SEQ ID NO: 13759 - DNA, 3916 bp, DROSOPHILA
cagaacatccatccattatgtttcggtttctattgactcccgagaaacatggtagtcggggggtatattgacaaagcagttgccgggaaaccgaaggcaaaatcacatatacccaagtccttctgaatacgattcagaaacccttttacactttcatctaaattatattggtttctcctgcaaagatgattcagtacgatactgtgcagatcaagaatgtatcatggtaagctttagttatgcccgacttggctcaagatgactattgtgtgctctcaggcagccggaactgcatacggagggcacctatgtgtgctcttttccagagcccccgctgccggaggcccatctgaaaccgggcacctggcatggccatctggagccgtatcagcggctcttctatcatcaaacgatgaactcggtgcgctcgagcaagcggtaccgtgccaatccgaacatcccgaaggatacgctggacttttcgctgcagtcgcgctacgatcacacccgcgaagcatttccggacaaggtggactacgtgatgcagagggagacgtgccgcgccataagtagctggtcagctcctggggcggccaaggaaattggttcccaactcaaatcatttcgggtgttgcgcaacacgcgcttcattcggcgcaagcaggaggacgtattgggtcatccacttcgcataggtaagatcacaaaattggtacaaacctaaagttctcgacgcattttaagtaacacccacttcgaatctaatcatattgttgcaggcggttgtaaagaaaagattcatccgcacagcgtaaagctcatttgcagcggtgtccacaaccagctggtgaacaatggattctcgcgccagacctccgacggcaacttcttccgctattagttccacaaatctgtgtttgctttcccagaaagaataccattttgcgttttgggttttacaaacattattggaaataaatttgggacacagaagcagtcgtcacgcagtcgcctccagcttgggctgcttgggcaggtgctccacatctccatcatactcatccactgcttgtggagtgtcctgttggtcatcctccgcctgttgctccgacgctttgtgacgctgtttcttgttctggttacgatagctcttgggtagtttgttgtcaccaatcctgaaattggatgggaatttagtatgcgaaagtgggtggctcgattacttagcttacataatagtggctctggttccaggtccccaatgtggagtcggattctcttggaagcgcgataatgccgatttgcgactcttcgggttcgcctccggatggagttcatcgaactcgtagacagcagtgcattctttcgaaagtatggccgccagtggagatccaggaatcatcctttcgggatttaccggatgtcgcttgctccagctgcgcagaatgtcccatagcaccgctggtggagcattggttttcaacgaattcttcgaggcatgcgagtatgagactcgatagccagcgtggagaatagcagaccggaactttagcatgggcacgatttctagcttgagcacacagcacagtttgtccggcgtgtagtaaaggggaacatcctgcagctcctcttggaccatggaaagaactccaacgattcgtctctgggttcccagcgattgcaaggtggtctcctggaccgccgttaaaagatcctgcacaaattcggggttatgaatcggtgccgaccagatgggtccacccagatgatgcctgtgaccgcaatgttcgcactgcgagttgaccgccggaccagtgggaattccgaacttcagctgctggggattaccagccgtgggatttggcttggttatgcccaagggctgcagcgtgaaggtctcacatccggtgcattggtatatccaagactgcttgctcatcgacagcttgcattgggcctggccgacgtacacacgcacaaatatccggatgtaaaagtccgctgatatgctcagtagtggttcgatgtacttgccgtacctgttcgcgtggctctcgatgcagtgcagcaaaatgcgcaatgccatctcgtgacagcacttcatccgcagcggaaccgatccgtattttacatagcaagcttccggagcatttccggccagcacggccatgtcggtggctgtcaccagcagcaggccgccgtccaccaggcactgcatagcgccatccaaaaagcgattgggacatccgtacggatccaagtcaactgcatcaaaacgcttctcgggttgcgtcgaaagatacatgagggtcctgtacgatgtattggaatgccccattttataccgtgtgccaatagcttaattataaacctacattgcatcggagtgactgggctcgatcagctcctccaccttgttgtgccggatgtttgtgttgatcgaggccactgcctggcgggaaagatcgttggccacgatctggcgtacaccggcgatttcctgcgcgtaacggatgctacgcaaaccggtggctgccagtgcctccaggatccgaagtccatcctcatatcgagtaccggcctcataaacaggtggatcctcgggaacgggagtggtcttctcatcctcctgttccttgaccttcttccgctgctttttgagcgccttttcgctccgctccttggtcaatctctgtcgataaacattcagagcagcaatgctcagatctcgattgaattcctggacaggattgtagaacacattgccgccggaaacgatctccgcattacgttcgcgtatcacgttttcgttgggattttcagcaataatctgcaatcgtaatgcttagcttaatgtggtttatttataatgtgtttttctttaagaacctgcggcttttcctcgtccacttccatttggatgagttaaaagaatacacgtggggcagtgttgaaaaacgtaagctactagctattaagctttaaaactaaaaatatacacaaatttgttgttttttatatgaaatacgaaataaacattacagaattatatttaagtttaatttagtttcaaaatttacaatttgggtatattctctgtaataatacatcccataaaatgatgttgaataaaaatggttcttaatatttatttgaattatttaaagattaaaataaattaaaataataaattgacattaaatatgactggaaaataaaacttgaagctagctactttgccaccaccaggattatcgaaaggactatcgaaccaaagtccgcccctatgcttgataaagaaattaatttgcagaagtgaaacagccgcagccgcaaacagaagcaaaagagctagaagtgatagcatttttgtacttttatacagtgccacaaagaagccacagaatgaccgatctgcgcaacgagatggacagcgatctggaccagaactactccctgaacagcaatgcggaccccaaaaacatgcaggagctgaccatatacgtgagtaatgcccgaaccgggaaccacccagtaaatagagacaccaaatgagcacccagtaaacctgcctcctgttatcaggtacaaaatctgttgcagaacgttcaggacaagttccagacgatgtcggaccagataataacgcgcatcgatgacatgggcaaccgcatcgacgatctggagaagagcattgcggatctgatgaaccaggccgggatcgagggtcagggaccggagaaatgagatccgtagcgctggcacggccacgcccattcggaaagtgcatcccaataccattagatacatacatcgaacacctggcacccagtcacccgtatcaagtttacaattccaggttctcacattcatttaatctcctccgcacccagctgctccccaagaaatgaagaaa

SEQ ID NO: 13760 - DNA, 1737 bp, DROSOPHILA
atggaagtggacgaggaaaagccgcagattattgctgaaaatcccaacgaaaacgtgatacgcgaacgtaatgcggagatcgtttccggcggcaatgtgttctacaatcctgtccaggaattcaatcgagatctgagcattgctgctctgaatgtttatcgacagagattgaccaaggagcggagcgaaaaggcgctcaaaaagcagcggaagaaggtcaaggaacaggaggatgagaagaccactcccgttcccgaggatccacctgtttatgaggccggtactcgatatgaggatggacttcggatcctggaggcactggcagccaccggtttgcgtagcatccgttacgcgcaggaaatcgccggtgtacgccagatcgtggccaacgatctttcccgccaggcagtggcctcgatcaacacaaacatccggcacaacaaggtggaggagctgatcgagcccagtcactccgatgcaatgaccctcatgtatctttcgacgcaacccgagaagcgttttgatgcagttgacttggatccgtacggatgtcccaatcgctttttggatggcgctatgcagtgcctggtggacggcggcctgctgctggtgacagccaccgacatggccgtgctggccggaaatgctccggaagcttgctatgtaaaatacggatcggttccgctgcggatgaagtgctgtcacgagatggcattgcgcattttgctgcactgcatcgagagccacgcgaacaggtacggcaagtacatcgaaccactactgagcatatcagcggacttttacatccggatatttgtgcgtgtgtacgtcggccaggcccaatgcaagctgtcgatgagcaagcagtcttggatataccaatgcaccggatgtgagaccttcacgctgcagcccttgggcataaccaagccaaatcccacggctggtaatccccagcagctgaagttcggaattcccactggtccggcggtcaactcgcagtgcgaacattgcggtcacaggcatcatctgggtggacccatctggtcggcaccgattcataaccccgaatttgtgcaggatcttttaacggcggtccaggagaccaccttgcaatcgctgggaacccagagacgaatcgttggagttctttccatggtccaagaggagctgcaggatgttcccctttactacacgccggacaaactgtgctgtgtgctcaagctagaaatcgtgcccatgctaaagttccggtctgctattctccacgctggctatcgagtctcatactcgcatgcctcgaagaattcgttgaaaaccaatgctccaccagcggtgctatgggacattctgcgcagctggagcaagcgacatccggtaaatcccgaaaggatgattcctggatctccactggcggccatactttcgaaagaatgcactgctgtctacgagttcgatgaactccatccggaggcgaacccgaagagtcgcaaatcggcattatcgcgcttccaagagaatccgactccacattggggacctggaaccagagccactattatgattggtgacaacaaactacccaagagctatcgtaaccagaacaagaaacagcgtcacaaagcgtcggagcaacaggcggaggatgaccaacaggacactccacaagcagtggatgagtatgatggagatgtggagcacctgcccaagcagcccaagctggaggcgactgcgtga

SEQ ID NO: 13761 - protein, 578 aa, DROSOPHILA
MEVDEEKPQIIAENPNENVIRERNAEIVSGGNVFYNPVQEFNRDLSIAALNVYRQRLTKERSEKALKKQRKKVKEQEDEKTTPVPEDPPVYEAGTRYEDGLRILEALAATGLRSIRYAQEIAGVRQIVANDLSRQAVASINTNIRHNKVEELIEPSHSDAMTLMYLSTQPEKRFDAVDLDPYGCPNRFLDGAMQCLVDGGLLLVTATDMAVLAGNAPEACYVKYGSVPLRMKCCHEMALRILLHCIESHANRYGKYIEPLLSISADFYIRIFVRVYVGQAQCKLSMSKQSWIYQCTGCETFTLQPLGITKPNPTAGNPQQLKFGIPTGPAVNSQCEHCGHRHHLGGPIWSAPIHNPEFVQDLLTAVQETTLQSLGTQRRIVGVLSMVQEELQDVPLYYTPDKLCCVLKLEIVPMLKFRSAILHAGYRVSYSHASKNSLKTNAPPAVLWDILRSWSKRHPVNPERMIPGSPLAAILSKECTAVYEFDELHPEANPKSRKSALSRFQENPTPHWGPGTRATIMIGDNKLPKSYRNQNKKQRHKASEQQAEDDQQDTPQAVDEYDGDVEHLPKQPKLEATA

SEQ ID NO: 13762 - DNA, 4803 bp, DROSOPHILA
agcattctgctccgcagtttgcagctctccagattccgtctatttctggcacctctggtgggcgtgcctgctccgcaaacagtcccaattggcggaggaatccggacacatggtgcgatcggcggtctctttctcggttgtttgccttctggctgccaccacattggccacacagtgttcctccgtcggtctgcgggaaaattcaaaatgaaacgctcggtttatccggttcactacgggcgttggagtggggatgttgtgccgtaaggatgtgcgacgggcgagtgcgaagcgtgccaagactccggctccagatggcaccacctggtattcgatctcgcagtgcatttggagataggcattaatggcagatcggaagagattataatcctggggttcaactgcgtatcctgtttggggtcgccgcgatggttggcatttgagtatgggtccaaaatttcattgcttatgtggggagttttaagttccgagaacgattttgacttttcaaattttctgcgggaaatgaaaatactcgaaaatatatgtacatatatgtaggcaacactttgtttaatctatagaatttacgttttctttaagtgcttttaaaagaaaagcaagagtttaataaatctatttatatgaatggattaattgaaaccacaacatattagcaagaagcatctgttaaaccgcatctttattgaaactaaaaatttgctcagattaaattgttttttgacctacgtagctgctaactaattttactacttgccacgcctccgaacccagataagaaacgtgctgtgaccctaaaacgtggccttgattagggcctccagtcatggatggaacgtcactggcacagcaggtttatcaggatgctgaaccatgggttatccgatcaattcagcgggagattattatggcggtattgtgtttttaactcgagaattcagttgagattctaaagtcgtcgcgctcggccgtttttgagatgtggcgccatcgcatcctgcagcaagcttcgcgccgtggaatcagcaaacaagtgagggaagatggaggagctcgaagggaaccaagtggattcctgccaggcgcagcagatgttgtggttattggcggtggttcggcgggctgtcacacactgtatcacctggcacgacgtggtgtcaaggccgtgctcctggaacgcgcccaacttacggccggaaccacctggcacacggctggattgctgtggcgcctgcgtcccaacgatgtggatattcagctgctggctaattcacgtcgcatgctgcagcaattggaggaggaaacggagctggatccgggatggattcaaaatggtggcatcttcattgctcacaatgaaacgcgactggacgagtatcgcagactggccactgtgggctcagctttgggtattgaaaaccaagtgctgagtccggaggacacccaaaagttatttcccctcctcgatccgtcggcatttgtgggcgctctctattctccgggtgatggtgtcatggatccggcgatgctgtgtgcggccctcaaaaaggcagccactaatctcggagcacaggtaatcgagaattgcggagtggatgatctactgctggagcagactgcgaggggtaagaaggtggtgggtgtttccacgcctttcggggacatcaaagctgagaaggtagtgaatgctacaggagtgtggggtcgtgatttggtggcccggcacggcacccatcttccccttgtgcccatgaagcatgcttatattgtttctgaatccattccgggtgttagaggtctacccaatatcagagatcacgattactccacctacttccgcatccaaggggatgccatctgcatgggtggctatgaaccgaatcccattctgctggagcccgtgcccaaggacttccatttcggactctacgaactggattggtcggtgttcgagacccatgtcgagggagcccagaaattgtgtccaagctatgcgaaatatggcgtgaagagcacggtttgtggcccggaatcctttacacccgaccacaaacccttgatgggtccggatcccaacctagatgggctctaccacaattgtggcttcaattcagcgggcatgatgtttggtggtggttgcggagagcagaccgccttgtgggtcatccaaggtcaaccggacctgcccatgtttggcttcgatctgcgcagattcacccaggagcagggcaaagccattcagtggattagggagaagtcgcacgagagctacgtgaagaactacagcatggtcttcaagtatgatcaaccactggcgggtcgtgatttccaaaaggatccacttcacgacgagatgatgaaggcaggcgccgtaatggaggagaagcagggttgggaacggcctggtttcttcctgcccaccggttccaagaaggcggtggttcagccctatgactggtacggaagctatgtccaccagaggcacaaggacagcgagtacgagagagttctggatggggatcttcactacagccgcttctcggagtaccacgatctcgtaggtagctaagtagcttatggaaagccaaaataatgatatatatctttcagatcggttcggaggccctggcatgtcgcaataacgccgtggtctttaacatgagctacttcgccaagctgcttctagatggtccacaggcccaggaggccgctgactggctattctccgccaataccaacagggatcccagcaagtaagatccatgtatagatatacaaatttagaaacctttctaaacaattaccacttccattttagaactgtctacacctgtgctctaaacgatgccggcggagtggaggcggatgtgaccatttcccgccttgctcccggttctggagaggtctacaatcccaagatcaatggccagggcttttatattgtggctggcggcgcttctgccttctacacttacagtgttttgctggcagagatccgtcgaaaaggattcaatgcgagcctcaaggatctgactgccgaattgggtgtgatttctattcaaggaccaaacagccgaaagatcctgcagcccctcatcgactgtgatctgtccgatgagcacgtagctcccaacagcactcgattagccaaattcggtgatgtgggtctccgtttgctgcgggtcagctttgtgggagaactgggctacgagcttcatgtgcccaagaaggattgtgctgccgtctatcggagtctgatgaaagcgggagctggagaggatttgcgcaatgctggctaccgttccctttactccctcagcagcgaaaaaggctatcatctatggagcttcgatctgcgaccggatgacacgcccctggaagctggcttgggattcacatgtcgcaaaacgggtgcagattaccgtggcaaggcggccatcgaaaatcagcgagctgagggcctaaagaagcgactggtctacttgacgctccgggatcaggtgcccatctggggtttggagggagtctaccgaaatggcgagcccgtgggcatacttagacgagctgaatatgcctatacccttggaaagtccctcggtcagacatacgtgtcccgaccagatggcaagatcatcgatgctgattacattcggaacggggagtacgaggtggacatcttgggcaagaaataccgcgccgactgtcacttgcgcagcccattcgatcctaccggccaacgggttctcggtaactatgcatccgagtccaagtccaataaataaagattagtctcttccacttccaagaactcgtttacccggcatagggaatttctctcaacctttctctttctggcagggcacgacggtattgttgaagtgcctgccttaacatacatgtagggtcataaattactttccccatgaatatgaaaaggttcgaagaaaggtcacggtgtaggcagacaggcagtctgcgaagtggtcacccgaaatggttgcggttacggctcaattaatttctgtgtccaactattatgacatcattctcggtttccgcgaaggatatgcctttccagacgtaattctagagcacttggacacctcggccagacagagggtcgccactcaagtggatttctttgcttaaatgaaatttcatataattgtgatattgatgcaatactttcagcttataataaactaggttcttcaggcctcgatggttacggtggaggccgtattggagggactatcgaagtggccagctaccacctcctccagcgataaatcgaacttgaagatgggacggagatcgttgttgagtcggcagacgactccggcggaggcgatgttccagttccagcagatcatggcgcagttcagtgcctccaaatcgcccttcatcgagacaatattctatatatggggatgcaaacattattatcaatcagattgtgtgcttttagcggcccacttaccatagccactgtatagtcaatggagttgatctcctcgcccttgataaccaccaactgggtctcgccattctggttgttcaggaagcgcaccaccttctccttgagatactcagccgatgcatagtccagcttttgcttcacatccaccacgctaacttcgtgaccattgatctggtagatgatatatgatttgttagtgtaaattgcatctagataagataggataagctcaccttctccagtttgatgtctacatgtggacgtgcactgctatatagaatgtataccatgttggcaccgat

SEQ ID NO: 13763 - DNA, 2685 bp, DROSOPHILA
atgtggcgccatcgcatcctgcagcaagcttcgcgccgtggaatcagcaaacaagtgagggaagatggaggagctcgaagggaaccaagtggattcctgccaggcgcagcagatgttgtggttattggcggtggttcggcgggctgtcacacactgtatcacctggcacgacgtggtgtcaaggccgtgctcctggaacgcgcccaacttacggccggaaccacctggcacacggctggattgctgtggcgcctgcgtcccaacgatgtggatattcagctgctggctaattcacgtcgcatgctgcagcaattggaggaggaaacggagctggatccgggatggattcaaaatggtggcatcttcattgctcacaatgaaacgcgactggacgagtatcgcagactggccactgtgggctcagctttgggtattgaaaaccaagtgctgagtccggaggacacccaaaagttatttcccctcctcgatccgtcggcatttgtgggcgctctctattctccgggtgatggtgtcatggatccggcgatgctgtgtgcggccctcaaaaaggcagccactaatctcggagcacaggtaatcgagaattgcggagtggatgatctactgctggagcagactgcgaggggtaagaaggtggtgggtgtttccacgcctttcggggacatcaaagctgagaaggtagtgaatgctacaggagtgtggggtcgtgatttggtggcccggcacggcacccatcttccccttgtgcccatgaagcatgcttatattgtttctgaatccattccgggtgttagaggtctacccaatatcagagatcacgattactccacctacttccgcatccaaggggatgccatctgcatgggtggctatgaaccgaatcccattctgctggagcccgtgcccaaggacttccatttcggactctacgaactggattggtcggtgttcgagacccatgtcgagggagcccagaaattgtgtccaagctatgcgaaatatggcgtgaagagcacggtttgtggcccggaatcctttacacccgaccacaaacccttgatgggtccggatcccaacctagatgggctctaccacaattgtggcttcaattcagcgggcatgatgtttggtggtggttgcggagagcagaccgccttgtgggtcatccaaggtcaaccggacctgcccatgtttggcttcgatctgcgcagattcacccaggagcagggcaaagccattcagtggattagggagaagtcgcacgagagctacgtgaagaactacagcatggtcttcaagtatgatcaaccactggcgggtcgtgatttccaaaaggatccacttcacgacgagatgatgaaggcaggcgccgtaatggaggagaagcagggttgggaacggcctggtttcttcctgcccaccggttccaagaaggcggtggttcagccctatgactggtacggaagctatgtccaccagaggcacaaggacagcgagtacgagagagttctggatggggatcttcactacagccgcttctcggagtaccacgatctcatcggttcggaggccctggcatgtcgcaataacgccgtggtctttaacatgagctacttcgccaagctgcttctagatggtccacaggcccaggaggccgctgactggctattctccgccaataccaacagggatcccagcaaaactgtctacacctgtgctctaaacgatgccggcggagtggaggcggatgtgaccatttcccgccttgctcccggttctggagaggtctacaatcccaagatcaatggccagggcttttatattgtggctggcggcgcttctgccttctacacttacagtgttttgctggcagagatccgtcgaaaaggattcaatgcgagcctcaaggatctgactgccgaattgggtgtgatttctattcaaggaccaaacagccgaaagatcctgcagcccctcatcgactgtgatctgtccgatgagcacgtagctcccaacagcactcgattagccaaattcggtgatgtgggtctccgtttgctgcgggtcagctttgtgggagaactgggctacgagcttcatgtgcccaagaaggattgtgctgccgtctatcggagtctgatgaaagcgggagctggagaggatttgcgcaatgctggctaccgttccctttactccctcagcagcgaaaaaggctatcatctatggagcttcgatctgcgaccggatgacacgcccctggaagctggcttgggattcacatgtcgcaaaacgggtgcagattaccgtggcaaggcggccatcgaaaatcagcgagctgagggcctaaagaagcgactggtctacttgacgctccgggatcaggtgcccatctggggtttggagggagtctaccgaaatggcgagcccgtgggcatacttagacgagctgaatatgcctatacccttggaaagtccctcggtcagacatacgtgtcccgaccagatggcaagatcatcgatgctgattacattcggaacggggagtacgaggtggacatcttgggcaagaaataccgcgccgactgtcacttgcgcagcccattcgatcctaccggccaacgggttctcggtaactatgcatccgagtccaagtccaataaataa

SEQ ID NO: 13764 - protein, 894 aa, DROSOPHILA
MWRHRILQQASRRGISKQVREDGGARREPSGFLPGAADVVVIGGGSAGCHTLYHLARRGVKAVLLERAQLTAGTTWHTAGLLWRLRPNDVDIQLLANSRRMLQQLEEETELDPGWIQNGGIFIAHNETRLDEYRRLATVGSALGIENQVLSPEDTQKLFPLLDPSAFVGALYSPGDGVMDPAMLCAALKKAATNLGAQVIENCGVDDLLLEQTARGKKVVGVSTPFGDIKAEKVVNATGVWGRDLVARHGTHLPLVPMKHAYIVSESIPGVRGLPNIRDHDYSTYFRIQGDAICMGGYEPNPILLEPVPKDFHFGLYELDWSVFETHVEGAQKLCPSYAKYGVKSTVCGPESFTPDHKPLMGPDPNLDGLYHNCGFNSAGMMFGGGCGEQTALWVIQGQPDLPMFGFDLRRFTQEQGKAIQWIREKSHESYVKNYSMVFKYDQPLAGRDFQKDPLHDEMMKAGAVMEEKQGWERPGFFLPTGSKKAVVQPYDWYGSYVHQRHKDSEYERVLDGDLHYSRFSEYHDLIGSEALACRNNAVVFNMSYFAKLLLDGPQAQEAADWLFSANTNRDPSKTVYTCALNDAGGVEADVTISRLAPGSGEVYNPKINGQGFYIVAGGASAFYTYSVLLAEIRRKGFNASLKDLTAELGVISIQGPNSRKILQPLIDCDLSDEHVAPNSTRLAKFGDVGLRLLRVSFVGELGYELHVPKKDCAAVYRSLMKAGAGEDLRNAGYRSLYSLSSEKGYHLWSFDLRPDDTPLEAGLGFTCRKTGADYRGKAAIENQRAEGLKKRLVYLTLRDQVPIWGLEGVYRNGEPVGILRRAEYAYTLGKSLGQTYVSRPDGKIIDADYIRNGEYEVDILGKKYRADCHLRSPFDPTGQRVLGNYASESKSNK

SEQ ID NO: 13765 - DNA, 8488 bp, DROSOPHILA
tgtataacaaaaacgtaatccttcaataattcctctggtttttttttccaatcgggtgaatcctaacgttattgtaaaatatttagtcgcactcgttgtaaagttgattcaacaaaaacaatgcataaaacaagagaacgctatagtcgatttgctcgactatcatatacccgttactcaactagtgggaggtggcaggaagatatctctaaaatttgttggcataacggcgaatattgtaaaatagtatagaatggtaaaatagtaatataaaattactgctttttgcggttaaagtaacaatgttttaaaacaactaagcgtgacaagaagcaagtattcctcatgtcaacattctagcttttctagttcgtgtttctagacagacggacgtgtctggtgatcccgatcaagaatatatcttcctgctacaaatctttcaacgaatcatctagtatacctagagtaactaagagtaacggatgtgattacgtgcaatcgattacaaactataaaaggcatttgacgggtttgcaaatggtttggcaaaacatacatgtgtgttagagctaggcgactttttgcgttcaaaaacaagtcaactttctgttagagctgatttttctgtgatatctgtctgtaggttttggataggatgcttaatagtgttgctgatagtttgcttgactaaatctaaaagtactttattgacctatgccataaatggttataggacgttctatgcgtattcttaaatacgacgcgatgcgatgtgtgtgagcagtacaagagcagcctttaagaaaaacatatacaattatgttttattacgatgttggtactttttgatgttgctgttggtggtaggtcattgctgtagtagtttaaaacctgaatgcattcattttgctcagtcccaaaatacgattaacgatacggcaatgcaatgaacaggcggcaaattttgtgacttgttgggattttcgatatctttttgttaaacatcgcccattgggagcgttcaacttgaagtcgcctcagtggctgccgccttgtcgccatttgttagctgcttgcctgcttctggctgctcctttatatccttggataccgcatcctcggcctcgccattgttgttagcagcagccacaatggagttgatagcatcattcacctcgttctcggtgctatcggtcttgaaatgcttttcaatttcactgcgcaccttgacaatgtcttttcggctaaaattagtaagtagaatacagattagaaaatcccttgtgaaaaggcaatcgagtgtaagtcttacctaatctttacaaacagaatgccattgatggtgttcaacatgtccaggaccgagcccatcgacggtggtgtgatgtggatgggcggcaggtcactggtcagtttgccactggaatagatatcgttcatcttgcgctgcagcagcacagcttgctgggtcaaaagacgcaggcactcggccgagtccctggtcttctcgtggttctcgccaagctgtttataaaatatattattcagattgatttcctgtggaattagcttagtatacacccacctgagacttgtagaaagagtacgtttccttctcgttattcaacgctgagcggaagtcgcccatgcaggactgtgtgcgggccatcaggtgatagctgagtgccacgtgcatatccttgtcgccaaagtacttcaggttcagcttgagggcatgctcgataaaccgcagcgacaactcgtattcgcccagcgcatgcaaaatcaaactgatgttgctctgaaaataaaggtaagacggttggattttaatcaaatttttaactaacttggtaaacttacatcgatcagtgccacttccggatgatcttcaccacagatgagcaccatcagatagcgagctctgtacagcagcttaagagacattcccacatgtccgttagcaaacgaatagagtgataggtgtgtctaaagaaggaagaatacagatattaattgaacttagaagaatgaggcagggcagcaaaggcacatacgtattccaatatggtcgatgggtggtccatgccgttcacccgctcgctcatgatcactgctcgctgttggatcgctagagcatcttgggcatcgcccaagaggtagctgagcctggccagcatgcgcaggcaggatccgttttcctgatgcaatgcgccaaatacgttgttcagcaggttgagtgctccgctgattagctcatagccctccttaaacaagccctgttggatcttggcctggcccgtggtgtagaagttataggcgtcggttgcccggggactaatgtgcttcacaattgggaacacattgacgatgtcgtcgtcgccaaaggttggcttgtgcttggactcgaagttgtactctcgcagcagcacctgaataccaaccttcaagcagaaggcgcgcatcagactgatacgcaggatgccgtatttggagaccgcagtctcaatcgagtcacaatccaattcccagtcccagtagaccttggcctccttacgaatttgctgccacagggatcggggcgtcatcagagtccaatcggatgcggatgaactattggaggagccagacgagctgccattctgattgcctgtcgtctgctgttgctgctgaccctttccgcccttggaggacttgtgcttgttgtgcttaccgccgttgccgcgtttcttgtgcgcctcctcgctgctcacggccgggttgacgggtccgttggtcagcagacagttgaggaagtggctgatggcagcagagaggtgcagcggctctgtattctgcatgtacgtatagtagatgtgcttggtggcccgtacgatcagctcgaggacagcgatcctatgcaggtaatccatgcgaggcatttggcttaaaattttgataaccttgcccaaataacgcacgttgatgccgtgactgtgcaaagattctgttagactctggccatcgattggtgacgatgaatgggacatatgttccttgataaaggcgggtatctgcttaaggacgagaaactcggctgcttcctgcacgagcaccttctgtttggccagcgaggtgccctcctcgccatccgcgtgacgaatgccaggcgagaatacgtcggggttgaagcggaagtcaaactctttctccttcagcgatccaacggcggcgcaagcccgctttactacctcggcagcttgcacctcattcgaagtagctacattggactgtgcttcccggatggcattaacaatggcggcggcccttgcctcgccagaagtggacctctccttcttctcctcctcttcgtttttcttctccttgtcatcgggtttttcagctccgttcactttacttgccgcttctgctccttctaaggctggaacaggattcgcctccgatttttcagactgctttatggtagtaagctgctgaaggcgcgcagcagcaattcggataaagttaacatgtcgatcctctataaaagcttccagcagctcttgacgcaggcagcacaacttgtgcctgtgctcgatagggaagcccatatcaactaattccttgctcagctgcacgtcctgaagcttcaggaagttcacgtctggcgggaacgtgcgcaataagtcgaggatgtagtgtcggccatcgtttccaataatgcccttgcactccaccgaggagcacagctccacgggttcatcccgctcgttaagcactacgtgtggcaaaatcttcagatgcttaccggcttgtctaagaagctccaagtatttgggatggctgagcaccgtctttccaaagtcaatggagccatagacgacgctttgctcctgctcccgctccagaattccgggaataatagattgggcagtaacacggtagccgcgataatcaacgacgacggttcccagtgtgtataatccttcaatatcaacggcattatagacacgcacgccgtgcagatcgtatcgtggggcaacaaaggcggctgcatcgccgcccagttccttgtaatggtctcttacgtcgaagcccatcgagaagaagatattgttccaaatgaacatctgcatcttggtgtcctcgccgggattaatggccagcacattgccgtcgataacggccatggcgcccctcgtggcggcagtcacgaaatccccgtgcaccttgaagatggcgcgctcgcgcagcaagcgctccggcagtgtcttacgtggcagttcccgtgtcgtctgtagctcttcgttccagtcgcgcgtctgtccggggatgtgctcttcgtagctgcgggatggaaggatttagggtatttaattaataattattattactttgttaacatttatgtagtaatactattaaaatctttttgctcaacctaccccaattttgagctgaatgcatcctcggcacgaatagcgtccactgtgtgctccaggatgggagctgcccactggtacacctgatagggcgtggctacacgctcgaaggcatgacgcatggtgcgtcgcttctggatggtctggaaggcacgtcggaacgatggtgatatgtgggaaagcagatcgatcagcgagtggctgaggtggcttggattgtcgggcttgggattaaaggtgtcgtctgtcgactggttgatgaagaagcccttggaacaggctgagatgtggaatcgtttatcctccatggtgacaacgtacagatacatgaggtcaccatgcagcttgcgaggaccgggtggcgggttccaggcggatgtagtcagtaccttgagagcctgcggtcccttggcgttcttcacatttggatgcaatggcagaattggcggatcacttacacccggagtcacatactccggcggagtgcaatccacggagtccggtcgcgtcctcttcttgtccagcaaatcaccctgagtgatcgtgtttaagtaggtcagcgaagtacagtcaatgccattgtacgcgtcggccgggtcaaggtttttgagaagatcacggacatggcgcacatgaatacgggcctcccgcatggtgtacggctcctctaccactttgatcgtcgagccctgctcaaggttattgattgacttgagttcggcgaaattgtcgagcgtcacgttgtccagctgcagcgagaagcatgtacgatggcacgtctcttcgcggtccatcagcagctggtggatttcctgcaccagctccatgctggacagctgcacgcagagcagatcggcgccgggactgctgatgttcaccgtgatgccaatgtcctgcagagcgtccagatcaatgtcatcaccatcagcctcagcatccggtgctcctccttcctgcggtttctccacattggcattggtatcggcattgtcctcaactgcatccaccactgtgggcttctcggcgtgtccgttgctcagaacggcttcggttgtgggttcagttgggcttttgttgcggttcttcttgcctacatggggcgatgaagaagtaatttgttgttagtcaatattgggaaaggcatatggagcattgtgtaacctattcgatgtatagggagaaacgtgaactttggaccgacttttgtttccatgtctctcagaagaatcttgtataaatccgttatttatttattatggttcattagtatgtttttaaaaacaaaagattattcttaggaatttaaatttccaagcaatgctgccaagtttatgttagaatttaatgtttaccattcttaatttataaatagtggtttatatctagtttaataattaaaccttgatattatttgaaaaatggtgacagaattaaaggtaatgcaaatacgttacacgtttcttttctaaaattgtctggcaatatataataatttaaaaagaggtgtctctacctccaggctccgatttttacataacaatactgtccgcacacttttgtcgctcagtttgtctgtgttcgccggcaagctgtgtgcttgcatatacatataaaggcatatgtacatacatttacaacaaaacagtagaaaaacaaacagaaagagaaaagcgagctgataaggccaaaggggccgggttcgttcggagtccgtacgaacgaacagtccaccgaataatccaatctcctttcgatctctcaggaaaacggaatgggtttaacacgaccatgctaatttcaacagccgtatactaaattacagcactgtgagatacatagagatagagctagggagagagaatgagagaggcaaagagagtggggagaggagaaagcaaaagtgataagtacaatgttcattaaccgcaaggaattcggagagaaggagacaaagtgtagagcgatgcgtctacggatagaaaacatgatttacataattgtcgaacaatttgcgtgtgttaagtgcatgcatttcgggccgcgcacgtgttaattgtaggttaaacgcaacaagaaatccgcccggggggttaatgaacatttcgtcgccgttgccgggttaataacatgtgcgttgccatgccaagaggaagagaaagagcgagagagatagggagcctcacacttgcagttctcacacacgcacttaactccaataatacacacacacacatttacgattgcaattgtaacccacgcggtttatggagagagggggagagggaaggctcgtaaaagggggtggaggggcagccatagacaacgggcgccgcttttaaggcattatagggaagaaaaagcccattacgtaatgttaaaaatgttatgtgattggcttttgtggcaaataatatattgaggcagtttccaaggcagcaaagctaagaggaggtggtgatgggttggtgtgtgggtgggtgggtggttgattggttggttgaacatgggcgtaggcggaaagttaaacgcacctttcttcttcgcagccggcccgtcggcagccgtgccattgccattgaccaagttctgattcgaattctgctgattcgaattcggattcaggttctttttgccgccggccgtgttgttgttctccttggccttgccgctggcctttgttgctgttgctgttgcatcgcccgtggccgttgcatttgaattcttcgcctccgtttcaagcgccatgcttttgtttcacctgctcgccaaaaactcaacaaaaccagcggaggagacacagagttctagttcacgtttcttttttttttgggcccgtccgtccgtgttacacaactctaaccgctcgccgagctcggggtgatttcggttcgattttcagtgtctttctggtcgattgcgaacgtgattgttgtttggttaacgatctcgtacgcatctatgacaagtgggtctttgctagttctgttcttttcagcacattacttatcgaggatataaatcggccgattcgctagaaaataacgcgttatgttgttaacggctgagagtgtgaccaccgggtgaacatttaaatataccgctggcattggcttggttgcagtattttaattagtatttagttatttgctgtgtataattgcagatggacaacaactagtgatagggatgcacacgcaaaaacgataccaatatatatgattgcatttattttaacaacaattgtgttctgtttaataaaaggtaatttatgcacaatacaaacttatttttatttaaaacaaatttttaagcctttttataaagtgcgtcatattagcgtcgttgaggaacagtgaaatttgtaacatgggtaggttttttttattttatttgaaggtgaatttctattcaacaatttttaaaaattaattaatgtaaagggcctgttttaaggatgggttggttcatagctggacctactgttatgaaattatctcaaaaattgaaattttcctgaaattccaccgttccgccatcgccgctaacttatcgactctaatttgacgcatacaattttacagatcaagcatagtccccgttaagttttttttttaattcggtgtgtattttttacgacttgtaatacagccacacataaaatactgtttttaaccaaacaaacatgtcgcttataaagaatttggtaaaagagcccgaacagaaggcaaagaaaaagaaaaagaatgcgggatctggagaaagcgattccgatgagaaggacaagcctctgcggccgttcatcaaaaccgcgacagatctacagaggctgaagctggagaagctcatgaagaatccggtatgtgtttgcattggaaagctgggtggacattcatattaataaaccttttattgccaggataagcccgtggtcataccggagcagcgtcgcgaacgggacttcatgtcctcggtgcccacgttcgtgcggaatgtgatgggaagcagtgctggagcgggttccggcgagttccatgtgtaccgccacttgcgacgcaaggagtacgccc

SEQ ID NO: 13766 - DNA, 4690 bp, DROSOPHILA
tctcagccgttaacaacataacgcgttattttctagcgaatcggccgatttatatcctcgataagtaatgtgctgaaaagaacagaactagcaaagacccacttgtcatagatgcgtacgagatcgttaaccaaacaacaatcacgttcgcaatcgaccagaaagacactgaaaatcgaaccgaaatcaccccgagctcggcgagcggttagagttgtgtaacacggacggacgggcccaaaaaaaaaagaaacgtgaactagaactctgtgtctcctccgctggttttgttgagtttttggcgagcaggtgaaacaaaagcatggcgcttgaaacggaggcgaagaattcaaatgcaacggccacgggcgatgcaacagcaacagcaacaaaggccagcggcaaggccaaggagaacaacaacacggccggcggcaaaaagaacctgaatccgaattcgaatcagcagaattcgaatcagaacttggtcaatggcaatggcacggctgccgacgggccggctgcgaagaagaaaggcaagaagaaccgcaacaaaagcccaactgaacccacaaccgaagccgttctgagcaacggacacgccgagaagcccacagtggtggatgcagttgaggacaatgccgataccaatgccaatgtggagaaaccgcaggaaggaggagcaccggatgctgaggctgatggtgatgacattgatctggacgctctgcaggacattggcatcacggtgaacatcagcagtcccggcgccgatctgctctgcgtgcagctgtccagcatggagctggtgcaggaaatccaccagctgctgatggaccgcgaagagacgtgccatcgtacatgcttctcgctgcagctggacaacgtgacgctcgacaatttcgccgaactcaagtcaatcaataaccttgagcagggctcgacgatcaaagtggtagaggagccgtacaccatgcgggaggcccgtattcatgtgcgccatgtccgtgatcttctcaaaaaccttgacccggccgacgcgtacaatggcattgactgtacttcgctgacctacttaaacacgatcactcagggtgatttgctggacaagaagaggacgcgaccggactccgtggattgcactccgccggagtatgtgactccgggtgtaagtgatccgccaattctgccattgcatccaaatgtgaagaacgccaagggaccgcaggctctcaaggtactgactacatccgcctggaacccgccacccggtcctcgcaagctgcatggtgacctcatgtatctgtacgttgtcaccatggaggataaacgattccacatctcagcctgttccaagggcttcttcatcaaccagtcgacagacgacacctttaatcccaagcccgacaatccaagccacctcagccactcgctgatcgatctgctttcccacatatcaccatcgttccgacgtgccttccagaccatccagaagcgacgcaccatgcgtcatgccttcgagcgtgtagccacgccctatcaggtgtaccagtgggcagctcccatcctggagcacacagtggacgctattcgtgccgaggatgcattcagctcaaaattgggctacgaagagcacatccccggacagacgcgcgactggaacgaagagctacagacgacacgggaactgccacgtaagacactgccggagcgcttgctgcgcgagcgcgccatcttcaaggtgcacggggatttcgtgactgccgccacgaggggcgccatggccgttatcgacggcaatgtgctggccattaatcccggcgaggacaccaagatgcagatgttcatttggaacaatatcttcttctcgatgggcttcgacgtaagagaccattacaaggaactgggcggcgatgcagccgcctttgttgccccacgatacgatctgcacggcgtgcgtgtctataatgccgttgatattgaaggattatacacactgggaaccgtcgtcgttgattatcgcggctaccgtgttactgcccaatctattattcccggaattctggagcgggagcaggagcaaagcgtcgtctatggctccattgactttggaaagacggtgctcagccatcccaaatacttggagcttcttagacaagccggtaagcatctgaagattttgccacacgtagtgcttaacgagcgggatgaacccgtggagctgtgctcctcggtggagtgcaagggcattattggaaacgatggccgacactacatcctcgacttattgcgcacgttcccgccagacgtgaacttcctgaagcttcaggacgtgcagctgagcaaggaattagttgatatgggcttccctatcgagcacaggcacaagttgtgctgcctgcgtcaagagctgctggaagcttttatagaggatcgacatgttaactttatccgaattgctgctgcgcgccttcagcagcttactaccataaagcagtctgaaaaatcggaggcgaatcctgttccagccttagaaggagcagaagcggcaagtaaagtgaacggagctgaaaaacccgatgacaaggagaagaaaaacgaagaggaggagaagaaggagaggtccacttctggcgaggcaagggccgccgccattgttaatgccatccgggaagcacagtccaatgtagctacttcgaatgaggtgcaagctgccgaggtagtaaagcgggcttgcgccgccgttggatcgctgaaggagaaagagtttgacttccgcttcaaccccgacgtattctcgcctggcattcgtcacgcggatggcgaggagggcacctcgctggccaaacagaaggtgctcgtgcaggaagcagccgagtttctcgtccttaagcagatacccgcctttatcaaggaacatatgtcccattcatcgtcaccaatcgatggccagagtctaacagaatctttgcacagtcacggcatcaacgtgcgttatttgggcaaggttatcaaaattttaagccaaatgcctcgcatggattacctgcataggatcgctgtcctcgagctgatcgtacgggccaccaagcacatctactatacgtacatgcagaatacagagccgctgcacctctctgctgccatcagccacttcctcaactgtctgctgaccaacggacccgtcaacccggccgtgagcagcgaggaggcgcacaagaaacgcggcaacggcggtaagcacaacaagcacaagtcctccaagggcggaaagggtcagcagcaacagcagacgacaggcaatcagaatggcagctcgtctggctcctccaatagttcatccgcatccgattggactctgatgacgccccgatccctgtggcagcaaattcgtaaggaggccaaggtctactgggactgggaattggattgtgactcgattgagactgcggtctccaaatacggcatcctgcgtatcagtctgatgcgcgccttctgcttgaaggttggtattcaggtgctgctgcgagagtacaacttcgagtccaagcacaagccaacctttggcgacgacgacatcgtcaatgtgttcccaattgtgaagcacattagtccccgggcaaccgacgcctataacttctacaccacgggccaggccaagatccaacagggcttgtttaaggagggctatgagctaatcagcggagcactcaacctgctgaacaacgtatttggcgcattgcatcaggaaaacggatcctgcctgcgcatgctggccaggctcagctacctcttgggcgatgcccaagatgctctagcgatccaacagcgagcagtgatcatgagcgagcgggtgaacggcatggaccacccatcgaccatattggaatacacacacctatcactctattcgtttgctaacggacatgtgggaatgtctcttaagctgctgtacagagctcgctatctgatggtgctcatctgtggtgaagatcatccggaagtggcactgatcgatagcaacatcagtttgattttgcatgcgctgggcgaatacgagttgtcgctgcggtttatcgagcatgccctcaagctgaacctgaagtactttggcgacaaggatatgcacgtggcactcagctatcacctgatggcccgcacacagtcctgcatgggcgacttccgctcagcgttgaataacgagaaggaaacgtactctttctacaagtctcagcttggcgagaaccacgagaagaccagggactcggccgagtgcctgcgtcttttgacccagcaagctgtgctgctgcagcgcaagatgaacgatatctattccagtggcaaactgaccagtgacctgccgcccatccacatcacaccaccgtcgatgggctcggtcctggacatgttgaacaccatcaatggcattctgtttgtaaagattagccgaaaagacattgtcaaggtgcgcagtgaaattgaaaagcatttcaagaccgatagcaccgagaacgaggtgaatgatgctatcaactccattgtggctgctgctaacaacaatggcgaggccgaggatgcggtatccaaggatataaaggagcagccagaagcaggcaagcagctaacaaatggcgacaaggcggcagccactgaggcgacttcaagttgaacgctcccaatgggcgatgtt

SEQ ID NO: 13767 - protein, 1448 aa, DROSOPHILA
MALETEAKNSNATATGDATATATKASGKAKENNNTAGGKKNLNPNSNQQNSNQNLVNGNGTAADGPAAKKKGKKNRNKSPTEPTTEAVLSNGHAEKPTVVDAVEDNADTNANVEKPQEGGAPDAEADGDDIDLDALQDIGITVNISSPGADLLCVQLSSMELVQEIHQLLMDREETCHRTCFSLQLDNVTLDNFAELKSINNLEQGSTIKVVEEPYTMREARIHVRHVRDLLKNLDPADAYNGIDCTSLTYLNTITQGDLLDKKRTRPDSVDCTPPEYVTPGVSDPPILPLHPNVKNAKGPQALKVLTTSAWNPPPGPRKLHGDLMYLYVVTMEDKRFHISACSKGFFINQSTDDTFNPKPDNPSHLSHSLIDLLSHISPSFRRAFQTIQKRRTMRHAFERVATPYQVYQWAAPILEHTVDAIRAEDAFSSKLGYEEHIPGQTRDWNEELQTTRELPRKTLPERLLRERAIFKVHGDFVTAATRGAMAVIDGNVLAINPGEDTKMQMFIWNNIFFSMGFDVRDHYKELGGDAAAFVAPRYDLHGVRVYNAVDIEGLYTLGTVVVDYRGYRVTAQSIIPGILEREQEQSVVYGSIDFGKTVLSHPKYLELLRQAGKHLKILPHVVLNERDEPVELCSSVECKGIIGNDGRHYILDLLRTFPPDVNFLKLQDVQLSKELVDMGFPIEHRHKLCCLRQELLEAFIEDRHVNFIRIAAARLQQLTTIKQSEKSEANPVPALEGAEAASKVNGAEKPDDKEKKNEEEEKKERSTSGEARAAAIVNAIREAQSNVATSNEVQAAEVVKRACAAVGSLKEKEFDFRFNPDVFSPGIRHADGEEGTSLAKQKVLVQEAAEFLVLKQIPAFIKEHMSHSSSPIDGQSLTESLHSHGINVRYLGKVIKILSQMPRMDYLHRIAVLELIVRATKHIYYTYMQNTEPLHLSAAISHFLNCLLTNGPVNPAVSSEEAHKKRGNGGKHNKHKSSKGGKGQQQQQTTGNQNGSSSGSSNSSSASDWTLMTPRSLWQQIRKEAKVYWDWELDCDSIETAVSKYGILRISLMRAFCLKVGIQVLLREYNFESKHKPTFGDDDIVNVFPIVKHISPRATDAYNFYTTGQAKIQQGLFKEGYELISGALNLLNNVFGALHQENGSCLRMLARLSYLLGDAQDALAIQQRAVIMSERVNGMDHPSTILEYTHLSLYSFANGHVGMSLKLLYRARYLMVLICGEDHPEVALIDSNISLILHALGEYELSLRFIEHALKLNLKYFGDKDMHVALSYHLMARTQSCMGDFRSALNNEKETYSFYKSQLGENHEKTRDSAECLRLLTQQAVLLQRKMNDIYSSGKLTSDLPPIHITPPSMGSVLDMLNTINGILFVKISRKDIVKVRSEIEKHFKTDSTENEVNDAINSIVAAANNNGEAEDAVSKDIKEQPEAGKQLTNGDKAAATEATSS

SEQ ID NO: 13768 - DNA, 12261 bp, DROSOPHILA
ataggcaaattcatgcatgtttattcaggctcaaaaacaaaaccgtttaaatgggtgtgcaggcaatgatattgacgtgtcaaataatgatattcacattccgcagaaactccaattatgatccttcagtgtaatgggtatttgtttttaggagcctgattccaatatcttgctaataaaatatgtggctcagttttgacagagttacgatctggcgtggcataactgcgatacggtcgagatatgggagcaccagcacaccccttcgaacgcccccttcgagttccagcccaccgcctacgcccatgtggctgtgtgcctcgcgtcctaccttcctgcccagtgggactgggactccattgcacaggcagcaccgcataccaaataccaaacaaacatacgaaaagatcaacaggctgctgctttgttgttgtttgcctttcgtataccctaacaaaaggttactagctcttatatatctaacgttatttctgcaaatctcaactgggcatatgtgtttacgggatatcatgatttgccttgtctatcatcgcgttttgttatctggattatccagtgttgggttttgtagatgcgttaacataaagtcacaattaacacaaatcttacgttatcgaatatgaaaatctgaaacttcgtacataaatgtataatgagcttatgaaagatcatatcaagttcgcctcaaattggcagagatataagcattctgtgagggtattccatggttcgtttgccgaaacagtctctcctttcttgtttttgctttatccagcaggtagaagaggcaccgtctccttgcctcctgctcctaactctcctcccccctcagtccggttgcattgcaaagcgctcaaatgaaacgccgactgagacgccgactgcgacttgagactatgggtatgggtatgggtatggtatatgggtatttggtattacctgaagtctggctcagtcgccgacgattttcagtccgctggcgaacgttgttgcgatcacaacgtcttggctatcagttctccgtctctttgctgcccagattcagattctcagttctccgttctcaattctccagctcagattcttcgccggcgtgcgtgtgtgtgtgtgtagtgttgtgagcgtgtgcagtggagcccgtgtcagtgtgttagtgctggcccgttgctaaaattattattttttttaacgaacgttggctttttttttgctgtgccttccaaactggttgctgctcttttaactgtgtatttgtgcagcagcagtagcagttcaagaagaagcggcagaatctagctgcggaagaagaagacgtcgaagacgctagagatcacgaaacgaaagaaaaataatagcaactgtagttgttgttttcttctcggggattttcgttggataaatcccgtatcatagccccaaaatagctgagatttcgaaacagatccggaataaaacaccagcatgccctgctcggccgtaaccctatctatagcgacgatctgcgcgatcatcgccaccgccctgctggcgatcgccttctccacggataattggctgcactacgatgtctggcgcaaccagatacaggtgagtcttcaatctgcagtctacagtgtctttagtcttcagtgccagagaaggtgggggctacgaatcgaattaacccaaggcccatccgcttggaatacataatcagctaaggccagagccagcgccaccgaaatatacggtgcatctgcgactgcgtggcagaagccacagccagagacagagttacaaccaaagccgaagactctcccgcttaagacggagctttagctccgcttacgagctctgcacattggtcccagagatgtggctaaagtagatccaggctgggattaggcaatagcttaagaaatcggaaaagatcgggttcaaagtcgtgcaagacaacgatataatggtacgatacaatggaaatatttaaaatgggtagggaaattgaaaatatcctaatttaggccctacttatacaatagatattagttgttgaaaataacttgctagagtttaggacttcgtcttctggaaagtatagcagagtactatattatattattaaatatattttgaaaataagtggcttcatttcacaaatgccattggaagcatagtaaataaatacgataaggattaaagttttcatacttaattaatattaaaaccggaacgaatatctccataatttccaaggaattaagcccgttcgactatgtccagagaataatgtgtattatattttactaataatagtaggagacatttagttctacaaacatctttgcatatcttttaaaatccgtcctcttccgagaatcttatctatagcgatgcttagataaacaagatatgtaattaagatgcacttgctgacatttgtgcactgcatacaggtgtgcgcggcccactgtgcggagtaggagggcgagaaaaaagaagcaggaggaggagtaggtgaaaagggaggagaggagcggagaggcaaccacgaaggcaacagcaacaaacggaggtaacagtaacagtcgctcgttttgtgcttggccgaaagaaaaagaaaaagggcaaggcggagaagaagaaaggtcgaaagcaaatacacgaacaactggcattggaaggaggtgggtagggaagaagggagggagtggtgcggtgttgatcgagaggggcctgtggaggatgggcaacggccgttaacgttcaaactttctacgcgagcgcttagccaagcgaaaaaacgaagaagagcccaggcagaagaggccgcagaaaaagaagaaaggggcggtgaagtggaaggagtacacaattttacagtttgcattgcaaatacagtcaaactgcggattacaacacttcccattcttccaagtaatctaattttcaattttatgttggttacttcactatttatgaaatacaactagctaactgaaatctcagttataatccgcctcttaaagggccgaaagcaatcgcagcatatgtgtgttttaatttctttcaaataagcagcagtttgtcttaatgaagtggcactgtagaaaatccaactccgtcttgtaggtgcagccgagagaattttagatgcggagagctctatagaaataggtgtaaaatcgcggcggtgtgcgtgcgcataccaatcataccaaaacaagttagctaaacaaaaaaaaaaacaataaaaaacaaagctgaagaagaggaagaaaagcactcaaagtgtgctgaaaatatttgcacgtttttcgactttgtcgcctaatccgaaagtttcaatggaatcgagggaacgataattgcggtgagattcgttcgaatctcgcccagcgtcgaagtcttcagagcctgggcacttataaagccattagaagcaatcgtctgccttgacctcccccattttgggtcatcgctcccttctccccatccacgtttcttgttcctcctcctcctccacctccatctcctccatctccatatctccgttctccttcgatttccgcccctgtaagagcctttgaagaaccgctcaggtgcagcaggtaactcgagatgggctacttggccacaggaaaccctagggtcctatgaagtgcatccccaggggagtggagaactaaatacccacagcgattatgagcgctactcaaagaatgggaatccgggggagtcagtcgagggaatcatgatgatggtgtcagaatatcatcacttccaacctttctttagctaattacagatgttttcttcgaaagaagtcaaatggaaactattatggtggaaaaggaagctctgtgttgttactttcctttaaatacccctatatcttatattatctttaattgtatgtcttgttggtatatgtacattagattgcatactgtttagagtttaattcttccttttcttagcctgcaggctgcccttttccttgaattttccagatcttcgccctgaccactagcttcaccatctacttcttgatttccccaccgatcctgctcctcgttgggtgggtccatcgtgttcgaagtactcttgtagtggctggcatgccacagccatgtcgttttttggttttgtcttaggccaaagcatttggctttggctttggggcgttggatcgtatccacgcctatatcgcacagcagcccctcgccctccgcagacccaccccacgaactggttttcgagttgagttttcactcgtttcacgttttcgagacaagcacgacgactcaaaattggtatgcggctagttggccggtttggtttgccacttcgctttttggccctaactcgcaggtggtgcttctctctcagtctctctctctctctctttccctctcttcttgggctgggcgagggggggtgggtgtctgatatccccgggcacccaagcccaaattgatggagctgcgttttggccgtgtctttaactccaatcgcggggttcgttgttcgatcggtgaaaagagaaaacccttctccccacgctaagaaaaatgaattataaactgtgatgatcgtagacataaggtcatagtatgttgtgcgctctgattaactactcagataataaatatctttgacatatgctagctatttaaatttcaatagaacattgtataacaagtaattagctagttttctcctaagatattccataataagcccaaagtattgggaatttctggcgcattgttaccccttttcttttcgagacttcaaaacctaacccatatatttatttacaaatattttttctctgcgtgaatttgcgatgtgcaaaccttgattttgccgtgtcttcgatttcattttgcagcagtctcactttgggcaatgcaatgcgatgacaaaaaagccaaaaacatatctggtacgagtatgtccaatggaaaaagcggttgaaacacaaaaacccaaaagcaaaaccaaaaccaaatcaaatatcaaatgaaaagctggcgttgctcatttatttagttggcccggctctttccagttggccgttttccctgccatttggcaatgaatgaatttcgtgctgggtctttacgcttagtaagcttttttgtcggcagaaagacgaagcgaaacaaacacatgttaattcgcgatgtgaaattaattattttcagctggggttgcgcatacgccgtgtgtgacagaagatttcttttcttcttcattcggccacctttcctcgcgttttttacggcatttcaactgaagtggaactcagttgctttttattttgaatttactgcaccgccgatggctattgacgccatcattgagtacctaatttattattttattgctgacatcatgtgaaattccagcttgattaatcagcacttcccgcgattgacttgaattagcatcgaattaattgtacttggctcgaagccaatagaatttgttttgattttagcctgggagaattttggataagaaacggagattatcggcaactggtcgctgtttccggttccaaatggctttctttctagccacataacgagtcaattatatggaaagggagtttccacaaactcttcaaggagaaacatagtcaaaaatattatatttccattgataaacaatgattccacgtgtaaatatttaacacctgcgaaattgttattttccagcgaaaaatcgaatgtataaattagatatatatttccaagattcacaaaggataaacaatgattccatgtgtaaatatttaacttctgcaaaatcgttattttccagcgaaaaatcgaatgtataaattcgatatatatttccaagatttacaaaggaacagcagcagaaatatgatatttatgttgatatctttatatcataaataataaaccatttcaccagaaaagttttcgaacacccttcagattgccgttttccagcgaataatccggttccggcaattgaaaattaaggctatgcgatagacgaaactcaatttcatcgcaattatccgcatgcgagattctttcatctcgaagatcgcagcatccgaggttcctcattatggcgaccgcttgagcgtgcgattgaaaacgctttcgcttcccgcaaaagtggaaaaaatatatataaacaaaaaaattaataaaaaatataaacaaattgctggatgtaaataaaagacgggcagagcaaaccaaatttgtgtgtgtgtgccacttgaatcaataaacaaatcatttgatttcaatcaggtttcaggtttctgctgctccccactattattatattactatttcattatcgcctctttattttcaacaattttggcgacttccgcgtcgcagattcttccacgaaaaattgtacaaaatgtaattgcgatctttgtatctaacaatctgtccatctgaagatccgagtatctgtgtgggccacgagtgtcaagaatgcgatgtcgaattgaaatacctcagcgatctttcctcaatgtcgtgctcccacgaccttttttcgttttttcagttttttctggttgttttttttttttatccgtttttgacaaatcgagaaaccagaaatagagaaaccagttgttcgatggcttaaattgatgttgtctgtgcatcggaattgttgcaaactgttttttgttttgtattgtcttgggtgcagtgtgttataaattattcattaatggctgcactgcaacaaaatgggcggcataaacgactagaagtgtttaaataaaggctgccaacaggtgttattctgaaacaagctgtcgggatagtaaaacaattttctgaaaagtagtatttaggttgaaatataataatactcaatcatatgttatatatatcatataacttaggagatcaaataatacttaaaggtaactgctgtgtttactgatttttctcttgaaatatatttgagatattcactttgtttatattaaagcgtaattgttgttagccagaaatacgtagaatactcgcattactaatcccattggtatttgttcgcccgagtgggaggtgttccaatacaattcaacggaaaatgccgccggtgggcagaatttgtgcgtccttgacttgagtgcatttcacgattggttgtttttcacgttttggagttggggaaacttggagcacagctgctgtccatccatcctgtccctgctcccaagaaccgatccagtttgcccctctcggcgggctttaattcatctggtttcagtcgcacaaatgccgtccgattggctaatcaccgacatccgtcgttgccacaaaatggggtttacgaagcgaagggggaggggttaggcggttggggtctgctctgcactcttggcagtaggtagtaggccccaaactagtttcgcatgtgctgcggcccgggtgtcataaaaatatttatgccttgccaacttaccaacttaccaacttgccagcttaccaagtgtccaactgagccactgagctctggaaactgaggcaaccaccaagccaccaaaccaccgaaccactaagccactgaaccaccaagcagccgattgccaagtggttgcagttccgcagttccagcgatcgaatggaattcctacacactgggaacttgaatttaaaatcatttgattatcattatgatcgcttgaaatattattacaatatacaaactacgattagaatatatcaatcgacttttagtgcagtacaaaacgctgacatatcttaaaatgtaatccctgtttttagcagtcacccgttttaagcgattaatcgtggtttagtgttccattcatgcgattatcttatcagcaacaaattaaatcttttttgacacagcctttcgcaagactttctttccgattcgattgaagaaagttgttgtgccgcagatgaaatcgcattgattgcggttcccagaacaacgtgcataattgtactatagtttatcatatattttatcatattttctccgatgcactgcgttgcgtttcaatccgatcagcgatcaaccttgaagcacttttcgcattacagttttgttcgcaatcgatatctccccatgcgtaaccccttaaccacatgactatatagatatctgtatctgtatctatataatatgccgtattaatccagctaaccaaccgataattcgaatcgctctcgttttccacctgcatctccaccctctttccgatttcttcggatttctgggcatttttgtctccccaacgttttttgtttttttttttcttttcacagcccaatgcgtttctaatccaactcaggggcctctgattccccaatgaatgctgcacaatttagtttgttgcatctgttatacgaattaccagttcgaggggcccttaattgccccagactttcataagaaagttacaaaattaatccgctgaagaggcgctaataacgaggtagccctgcgagccaagcgaaaacatttcccaatagaagccaatggtagtggtaatggggatagttggatagatggatagttggatagatggatagttggatagatggatagttggaaagggaaatggaaatggaaggtggaacgccctaaccagttcacgctgccctgaccatcgtcgtctccagacgaaagttacgcaagcgaaaatcattttccagccagccggcgatttacataagcgcccagttcgatgcatatatgtatgtacatatttgggtatagatagcaaaaaaaaaaaaactgaaaactcttttcgatatgaactgggcgtcgaacaccccacctcttaaatatctcctttttttttacatttttttggtatttcccattgttgtttaagtaccggacataaacaagtttttcgactccatttcttttgcccctcatgaaaatgcatggctgcaatggagaaaaactcgtctcgtctcgtctctcctcttctttgtatgcgatttccctcgccacttggtagaaaaggtggaaaagccaacgatcatccgcgtcaaccgaaatcgtagaatttctggcaaagtgccaaaacgtgaagaacgtgatatcactcggaatagttggatttcactcgcagagaaatttctgttgattagggatcgaaatactatacagcactacgtggatgttccatggtgttccaaacacgattccacacactcaatggacagtagtgggtttcgaatgttgatttaatcgaatgcgtcatattttaattcatctatgatcacactttagattggagattcaactaaaggtgacttatgatgaatttgagtaaaaatgatgttctcattcatattgactgatttggtataattcccatatcaattatgatggatagtattgcttataagcattggctgcacactagactctttttcacatggatcaaagatcatatctgggttatatcatgatagatcttaattatcagattagcacacccattaagcccaaggccgcaacattaactgagttaccaaacgaactccgctgaggcacgacccctggtgacaatgatcagctggagatctctgacaccgccggcacagccttacagcccagaaacgcactgtacaatgtatgcatcatgaaccttgggtcgtaaacccgcactcgagaattgctcaagccagcagcaaatgccaaaaaaaaaaaaaaaacaatggaaaaccgcggaacgtgttcaaattgccacgcaatctgatactagggccatatagcatacaacacttgagcgtatgccatatagcacctatagcatcatatagtatatagcatatagcatatagcatatacgaacccacaccgtacgaacatccgtatatcgttaagatgaccggatgatgatgatcgacagcggttcaatgctgactgtctgtatttctcgctgggattgcgactgttaatggagtctggggcgaggtagttggacacattatcaagatacgcccacgagggggcggaaacaggttttattaatgagtatgtattgaaaatgtgatggtgagggggtggggggggcttagtgtacaattcgattgaataacaattggcgacgtgagcttgaattgcggcgctaattccctaagaaggttaatccgcgggctataaataaatgtgtggctattaagacaagtatgggtagggccagagctaagagctaagataggatagtttcaaacacttgtaaccataactttgaactgcaattgagcttagctaatatggactatcctttcgatttcagtcctttgccgccaagcactcggatgcggagtcgttgttgcacaacatgaacgtgaagtactattactacacgaggacacgaggcttgttccggatctgctatcccaaggagcggccgccagtttcagcgggtgagtaatgctgcattttacatcacatgggagttatttaatccatttccattcccgtcgcgcagtgcccacctatttgtcaccgatcgagacacactgctcgaacatcgactacttcccgcaggcggaggacgagaagatcgccaacgaggacgccacatcgcgtctccatttggcccgctcctgcatcgctctgttcatcatcagctttgtgaccatcttctgtgcgttctggaccggattatccggctgctggaagcggtcgtcgggcgccatcacagccacctcgatactgctgctagtcacctgtctcctggccgccggcgccatgggactctggcacaccgtcgagttctttgagaaggagaaggtcgtgggcgaggattacttccagcagtggaacacggtatgtacaccagctgcattgggcatgtatgtggattaactaatgatgaatatcttgatttattaggtcctgcgcgacaacacgaagatcgcctacgactggtcgtacatcgtggcctgggcaggaatcggaacctgtctcctggcgtccattctgctctccggcgcggccgtttgcctgcgcaacgagcgggagaaggaggagcagctgaacctgcagtacctgatgccaggtatgtccatcgtgctgaccctctaatataactaatgactaattttcggtttccatttccagtttactcgcagaagcagccaccctatcccccttatgccaactacgcccagccgcagatctacccaggaccttactatcatggctcgcagtacggaccctacaactactagaggcacacccgaaggggccagccagcttcagccagcagctgcaattgagttatagagacatagagatcacaaatcatgaccaggagggaacctggtagccctccccagtaatcaaaatagagcaagcgctaacgaaatcttaaaacgcatacattctgacaatgaaaatattacttaaagcatcaattttttttttcgacaagaatctagtttgtagtctatatagagctatatagtatatatatatatgcttgtatgtataactgatcgtgggacttgagtcaaagttgcgtccaagtttttggtgcgcgaattgtttgcgcgttattttgcaaatatctaagagagacgaatggatggatggttttatatgttgaccacggcgagatggcgatttaaagacggaacaataaagagttaatttattgtagcacgtaacgtacatgtagcgtatctaaaataataataaagaaatatgtgtatgtatctaagctaaaagtttcattgtacaatgtatatgaatgtaataatgcgcgacaagcttcaattgtcttccaagtatagtgcatattgtatgtagagctgtacgtttaatgaataaaagtttcttacgttaatttaacagtttttagctccttttggcgggacttcgtttttgtttttccacaactggggtattcaagttttgttaataagcttatcaagtcgtgtgagagaaatttttgactttattaaaactaaacagaattgtagtcttcatttcactctgccatttgttctcgtttcgttaattccgaaatattttgaaattgttgtttctgatagttaatattccacctattggtccacctattatgccaatgtggtgttatgtgatctggtagaaatatgcttattgtttaatattttggataagcttcattagatttgttcctacatttaaaaatcgatttctaatttagccgttttttttaaatggccagagccagagttgccaccc

SEQ ID NO: 13769 - DNA, 1355 bp, DROSOPHILA
gcgaacgttgttgcgatcacaacgtcttggctatcagttctccgtctctttgctgcccagattcagattctcagttctccgttctcaattctccagctcagattcttcgccggcgtgcgtgtgtgtgtgtgtagtgttgtgagcgtgtgcagtggagcccgtgtcagtgtgttagtgctggcccgttgctaaaattattattttttttaacgaacgttggctttttttttgctgtgccttccaaactggttgctgctcttttaactgtgtatttgtgcagcagcagtagcagttcaagaagaagcggcagaatctagctgcggaagaagaagacgtcgaagacgctagagatcacgaaacgaaagaaaaataatagcaactgtagttgttgttttcttctcggggattttcgttggataaatcccgtatcatagccccaaaatagctgagatttcgaaacagatccggaataaaacaccagcatgccctgctcggccgtaaccctatctatagcgacgatctgcgcgatcatcgccaccgccctgctggcgatcgccttctccacggataattggctgcactacgatgtctggcgcaaccagatacagtcctttgccgccaagcactcggatgcggagtcgttgttgcacaacatgaacgtgaagtactattactacacgaggacacgaggcttgttccggatctgctatcccaaggagcggccgccagtttcagcggtgcccacctatttgtcaccgatcgagacacactgctcgaacatcgactacttcccgcaggcggaggacgagaagatcgccaacgaggacgccacatcgcgtctccatttggcccgctcctgcatcgctctgttcatcatcagctttgtgaccatcttctgtgcgttctggaccggattatccggctgctggaagcggtcgtcgggcgccatcacagccacctcgatactgctgctagtcacctgtctcctggccgccggcgccatgggactctggcacaccgtcgagttctttgagaaggagaaggtcgtgggcgaggattacttccagcagtggaacacggtcctgcgcgacaacacgaagatcgcctacgactggtcgtacatcgtggcctgggcaggaatcggaacctgtctcctggcgtccattctgctctccggcgcggccgtttgcctgcgcaacgagcgggagaaggaggagcagctgaacctgcagtacctgatgccagtttactcgcagaagcagccaccctatcccccttatgccaactacgcccagccgcagatctacccaggaccttactatcatggctcgcagtacggaccctacaactactag

SEQ ID NO: 13770 - protein, 290 aa, DROSOPHILA
MPCSAVTLSIATICAIIATALLAIAFSTDNWLHYDVWRNQIQSFAAKHSDAESLLHNMNVKYYYYTRTRGLFRICYPKERPPVSAVPTYLSPIETHCSNIDYFPQAEDEKIANEDATSRLHLARSCIALFIISFVTIFCAFWTGLSGCWKRSSGAITATSILLLVTCLLAAGAMGLWHTVEFFEKEKVVGEDYFQQWNTVLRDNTKIAYDWSYIVAWAGIGTCLLASILLSGAAVCLRNEREKEEQLNLQYLMPVYSQKQPPYPPYANYAQPQIYPGPYYHGSQYGPYNY

SEQ ID NO: 13771 - DNA, 4222 bp, DROSOPHILA
tcggaatctccaggagtcgaagctgtttcaatcaattccataattttatttttttcgcccaattttaatttcttacgaatcctgcgaaaagttcgaaaacttggcgatgatggtgacagttcctgagttgacaaaagcttgctgatattttgtaaaaagggttttcatttcatcatttacccgattatttttggcgcccagttttaagtttttattatttttttaaattaattacctacaaatgttgagtctgtttttaattatcgcgagaaaaagtacacacgtactgataattcattaaacacttttttacaatatttgtctagtacatacaattgttaattgtttctacaactacttataactcatttagtcaatatttgtttgaattcccagacagggggcgtaaaaaatcagactggaaaaagtaaacaagcccaattaatttgcgttttaagggagtacttatttggcgacagggtgctctatttgcgcagcctgttattgttatgctgtccagacttgttaaccaaacattaaacaaatggccggtgctgtgccgtgccggcaatttgtcacctaattatttgtcgacgctgctaatcttacatatgggcaaaattggagaatgcgcgataatcaagtcagtgaacttaatatttgcatggtaatttaacagacttaaagtgaatttttaacttaaattttagtaacatttggattttaactgcacatatatgcctttattattttataaagtttgaatcaatgaatttttatactaaaaatgtgtgctagtactagaatgaattgaaattatttataataactggaacgtgttgctatcgatttttttttgtcaaaatttatcttttttattaaaaattgaatttctacattaaatgttattgatggtattttgtaacggctaattcaaatgatcaacggtcacactagccagtggagctgccagctatcatttgaaattcaagtaaagttggcagccccctggcgtctgaaaaatagcgcgaagtgaagtaaactaaaaagtatcccttcaacccacataaacagcgcaaaatggacagcaaggaggtttcggaggtgccaaggcgggaggtgcgctccttcctgatggcccgggatccctccatcgaccgccgctttcgaccgcgacccaacaaaaagatgcgtctgtttgacaacattcaggagtcggaggaagaaagtttttccgaatactcggacacggaatcggagtacaagtaccagtcgagcgaggcaaccgaaggggcctcatgcgctaccagtgcggcagacagcagcaacgtggaaacggggccacaggtcttcctgcgcttgcgtcccgttaaggatgcatccaaagcctacatagtctcggaagaagcaaatgtgctgatcactagctgcaaagtggactcgaccagcaacaatgtgaaccgcatggaaaaacactttggattcacttccatctttgacagcaccgttggccagcgagacatctatgatacctgtgtgggtcccaaaattatggaggaggaatgtgtgaccattatgacatatggcacatcggggtctggaaaaacgtataccttactgggtaagcgaagaggacttgcaacaagtttgctgggcaattgttaatttaaatccatttttaggcgatgatgtgcgtgctggaatcattccgcgtgccctggaaaacatattcaccatttaccaggacaccgtcttccgatcgcccaagctgaagctaatcaatggcagcatcgtgttcttgcaggacgacgcctcgctgaaagagctgcagattcggaaaaaacttttagacttatgtccggatatcagtgcccaccatcagcgtctgaagcaggtcattgatggcgaccacatgttcgaaacgaaggcttccaccgatgtttccgtcttggtttgggtgtccttcgtggagatctacaatgaacttgtgtacgacctgctagccattccgccgaaacaggacaaactgggggaggtgccacgaaaaaacctgaagatcgtgggcaacaaaggccatgtgttcatcaagggtctgaccagtgttttcgtgacgagcagcgaggaggcgctgcgtctgctccggctgggccagcagcgctccacgtacgcctccacctcggtgaacgccaactctagtcggtcgcactgtgtctttaccgtggacatactaaagtacaatcggtcgggcatcaccacacagagttcgtacaaattctgcgacctggcgggttcggaacgcgtcaacaacacgggtacctccggccttcgtctcaaggaagcaaagaacataaatacgtcgctgatggtgctgggtcgatgtttagatgcggccagtacagttcagaaaaagaaaaacgccgacatcattccatatcgcgactccaagctaacaatgctgttgcaggctgctttgctgggcaaggagaaattggccatgatcgtgacagttacccctctggataaatactacgaggagaacctgaacgtcttgaactttgcttccatcgccaagaacatcatcttcaaggagcccgtaattaaacagcatcgcgtcagctactgtggtttcatggaattctcaaagatgtcgacgtgcgagggcggcgactacaccaaggaacttgaggacgaaaacgtgcgcctgcagttagagattgagcaactgaagtacgatcatgtgctgcaaatgcagctgcttgaggagaaactgcgaagggaactgactgccacctaccaggagattatccaaaacaacaagaagcaatatgaagacgaatgcgagaaaaaattactaattgcgcaaagagaatcagaatttatggttagtaaatataacaatataatataatagtatataatataaactatatatttaacagctttcctctcaacgccgaaggtatgaagaacaaatagaagacctcaaagatgagatagaggaacttaagaatcctgcaagcgacacggacatttctgatgatccaaacgaatctaagtctcccatcgaaatcctcgatgatgattagtttctttaattcacaatttttaatttgttaagtgttagtgattttaaaatttaaatttgaaacttgatatgttgcagagttggccacgttttccaataaacatgtgaatgatcaataaactagtgacacaaataatgatgtgattctgtgccaagaaacttcgagcaagaataccagaatcgcaattaccataaatgttccgtacgcctgccacatccactgaaaatccacaatccttagcgaggtagggtgctctctttccttcaactgcaggctgggatcctccagaccggacaatccagctgctgtcatgtcgtagtagtgcattcccacccagaagtcatagagtccattggcatttacctccaaaataagttggctgacgggctctgtgaacaaggaattctgcggccattggaaagagagcagcgccagggaccacaggcagtcatccgtggagtagataaacagctctcgggtgaagcgcttctgctgctcactgaacaaattccaatacagtcgggaggcgaagtaggcattgcttgtgttccttccattcctcaagtgattgtactcactcacattgaccaccagcatgggcacacgcagtttcatccatgtgggaaagtcttcctcggtcgtaaccaatggtattttcgtgcgacgcagaccagcgaaacttcgtgcttgaaattgccgtggtggatgagccattaatgtgtccagtcccgctccaaaaatgctgctcacattaagacccactattccaagcatcagaaatatcaacctggtggagaagcttctcgacaagggcaaattgaaggattggcccaagattccgcgtaaagctttatcatttagcacaaagtccaccagacgcacatcgcgatgggtcatgtttcgaaggagattcaaagccaatccataactggaaacaataacaatagccaggaacatattggaagcactgctcaggataaagtaaatatccttaattggaattcttctggccaccggtaccataaggcagacgtgggtcacctccatcggatagcttgtgctggccaactgctcgactcgctccattatcgtcagactggcaggaacatcaactgaaaagctctcgctcagctcct

SEQ ID NO: 13772 - DNA, 2103 bp, DROSOPHILA
gcagccccctggcgtctgaaaaatagcgcgaagtgaagtaaactaaaaagtatcccttcaacccacataaacagcgcaaaatggacagcaaggaggtttcggaggtgccaaggcgggaggtgcgctccttcctgatggcccgggatccctccatcgaccgccgctttcgaccgcgacccaacaaaaagatgcgtctgtttgacaacattcaggagtcggaggaagaaagtttttccgaatactcggacacggaatcggagtacaagtaccagtcgagcgaggcaaccgaaggggcctcatgcgctaccagtgcggcagacagcagcaacgtggaaacggggccacaggtcttcctgcgcttgcgtcccgttaaggatgcatccaaagcctacatagtctcggaagaagcaaatgtgctgatcactagctgcaaagtggactcgaccagcaacaatgtgaaccgcatggaaaaacactttggattcacttccatctttgacagcaccgttggccagcgagacatctatgatacctgtgtgggtcccaaaattatggaggaggaatgtgtgaccattatgacatatggcacatcggggtctggaaaaacgtataccttactgggcgatgatgtgcgtgctggaatcattccgcgtgccctggaaaacatattcaccatttaccaggacaccgtcttccgatcgcccaagctgaagctaatcaatggcagcatcgtgttcttgcaggacgacgcctcgctgaaagagctgcagattcggaaaaaacttttagacttatgtccggatatcagtgcccaccatcagcgtctgaagcaggtcattgatggcgaccacatgttcgaaacgaaggcttccaccgatgtttccgtcttggtttgggtgtccttcgtggagatctacaatgaacttgtgtacgacctgctagccattccgccgaaacaggacaaactgggggaggtgccacgaaaaaacctgaagatcgtgggcaacaaaggccatgtgttcatcaagggtctgaccagtgttttcgtgacgagcagcgaggaggcgctgcgtctgctccggctgggccagcagcgctccacgtacgcctccacctcggtgaacgccaactctagtcggtcgcactgtgtctttaccgtggacatactaaagtacaatcggtcgggcatcaccacacagagttcgtacaaattctgcgacctggcgggttcggaacgcgtcaacaacacgggtacctccggccttcgtctcaaggaagcaaagaacataaatacgtcgctgatggtgctgggtcgatgtttagatgcggccagtacagttcagaaaaagaaaaacgccgacatcattccatatcgcgactccaagctaacaatgctgttgcaggctgctttgctgggcaaggagaaattggccatgatcgtgacagttacccctctggataaatactacgaggagaacctgaacgtcttgaactttgcttccatcgccaagaacatcatcttcaaggagcccgtaattaaacagcatcgcgtcagctactgtggtttcatggaattctcaaagatgtcgacgtgcgagggcggcgactacaccaaggaacttgaggacgaaaacgtgcgcctgcagttagagattgagcaactgaagtacgatcatgtgctgcaaatgcagctgcttgaggagaaactgcgaagggaactgactgccacctaccaggagattatccaaaacaacaagaagcaatatgaagacgaatgcgagaaaaaattactaattgcgcaaagagaatcagaatttatgctttcctctcaacgccgaaggtatgaagaacaaatagaagacctcaaagatgagatagaggaacttaagaatcctgcaagcgacacggacatttctgatgatccaaacgaatctaagtctcccatcgaaatcctcgatgatgattagtttctttaattcacaatttttaatttgttaagtgttagtgattttaaaatttaaatttgaaacttgatatgttgcagagttggccacgttttccaataaacatgtgaatgatcaataaactagtgacacaaataat

SEQ ID NO: 13773 - protein, 628 aa, DROSOPHILA
MDSKEVSEVPRREVRSFLMARDPSIDRRFRPRPNKKMRLFDNIQESEEESFSEYSDTESEYKYQSSEATEGASCATSAADSSNVETGPQVFLRLRPVKDASKAYIVSEEANVLITSCKVDSTSNNVNRMEKHFGFTSIFDSTVGQRDIYDTCVGPKIMEEECVTIMTYGTSGSGKTYTLLGDDVRAGIIPRALENIFTIYQDTVFRSPKLKLINGSIVFLQDDASLKELQIRKKLLDLCPDISAHHQRLKQVIDGDHMFETKASTDVSVLVWVSFVEIYNELVYDLLAIPPKQDKLGEVPRKNLKIVGNKGHVFIKGLTSVFVTSSEEALRLLRLGQQRSTYASTSVNANSSRSHCVFTVDILKYNRSGITTQSSYKFCDLAGSERVNNTGTSGLRLKEAKNINTSLMVLGRCLDAASTVQKKKNADIIPYRDSKLTMLLQAALLGKEKLAMIVTVTPLDKYYEENLNVLNFASIAKNIIFKEPVIKQHRVSYCGFMEFSKMSTCEGGDYTKELEDENVRLQLEIEQLKYDHVLQMQLLEEKLRRELTATYQEIIQNNKKQYEDECEKKLLIAQRESEFMLSSQRRRYEEQIEDLKDEIEELKNPASDTDISDDPNESKSPIEILDDD

SEQ ID NO: 13774 - DNA, 4557 bp, DROSOPHILA
ccactttcgcgcatgtgtgtgcgtctgctatttgcctaacaaatgaaattttcatgtaggtctctgcctcatggcctggacatcagtttggcaaaggggagcacagtacagcacacacttatttatttgtttaggcccagcagtgggccatggtatctccttcacagaccgccgtgtgtctgtgtgagccgcgagcgagccagccaaccgaaaaggacgcgccaacggatatgcgtctgcagccaactacgaatgcaggacaccacccagtgcgagcgcccagatacacatccttgctctgcgtgagcagcagcgccatggataccagctaggagctaccaaataggggacacgtttcacttgccaacgggccgcatcaggaaaagttgttatttgccatggcgaaacgtcccctatgttgatgcagcgcatacagggcaaataaatagaaaaatatcaaagctgcggatatgctggcattatgtgctgtaggattatgcactggactggcagggtaaaccatgtgttgatatttaaatttcgcttcactcaactctatataaaatatgaagttataaagtgttagatgcttatcttttgggttccatcttagccaacattatatatttatgattccgacaagctaaactcgctgcacttcaacaaaaagtttaagctaaacattaaacattcttataatatatatcatcgaagcagaccgatcagagaacgcagagcatcagaagaccgttgaaagcgttaagcttattactgacgtcaaaaaaatttaaattgaatttccacgtggaatggaaggatagccaagggacaggaggattggttggcctaatggtcgtaccaacacacatgcatatacacagcacactcgtaaattatgtaaatatatgacggaccacatcacagatctaaatcattatcatcataccacggcatttacaaatgccaacacacaagtgtgggcgagtttatatggacggacctacaaatagccactcgtgtgcgctttaatggaaaccggatgaaatggtcaacacttgaccgggcccttcccattttttttccggcattcctctccggttacgaagacgattatggtcctgagagccactcgagcagaagagcaataaaaaatcattaatcccgcacagcaagagttcccgagacgaaagggtttaaagctttagcaggttacggttttcccaacccctttcaattatgactcggtcttgtgacgaataagttttgcctcaaatctattttaatattgggtccacttaccgccattttcctggcagggcgccccagcatgtgcgcacacagcaattgtatagttcttgccatccttaagcaaagtgcgagctggcttagagctaagcgaactcagatccaacctgttaagagggcacaacaagtacttaacacggattccttatacttaagtgtatagacaactcacagctcatttgtcgaggtaaaggccgtgcacggtttgagatcattacaggccaaaggcgttgcaaagttgaactgataggtgcaggaatcggctcccagacccgcgaactccggatgggcattctaaaagaaagatatgagattagcatcaccataaactaaaaaccctaagctacgcacccttatgaacttgtcacagctaaagtaaatcacgctggtgtagtttgcactggagttcttggcacatggcgttggtgactcatgcctgagcagtagctgccctttctccaccaccggatgcgtttgtacattgccgaaattgataaatctatggggaaaatctttgactaatatttttcaagcaatattaatcaaagttctacccaccgttcttttggatttgtggctttactatcaaatagacaaacgctactgcctgccggacacatgctgttctctccataaagcaccggcttacagacattgatcacaaagaaggcgccttgacgattgctcgtatgatagttactatcactcagcggcatcagatcgaaggttccatttgactttgtgtcgcccactctgcaactattggattgtagaccctcgggaatggataggcatgccaaaggcgtcctatatgagatgtaaaaagaacacacttcgttggcctagatgaagtacaatagtatgttattcagaatgatagaatcttcgaaatatttaaggaatacaattcaaatacttacgtaaggcgttacgtgcataggctgggcatccaaagtatagtcgcaggagaacattacatgcagctggtagttgggcttgtcggcagtgccattgtcgcattttgcgccgcttttgtacttcagaaacatatttccattgttgtagaacaactcgtgctgacgacctgaacagtaaaggtatcttagcgtgtgagatacagataatgtgatcgttaacttacccaaaatatactcctttccctgtcttttgagacaagctgccacattactttccccattgcaggttcttgaaagatttccgcatatattgaactcgaattggtcgcctccaatgttcatgctcttcaccacatgggccaaatccgagtggagaccactgaagtcgaaggtgctgccgtaaatgggctccttgagtttacattccgtggtggaaaatttctaaagaaaaagtaaacatattacagttacatattttcctatttcaaagaaaacaagacattttttatgactattatcgcttcattattcagcctattgatttcttagccattcgaaatgtcggccaacaaagactggaagtgataagcgagcgaaaaacatgcaattggggggccttaaacggggtctcgaccaaaaggcaacaagtgcgcagtgaaaacaaacaaacacccccaaaataaacgacccacgcccactaaccgcccacttaccagctgattggctgcgtcagcggcgacactctcaccgctgcagaaaagcagcaaaagcagggaaatcacaattgggaaacgcatctgctggaatgtcagtaaatgcaatgaatagtttttagttcagtttaaatgtattcagcatgtatcatcttacctgacgaaaattttcctgcgtgggagctgcgcagtccttttgcaaactgcaacgcattttgtcacctgcaggctctgaaatattggcactaaatgagtcaaagcgctggaaagcgtttgcagtttgtttcttttactgttttattggtaattccacctaagattagcgctcttttttcgcacacaaagtaatttaatttcccttatcacaagctaactgtttgttttgcgagagagccaagttgttattgcttttccaattggctctctgcttcgatttttcaacggccgttcgcagcaattcttcttctttgcgcagcagaacaaataaggaaatgccggcgacgcagttgcacgataggcataacaacgaacacaaatagtggcgaaataactatttttagcttgaatatacctttttcggatgcggctaaattacctggccaaaaaacaacacccgctcttaccaatgttactttacgtttacaagcgagtggcagcgctcagaagaagtcgagctgcgtagcagtgtggtagcactggtcaaacagctgttgggcttttgaatatacattatgtttgagaatccaatacaaccaacgtgtgtagtgttacttacatactaacattgttgttaacaaggctatattcagattacatgaaatgatccataactttattttcatcgtattatggctaataacttaaaatttaattttcccgcctaaaacctatgcacgttgccaagtgaatggctgaaaccaaacaaacagctgttgcgcgggcataaacttgcatttatattgttatttactatatctacccggtattaagatggccgcaaatatagccgccgctgctgcagctgcccaagaagtggatcccgtgctgaagaaggccatcaagttgctgcactcgagtaatcccacctcggcggccgaactgcgtctgcttttggacgaggctttgaaggcgcgttttggtccggagaaaagtttgaccaacaacatgacgccacggatgctggaggatgaagcgaacttttccggacgtgctgccacgcccccgcagcagcccatcaatgcggacgagatcatcaatttgaccaactcaccggacaaggagccctccgattcggtggacacgattgcggattcggatgacggtctaagcgccgtgggaatagttaacaccggtgacaccggcgactttggcgacctcaattgctgcgtgtgcggcgagatggttttcacggccaccaatcggctgattgagtgctccaagtgcggtgccatgtaccatcaggagtgccacaagccgcccataaccaaggaggaggcggccgatgaccaggagcagaactggcagtgcgacacgtgctgcaacaagccaacgagcagcgggaggacaacatcctctgcagcggccgtaacgccaactgtcttcatagccgacgaacccatgcc

SEQ ID NO: 13775 - DNA, 1292 bp, DROSOPHILA
taagagcgggtgttgttttttggccaggtaatttagccgcatccgaaaaagagcctgcaggtgacaaaatgcgttgcagtttgcaaaaggactgcgcagctcccacgcaggaaaattttcgtcagcagatgcgtttcccaattgtgatttccctgcttttgctgcttttctgcagcggtgagagtgtcgccgctgacgcagccaatcagctggtaagtgggcgattttccaccacggaatgtaaactcaaggagcccatttacggcagcaccttcgacttcagtggtctccactcggatttggcccatgtggtgaagagcatgaacattggaggcgaccaattcgagttcaatatatgcggaaatctttcaagaacctgcaatggggaaagtaatgtggcagcttgtctcaaaagacagggaaaggagtatattttgggtcgtcagcacgagttgttctacaacaatggaaatatgtttctgaagtacaaaagcggcgcaaaatgcgacaatggcactgccgacaagcccaactaccagctgcatgtaatgttctcctgcgactatactttggatgcccagcctatgcacgtaacgccttacgccaacgaagtgtgttctttttacatctcatataggacgcctttggcatgcctatccattcccgagggtctacaatccaatagttgcagagtgggcgacacaaagtcaaatggaaccttcgatctgatgccgctgagtgatagtaactatcatacgagcaatcgtcaaggcgccttctttgtgatcaatgtctgtaagccggtgctttatggagagaacagcatgtgtccggcaggcagtagcgtttgtctatttgatagtaaagccacaaatccaaaagaacgatttatcaatttcggcaatgtacaaacgcatccggtggtggagaaagggcagctactgctcaggcatgagtcaccaacgccatgtgccaagaactccagtgcaaactacaccagcgtgatttactttagctgtgacaagttcataaggaatgcccatccggagttcgcgggtctgggagccgattcctgcacctatcagttcaactttgcaacgcctttggcctgtaatgatctcaaaccgtgcacggcctttacctcgacaaatgagctgttggatctgagttcgcttagctctaagccagctcgcactttgcttaaggatggcaagaactatacaattgctgtgtgcgcacatgctggggcgccctgccaggaaaatggcgcgcacacgagtggctatttgtag

SEQ ID NO: 13776 - protein, 407 aa, DROSOPHILA
MRCSLQKDCAAPTQENFRQQMRFPIVISLLLLLFCSGESVAADAANQLVSGRFSTTECKLKEPIYGSTFDFSGLHSDLAHVVKSMNIGGDQFEFNICGNLSRTCNGESNVAACLKRQGKEYILGRQHELFYNNGNMFLKYKSGAKCDNGTADKPNYQLHVMFSCDYTLDAQPMHVTPYANEVCSFYISYRTPLACLSIPEGLQSNSCRVGDTKSNGTFDLMPLSDSNYHTSNRQGAFFVINVCKPVLYGENSMCPAGSSVCLFDSKATNPKERFINFGNVQTHPVVEKGQLLLRHESPTPCAKNSSANYTSVIYFSCDKFIRNAHPEFAGLGADSCTYQFNFATPLACNDLKPCTAFTSTNELLDLSSLSSKPARTLLKDGKNYTIAVCAHAGAPCQENGAHTSGYL

SEQ ID NO: 13777 - DNA, 6461 bp, DROSOPHILA
tttcttttgaccggaatgcttgatttttgaaaatatatagagataaactatctgcacttctattttagcgacaaaataaccaatttgccagtatgaaatggaattctaaaggtacatttaagcatggagaattcttaattttcattttgacctcagaacattacttacccatttcattcgccacagatcacaaaaccaagatccattgtttctgcctctcatttagccttctatttaaatttaatttcaaactaaaaaaaatagctcatcgaatcagaaaagtcgttgcagtttgagtatgagttcgctttatgtttgcatgttttgttgggtttaattttgttacgtacatgacttcgtttattatactgtttcagtcttccactaacgtataattattggatagcgctgtgaaagtaataatatgcggcccatattgctttacgtgtaagtattatttagaaaatactattttaagctggttggaaaggtaagtttttgatcaatctcttacaaatagcgcatttatgtgtcgagagatgttggtagattagtcaatgagtaattgatggattggttactttaattatattatacatacataagtcgtgtacactttagattcaaataagttgtataaattgttacagtgcaactacaaggaatggctgaagcagactccttggtgtttataaatgttgtatatatatcggcaaaatcgatcattaatttttttatgaactgttcaatgtgagcgtcaatagatttatataaatattgtaataaataattacgtaaaaatgttatcatactttaatcgttaatcctagatcccacatgttcgttatatatgctcgccatgaatcgggattttatcttgtacacgcaatggttaaaaaatctaaaaattataatttaacgtctctaagcaattcaacggattgtgggagtccattcaatatcatttaaaaaagaattctaccgcagcagctcagtaaatttatgaatattcattgcttcgcattttatccttgtccgtgtcctgcaatcaaattcgattccaataattagttaattgttaaatctttagatgcaaatgaacccaccttaaagcgcacgccgattttaatttgttcagtactaaagtcacgatctcgggtttttaacctggccttgttcgtattattgtgtttgtattcattttttcggttattggacccgtagtgggacccaaagtcattttctctgtcaaagtccgggccatcgcggtccttgaactgatagtcgctgcttgatttatgaatgtcgaagcctcgacgatactcgctgtaattgttgtgtgatccgccactgccggcgccacccctatgacctggattacggaaaccagctcctcctccagaattgaagtgcttttgtgacatgccgccgcgtccgtcgcgatccctgtccttgtcgtccgcctggcgattgaagctgcgggcgagtggggcaggcgcgtggttgttgccatcgggcccatgcattggcggacgcttcgaggacacctcttcctcctgcttcttttcatagtggaagaagtcatcgaatatggacgttgaatggttgtacgagtgcaaaatctgcagcacctcgatgcctttgtcgttgggcacttcctgggtgtcccttgagttcgtcaccgacttattctcattgttctccagtcgaatgtgacgcagcgttccgttaggcacatctttgacatatatccatttcaccttgaacttgcccctccacttgtcctgcgaccagacgctcgacgttgagttgtagtcgaccggcgtcatcatttgtgccatgccgcagaaatggccagatccattcaccgagaagaacagcattatgttgccgccctcttcgtgtcgctccttgaaggcatcgtccaatctcttattgccgtgatcggttgagcaccaaatctcatactttatactgcgatggatgtcatcttcggagtacgatttgatgacaaagaatctgagaggataaaagtaagcatcagtatacgaataccgccattaaaatcaaatatagcaaatttacctggccgatccggcttttttcaagtccaacacttttgggttgtaattgtttttgtcttttaattcgtccaacacgagttgggaatcgacaggcagctcttcggttgcagatgtggcttccaccggtcgtgattggttctcgtcgcggtattcgaacttcgaagcactctcaaactcgctgccgcggaaactggaatagttgcccgagcgctccgagttccggcttggatgcggcccgccgtcgtgtcgtctggcgttcggtggcccaaatggaccggcattggtcgctggacgtggggcggcatggtggacaggctgctggggccctagattcctgcgaacaggtcccgtgggcgaaaccttggctctgctgaagttattgttatttcccaagcccttgtgctcgtatttcaggaagttctccgtatccttgtgcactttctcggctcgtgcgcccaatggcggtgccgtgttgctcgatatggagaagtcagaactcaagtcggaatagcccaaatcgatcggcgagggtggagatggtacaggaggtggtttgttattcggcaaatcccatacgttaacatctaaattgtgctttcccggaaccatgggtggtggtggcatgccaggacccttcttcttgctgttggaagtggtggacgctgcctgtgaacgtagacaggatataagtgggtttgcccgctggcccaatgagtcagatactcactctcgatgttagtttggctggctgggaggcaatcgaggcccaggttgtcttcttgggagcggcgacaacttcttgattttgtgcttcatcgcttgttctgttgtccagttttgtagacggctgatcgttttcatttcgaaacgacttaggggttttacggaaataaacattagtttagggataaattctttccgaatatggtttcaatatagataaataataatatgtacctgtgctgctggcttcctggaattccaaggatttacttggtgctcgtcgcgtcgtgtgttattgggaatactatgaccatgtcttctatatgaatctacaaatatcgtgaaagactacatgttagaacaattttcaagaaagtttgattgcttagacaaatattacattaattatttacatacgccacaccttcacgctttaaagttcatgatttcttaaaagatccaaagaaacttgcattatctgtgggtgaaaatgcatttaaacaaatttaaggaggcacagcaacttgaataacatttcgtttttgttttactttctggcaaacagattttacgaaaattatccaaatttacttttgcaatggaggcggatttagaagtgcagagcgaacttgagaaggacaccatccccatcaaaattggcataattggagaggccaatttggacaagcccatctacttggcagagcgcatggagtatgcagtatgcacgccgtttggaaaaccatccgatgtgatcatcgatggccagatagaaggcgtcaatgtgtgcctgctatcacgaaatggacgcaaccacgacatcatgcccagcaacattaactatagggcgaatgtgtgggccatgcgcaagatgggctgcacccacatcctggtgaccaacacgttcagttcgctgagggacaccttccagccgggacacttggtggtgccaaatgatgtgatagattatacatccagacgtgctcagaccttttacgacggtgccgtgggtagtccattgggcgtctgtcacgtgcccatgaatccgaccttttgcgaacgcaccaggcagcaccttctgagtgccgccgaagagctgggattccccacgggatccagcggcacggtgctcacactggaaggaccgcgttactccaccgttgccgaaaacaatatgttccgcaagtggggcgccgatctgctgagcatgaccctgtgtcccgaggccattttggccaaggaggcgggcattccgtacgcctcgctgggtctggtcaccaacatggagtgctggtgcgccaagcagccgaacgcaaccactcacgaaatcatctacatctttaagaagcaatccgaaaacctccagaaggtcctgataacggctattcggaatatggctgccgaggattgggccgaggatattctaaaggcaaaggtaatgttgattgcaatgtaacttacataaaattgattctaaaatcaatttttcttagattctggtgtgcagcaactttgctaatagtaaatgatggtcggtcttgtgaaaggtattgttttaaaattatgcaaataaataatattagcgtccgttttgaattgttctatgcgttggcgcaaagctacttatcttgatctctaagcgatcataagctgcaatgagccaagtgaatccaatcggaagctaatcggactaatcccgacttcccggtgcaccgacttatgcatattcgcagagtcgaaaaaccagttagtgagaacgattacgcgccgagtgcaagtcaagtgctgggtggaaaaaaaaaacaaaaactgctatacataccatggttggcgttcgcctttcggcccttgttcatattgttccatggagtgttgcaattctccttgaagttgaacggcggatattggaattgcatggagttgtcattgcctgggtgggtgtaggcggtaggtgcggggtggagggttaggaatagacatgggttagatggcttttggaaacccatatatttcttatagtcgaagaactcaccagagacttcatcgtgagtgggagaggatagattttcgtacgaggcctcatcgacttgctgactccatggtatgttgcgctcctcgaccgatttagctgcattgtggggcatggtaaacagagaaaatcgcattaaaaccgcacattaagcaagaaatacgatcgaaaactcggccgtcgagtagttcctgtctatgggaaaacgctctgtctgtggtggtaggttatatacctgtgtttcctggtattttcatctgaaacggaaacgcaacgcaggttaatacacttatcgtatcgtattggcttgtcagccactgtatatccgaacattaatcgctgcttaacaatggaaaatcttcctgcgaaatcccgacataaatcgaatcgagcatatgtacatatgtgtgtatgcaaaatacaattacctgatccacgcctgacatttgctgcactttttgcctgcaaataggaaatggcttagtatggcggcgccgattcggttgactggccgtagctatattacccctttttaaaataaatgatataaaaacacaaggcaggcagagtttgttgcttaaaagtttttataaactccgatatattttttttacttaaagaaccacatacactgacaccacacgcacattaaccaatacactgacgggattcttaacgcttccgaagccgtcacttttcacgcgaacggcgttgcgcagacaaagcgatattatcaacactaatttaacggctgtgtgattaaaatgcaagctagtgtcatattaagcattgaggtgattggaatttgaattaagattgtattttactaaaataaataagagtttaaatttttgagagacatagttaagttgcggttatatttagtatttagtaccgattgcgccaaaccagtgctgccaaaattctagacacatcgatatcatcgccaaaacatcggtcttgtgccagctctataaaatagccacctcatctttgtcagccgtagattttgttagatttaaattgttagctatggcgagggcggcttttattgtgtgcctactgatggcctgtgcctggagcagccatgcggtgatgttcaagctgtcgccgaacacccagaagtgcctcaaggaagacatccaggcgaaccaactggttatgggcgagttcgaagtttccgacgtacccggccagatcatcgactacattgtgagttttccgctcggtacacgtacttaacttactccacgcacttaacgaactcaatttgcgtccaacaggcacgcgacaccaagggacacatcctgtcgcagaaggagcacatcactaagggcaagttcagcttcatgtccgaggtgtacgatacgtacgaaatctgctttatatccaaagttcctgcacgtaagttatagtttgcaataaactcccatagcgtatatatataaacgtttcgatttctgtgcagatcaacgcggcgttatacaggaagtatcgctcttgaccaaaaagggagtggagaccaagagctacgaaggcgtaagtacacttatgtcctttttgcatgttttacacttgacttgcaatcctttaatcatatgcagattggcgaagcatccaaactg

SEQ ID NO: 13778 - DNA, 2218 bp, DROSOPHILA
tggttctttaagtaaaaaaaatatatcggagtttataaaaacttttaagcaacaaactctgcctgccttgtgtttttatatcatttattttaaaaaggggcaaaaagtgcagcaaatgtcaggcgtggatcagatgaaaataccaggaaacacagctaaatcggtcgaggagcgcaacataccatggagtcagcaagtcgatgaggcctcgtacgaaaatctatcctctcccactcacgatgaagtctctggcaatgacaactccatgcaattccaatatccgccgttcaacttcaaggagaattgcaacactccatggaacaatatgaacaagggccgaaaggcgaacgccaaccatgattcatatagaagacatggtcatagtattcccaataacacacgacgcgacgagcaccaagtaaatccttggaattccaggaagccagcagcacagtcgtttcgaaatgaaaacgatcagccgtctacaaaactggacaacagaacaagcgatgaagcacaaaatcaagaagttgtcgccgctcccaagaagacaacctgggcctcgattgcctcccagccagccaaactaacatcgagagcagcgtccaccacttccaacagcaagaagaagggtcctggcatgccaccaccacccatggttccgggaaagcacaatttagatgttaacgtatgggatttgccgaataacaaaccacctcctgtaccatctccaccctcgccgatcgatttgggctattccgacttgagttctgacttctccatatcgagcaacacggcaccgccattgggcgcacgagccgagaaagtgcacaaggatacggagaacttcctgaaatacgagcacaagggcttgggaaataacaataacttcagcagagccaaggtttcgcccacgggacctgttcgcaggaatctagggccccagcagcctgtccaccatgccgccccacgtccagcgaccaatgccggtccatttgggccaccgaacgccagacgacacgacggcgggccgcatccaagccggaactcggagcgctcgggcaactattccagtttccgcggcagcgagtttgagagtgcttcgaagttcgaataccgcgacgagaaccaatcacgaccggtggaagccacatctgcaaccgaagagctgcctgtcgattcccaactcgtgttggacgaattaaaagacaaaaacaattacaacccaaaagtgttggacttgaaaaaagccggatcggccagattctttgtcatcaaatcgtactccgaagatgacatccatcgcagtataaagtatgagatttggtgctcaaccgatcacggcaataagagattggacgatgccttcaaggagcgacacgaagagggcggcaacataatgctgttcttctcggtgaatggatctggccatttctgcggcatggcacaaatgatgacgccggtcgactacaactcaacgtcgagcgtctggtcgcaggacaagtggaggggcaagttcaaggtgaaatggatatatgtcaaagatgtgcctaacggaacgctgcgtcacattcgactggagaacaatgagaataagtcggtgacgaactcaagggacacccaggaagtgcccaacgacaaaggcatcgaggtgctgcagattttgcactcgtacaaccattcaacgtccatattcgatgacttcttccactatgaaaagaagcaggaggaagaggtgtcctcgaagcgtccgccaatgcatgggcccgatggcaacaaccacgcgcctgccccactcgcccgcagcttcaatcgccaggcggacgacaaggacagggatcgcgacggacgcggcggcatgtcacaaaagcacttcaattctggaggaggagctggtttccgtaatccaggtcataggggtggcgccggcagtggcggatcacacaacaattacagcgagtatcgtcgaggcttcgacattcataaatcaagcagcgactatcagttcaaggaccgcgatggcccggactttgacagagaaaatgactttgggtcccactacgggtccaataaccgaaaaaatgaatacaaacacaataatacgaacaaggccaggttaaaaacccgagatcgtgactttagtactgaacaaattaaaatcggcgtgcgctttaaggacacggacaaggataaaatgcgaagcaatgaatattcataa

SEQ ID NO: 13779 - protein, 700 aa, DROSOPHILA
MSGVDQMKIPGNTAKSVEERNIPWSQQVDEASYENLSSPTHDEVSGNDNSMQFQYPPFNFKENCNTPWNNMNKGRKANANHDSYRRHGHSIPNNTRRDEHQVNPWNSRKPAAQSFRNENDQPSTKLDNRTSDEAQNQEVVAAPKKTTWASIASQPAKLTSRAASTTSNSKKKGPGMPPPPMVPGKHNLDVNVWDLPNNKPPPVPSPPSPIDLGYSDLSSDFSISSNTAPPLGARAEKVHKDTENFLKYEHKGLGNNNNFSRAKVSPTGPVRRNLGPQQPVHHAAPRPATNAGPFGPPNARRHDGGPHPSRNSERSGNYSSFRGSEFESASKFEYRDENQSRPVEATSATEELPVDSQLVLDELKDKNNYNPKVLDLKKAGSARFFVIKSYSEDDIHRSIKYEIWCSTDHGNKRLDDAFKERHEEGGNIMLFFSVNGSGHFCGMAQMMTPVDYNSTSSVWSQDKWRGKFKVKWIYVKDVPNGTLRHIRLENNENKSVTNSRDTQEVPNDKGIEVLQILHSYNHSTSIFDDFFHYEKKQEEEVSSKRPPMHGPDGNNHAPAPLARSFNRQADDKDRDRDGRGGMSQKHFNSGGGAGFRNPGHRGGAGSGGSHNNYSEYRRGFDIHKSSSDYQFKDRDGPDFDRENDFGSHYGSNNRKNEYKHNNTNKARLKTRDRDFSTEQIKIGVRFKDTDKDKMRSNEYS

SEQ ID NO: 13780 - DNA, 5017 bp, DROSOPHILA
agcaaaaagagccaagcagatcgcaaaaggaatcgccgaaggagccaattgggggaggagcgagccaaggacaccaagaaatccccaaacccctgtgctccatgctccatgctccatgctaagtagttgcattaaaagcttacaacaaaacctgcgacagacaagacaggacaagaaacaaattttgtgtaactcgctgcgcctgggtcataaagtcaggccctccgacctgcccgaaagtcctcttcgcactccccctcctttttttgtagtgtatcctcaccgaattttcctggcagcgactcaaaaatgtgcgactctctgggcggcgttggggtttcgagcgtgtaaatcatgcggacttgtacgcagagttcaaattcttaaagataatttaagattaatttaggtttatttatgctgagatacatagacactctaattgtgactatgaaaaacttgttagattactaaaacattttgaaataaccatgtatgttgttcttggcaaggattttcaaggaaaaacgacgatatttatatcgactagtcttttcatcgccaacaaaaacaataaacagagactagattctcaaataagagtacattaagttttaaaacagtcataagctgcagaaaaaaattgttatttttatatataatctttagtcgcattgtactggatctggaaatatacatgagcgccctccagcggctattatgtaaactgattatgaatgttcgtgtgaaaaacaaaagagggcgccactacaacaaaggtttggcgatagccgagactcccacccataaaaacaactatttaaattagctacaaaattagcttaatctgcagtattccgcattatgtttatcttcataaatttacttaattttaacttaatattcaaattagaaaataaatcagcacagaatttagcttcgaaagagctttttggtatatcttcattaacgaaaacggcacaaacggtatatatagatgaaagccggatggtttaactttccgatagtcgcacggtcacactctttgaaagtgaatagaataaacgtgaataaagcgagaaaagcaagcgcaaaacgtgagactgtgtgcgttcgccgtctcttcgcaccgaagtggattaattccgtggatggagtggcacaataaacacaacaactggaacgcgttttgtcgttttgttttccgcttttccagcagccgtgtgccaattcacttcgcacattcttcgcagccggatattgtggaggcaatggaaagcgcaagcatgtgtgcatgtgtgtcgctgggataacggcgaaaaaggagaaagaggagctgttaaacggcaacaaaagcaaataacttgagctgggatctaaaatcggatctcaagtttgaggacaaagaacgagtgagaacgattgtgagagagagagagacgaggaaaaagctactcacacacgcatacgaataaccgcttcacacgctctcccgtgtaaaaccaatacaacgacaaaaaaacaaaaacaacatgcaatatttgcaaagtagttaaataattctgccctgtctgcgctttatttccttcttcatttcggttctcctcgtttttgactttttgttgtatattttcaacaagtttctgtttctcgctttttcccccaacacaaacacacacccacccacacaaacaaacaatcagttcttttttcgttactacttccgaacaacaacacacggcacacgaacgccaaccaccaatacaaatacgaaaacaacgtctcgtgtgacgtgcgagcgcagaaagtgtcgtctttagattttgtttgtgcacttttcgccatttccctttgtattccgtcgagtgaggaacagcggaagccagggagcgcaagagttgccgagaagcacctgcaaaatagcggcacgagatcgccagaaaagcagaaaatcgcaagaagcaaaagcgaccggctcaacacttccacacgcaaatacccagagccccccacacacacacacacacacacacacatccaacacttgttgcagtggtcgaggagaaggggcaccacagcgataagaggagaagggacgaggagcaggaggagaacaagtgcctaagaagacaacaacgcgcatctgctatcagcgaataccactgcaaacgtaagaacggggataagcaatggggtggaacagacctaaatgataccctgcaagcaatacgttggtagtgcccccaaaaagtaaacatatatgtaatatcttatgtaaactatgtggaatgcggggattacacacctagataaaaccctataagaatgcattgatagtagcttagaatgtttacgagtacttaaaagtataatgaatttcctttgtggatcttagtagactattcaaatcccataaagattgcattaataatgtggtttgtttgcatataattccctaagtataagtaagtatagagtaattgttaggtagtgtggagtattcgggcataaaagtggaacatcgttagtaagagatttagataatttatttaagagtttcggttttagtataccaagaaaattgacttatattgcagctaagtatctttgcaaacttaggcacagatggataatttgaagtaaatgtggctctcttccagtgtctagttatttgtgctataaattcgcgtctatgaagataacgctgaatactatatatagttgatatagtgccattaaacacacgttctgggatctctgtggctatcccatctagcttgtttcgtatgctctccccaccaaacttaacgttctgctaatctatctgattgggtttctaaacgttttccgattataaacacaacaccgatcaatcaatatgttagcaacgtgttgatatcgctgcccagtctggtttcctagtaccagtaataccattgacggggaacggaatcgggaaaacgagtacggcacgctatccaccggagaaagaccggctgataagtgataagccgaacggacaggcagtgcaatttgccgatgggcccacaatctcgcatctgataaggtcggaatcacgattttcatgtgccgcacatttaaattaaacgcgtcaagctataaaatgatatatgaagagctttcccagctatcagcgattgttattttcgaacgtgcacaataagggggtaaattattgaagggatcaagcaggttaacattatgaccatcgaatgtgactgttcttattttgggtgttctactttccagatggtcaaggagaagcccaactcgactcgcatctacgacaaggatggatttaggcgccgggctgcttgtatttgcgtgaaatcggagaatgaggcggaggtgagtaacaattcgcaagcttgtttatgtaatttgaagtccagatacttctggcttcgcaggtttcaaaatatttcgaaattcaaagaaatagcattgggtttttccagaatgaaactaacaaaatactaacaaaatatttacttgtacccaggtactcttggtaacctcatctcgtcgcccggagttgtggatcgttccaggaggcggcgttgaaccagaagaggagtcatcggtgacagccgtgcgcgaagtgctcgaagaagccggcgtggttggcgatctgggtcgttgtctcggtgtattcgaggtaagtacacagagttctaagtgattcaaactgattttaatctctgtgccgccattcagaacaatgaccacatgcatcgcaccgaggtgttcgtgatgaacgtgactcaggaactggacgagtgggaggattcgcggagcatcggtcgcaagcgccagtggttcaccatcgatgatgcactctcgcagctggcgctgcataagccgacgcagcaacactatctgatgcagctgcagcactcgaagacgctggacaacacgaatcgcgtggtgaacgccacgcatccgcccaagttgaccaatgccgccaccccagccgcatctcccactacggcataaagacatcgggatgcaggatccggatggcaggcagcagtaaccacacatgcacaccacacttaactgcgagactaacactaaccccaaaactaaacccataccgagaaccaaccatacacattttgacattttggaaattaacaaatagacaggcagtcttctagattatgttggttaagcgatacttatgttaccccgcatcccccacatagccccattttcgtttaagtttaagtcaaggcgttcatttatgtctttagtaagtgtatcggaactaaatttatatgtttactccagagcgagtggagaggaggtgaagaaaacaaaaacgctactcgatcaatgctaagcgataacttattattattcgagatctataacacgacgcaaaagtaggcggaaacaacatgtaataatttttgagcgaatagcactttttgcaaacacgaaatggaactaaacaaacaaaatctaaaactagatgaactaaacaacaaaatccagaatagcgatatctattagatttttctactcttttttataatttactcaaaaggcgtcttaattgattaatgtaacaagcaaaccaattggaatcggctttagcaagcgcaaaaggagatcttaattaactatgctaagctgcctaaataaaaacaaaaactatttaagcgatgactaacgaatcaatttcgtttcaaatcacctacagtcaaggacatttttaaaaaaaaaaaataaataaatcagaaagaaatgaaacctaagactcgactggcgacgaactagacaaatgacggaaactaaatcattagaaaacctaattatattaaacaacagttgcctatggaagaatataaaacccactgcaggggaaatataaggataaacgttaacttattgtaaaaacaaaatgcaagaaaattagaggagccagcaaacaacatattatgaactaattcaactactaagatacgtgcacgttgtacttttcagatgc

SEQ ID NO: 13781 - DNA, 1704 bp, DROSOPHILA
aaagccggatggtttaactttccgatagtcgcacggtcacactctttgaaagtgaatagaataaacgtgaataaagcgagaaaagcaagcgcaaaacgtgagactgtgtgcgttcgccgtctcttcgcaccgaagtggattaattccgtggatggagtggcacaataaacacaacaactggaacgcgttttgtcgttttgttttccgcttttccagcagccgtgtgccaattcacttcgcacattcttcgcagccggatattgtggaggcaatggaaagcgcaagcatgtgtgcatgtgtgtcgctgggataacggcgaaaaaggagaaagaggagctgttaaacggcaacaaaagcaaataacttgagctgggatctaaaatcggatctcaagtttgaggacaaagaacgagtgagaacgattgtgagagagagagagacgaggaaaaagctactcacacacgcatacgaataaccgcttcacacgctctcccgtgtaaaaccaatacaacgacaaaaaaacaaaaacaacatgcaatatttgcaaagtagttaaataattctgccctgtctgcgctttatttccttcttcatttcggttctcctcgtttttgactttttgttgtatattttcaacaagtttctgtttctcgctttttcccccaacacaaacacacacccacccacacaaacaaacaatcagttcttttttcgttactacttccgaacaacaacacacggcacacgaacgccaaccaccaatacaaatacgaaaacaacgtctcgtgtgacgtgcgagcgcagaaagtgtcgtctttagattttgtttgtgcacttttcgccatttccctttgtattccgtcgagtgaggaacagcggaagccagggagcgcaagagttgccgagaagcacctgcaaaatagcggcacgagatcgccagaaaagcagaaaatcgcaagaagcaaaagcgaccggctcaacacttccacacgcaaatacccagagccccccacacacacacacacacacacacacatccaacacttgttgcagtggtcgaggagaaggggcaccacagcgataagaggagaagggacgaggagcaggaggagaacaagtgcctaagaagacaacaacgcgcatctgctatcagcgaataccactgcaaacatggtcaaggagaagcccaactcgactcgcatctacgacaaggatggatttaggcgccgggctgcttgtatttgcgtgaaatcggagaatgaggcggaggtactcttggtaacctcatctcgtcgcccggagttgtggatcgttccaggaggcggcgttgaaccagaagaggagtcatcggtgacagccgtgcgcgaagtgctcgaagaagccggcgtggttggcgatctgggtcgttgtctcggtgtattcgagaacaatgaccacatgcatcgcaccgaggtgttcgtgatgaacgtgactcaggaactggacgagtgggaggattcgcggagcatcggtcgcaagcgccagtggttcaccatcgatgatgcactctcgcagctggcgctgcataagccgacgcagcaacactatctgatgcagctgcagcactcgaagacgctggacaacacgaatcgcgtggtgaacgccacgcatccgcccaagttgaccaatgccgccaccccagccgcatctcccactacggcataa

SEQ ID NO: 13782 - protein, 177 aa, DROSOPHILA
MVKEKPNSTRIYDKDGFRRRAACICVKSENEAEVLLVTSSRRPELWIVPGGGVEPEEESSVTAVREVLEEAGVVGDLGRCLGVFENNDHMHRTEVFVMNVTQELDEWEDSRSIGRKRQWFTIDDALSQLALHKPTQQHYLMQLQHSKTLDNTNRVVNATHPPKLTNAATPAASPTTA

SEQ ID NO: 13783 - DNA, 9826 bp, DROSOPHILA
ttcatatttgagttaatggggcgtatggcagattatttaggtctagtgaaaattgttgtatatgagtctatggattttctttttttttctttcttgttgttgttgtttcgttaagtgttgctttcatctatagttagtacataaaatgctttttcttcgtatatagcgagtgttgtataaaaaacgacagcagattgtatgcaataattatgatgcattagttagttaagctctcagtttgaaattacgttatgggttcctctttctcttaaactcattttccgaagcttggcttccaaaaaattgatttagaaaaataaaaaattttaacaaaagtttttccgcatgcactggctgctgtgccctgctttcgcttgaaagtgatgaatcaagtttgaaagtggtattcctagagcagagcgcaactctcgccggctaatcaataaatactataattacgcaataaaaaaaatagaagatattttaagtgaagtatgaacaatcaagcaatgcttaccaattgcttaacataatggtaggtgtaaatataaattaaaaatcaggggataaaacgcgctaaaactgcaaggctcttcgacatgcatgtaaaattagctgaataacatttaaacctagttacgtgtagttcgggtgtttggataattataactattgctagctaactcagtgaagacagttgctgttttgtttttgtattgcttgtttgctgttgtagagttcatctatttctgttttttgctgcggttctctcacttactttcgccttgctctaagcgatttggtaggtactaaaaattatcataattaatatacgtagtaggtatgagttataagttataattggtagaatttgtatgtctatttaaacggtacttaggttggttggttgttggcttttgtacttttgttatttgcatgtaggacttgttttgcttttatttgcttgttttcttgttttctgtttcttctgttttttttttctgtttttgctttcactatcgttttctgctctcgttttgtattgcgttagaggctctagtgcattaatttaaacaaacaaaaaatgtagagtaaatactaaacgaatacgtaaacataaataggcttaatcgaaactattggtattatacatgcgcggttagggtggttcgatggcttgaacaaagaatcgtgaaggcggttagcaatctttttggctcgttcttagcaaattaagcctttgtttccatatcttcgactccatatagtcgtttgcctaatcgtcgaacaattgagaattgaaaattaggctctatgaatctaaaatttacaattttggttcgacaccaagaagaaaaggtgtcatccatctacggaaaggtgtgttattttacgaagactgacacaatgtgcttaattttctattaatgcaaaattttaactaaagaatcaacttcttgtttgaagcttcatcgctagaaatgttacaatggattgctagccagtcatattgaaaatatacaaatatctttggacctacatctcctccaccctaatttgcaggcatagagaagagtcaaattccaagaagcttggcttgcggcaaagacttgctactctatctatatccatgctgcttctcctcatctatttacatgtttttctacagaactacagttcgtaacgattacgcctcccttccgatgaatccattgggtggtggaggccttggcgtactcgccggtcgcagccagttctctttaagcaagttggatcggtttccggctcctgtcgctccgattccggagttgggattcgtaggagattttctcgtttggctgacgctgcgactgcgaggcggctgcgtcttgctgggcaacgctctttgcctgggccgactcaatggcatgcgctccatcttgatgtgctccacatgctcatcgtccacgtcgtcgtcctcatcctcatcgtcctcctcctgctcgttgtcctcgtcggagctactttggctttggcgtgcattcaacggcgcctgcatgggctggtaattcggattatggctaatggtcacacccgccatctgcactggagtctcattcatgggcatatagttcggattggtactgaccagactggttggtggatgcatcatctcgtagttgggattggggctgctagtcgttaggatggtggcctgttcgctggctattgactcgtctagtagtctgtagttaggattgtcgctaatggccataccgctgcctcctccaggcgtcgctgatggagtatagaagcggggtgttccagtataactaccagccgaaccactgccaccactctcgatagttccaagattgcccatagccactgggtgacttgtcaagttggtgttactgctggtactcggagcattggaggcattgctcttgtggctggcattgctgcccgttcgcttgtggttaaataggtggcgattaatgaagtttgccttattgcgaaccgaatccgccactgttttcttcagacttgggcgtcctgtgtgcgaactggcattagaactgcctgctgacgcagtcgagggttgcagtgaggacccaccgatgacatcatctggcatcgagctgctcatgatggtaggctggcgaccctttcttggcagcaaatgttgttctccgctgagttttccaccgccagtactgccacttctgctcgtcggcagctctgcacatttcggactgggatcgtagatctcatatcccctgtcgccgtccaaagcgtctgcatcaggcacaacgtaagtcgccgaaatatcaccttgcgctgctggaatattctggaaagcagtagccattacagtctgcccatcaggagtactgctcgcaatgaatccggatggcaggctaaatggcaagtgagaaccctgatcatcaaccatggcgatggggctttcgggcggttgatccaacgaggagttctgctgataatcgcccattcgtaaaggtgtggtagcatcctcctgctgttcccgatcctgcagatcttgatccaaggggactgccgcgaatgcatctagctgattgcgttccttgcgctccttttcccgatgctgcagacctgcctctgagtgatagaaggatacttccttaaattgtgaattggggcattgtggttcgagatacgcaatgatatccagaaaactgggtctcgccgaagacctatgatgccagcacctttgcattagtttatgcagaaaatcaggacaattttccggcctctccataacaccgccatcgatgacgtaacgcaggacttgctcgttggaaagtccctggtatggctgagccgctaaggtggccatttcccagagaaccactccaaagctgaatacatcactggcactagagtagacaccatctcgcaagctctccggtggcatccagcgaactggcagcagccctttagtgcccttccgatagtaatccgtctcatagatgtcacgggtcattccaaagtcaccaattttcaccgtcaaatcatcagcaaccatgcaatttcgagctgcaagatcacgatggacgaacttcttggcggccaaatatgccatgccatccgcaatctcaatggccatctggtagattcttccataagtaggaggctgcacattaccagtcactccgatgcgattaagatacgtcatcatggcctcatcccgctcctcgggacgatgggcacgcaaataggacttaagatcacccttcttcattagctccatgaccaccagagccggctgacccctggagcaaacaccgagcaatcttacgacatgatacgtatcgaactccttcatgacgctcgcctcgctcaggaaattggttcgctcgcgatccgtagcattttcgttgacagtcttaatggcacactcgcgatccacgccattgggtggaaaggacttcaggataccctcatacaccatgccaaaggatccctggcctagtggagccaactgaatgatgttctctcgcagcacctcccaatcgtctgggatgtattgcatgctcgcatagaacggattcacctctgtgttcatatgaaggtcattagagggaaccttcctcttgtgcaggtaacagacatagccgaacagggaaacgatcaggaacgctaggccgattcccagtagccagaaaaagaccttagcatagctcggcggaggctgttgaatttaatgaaaaaaaaaaattcatttaaaaatgatcattcgcagataaaaattattcaacctacctcaacttttatatgttcgacttccgtgaaatcgccgtatcccgctattgaattggctcgcaccctgaagctgtaaaggccctcgttgagctttattaaataaccggcagtctggttgaagtcagcagccggaatgcacttcttttcttccacttgatcgggtttttgcaacttgtaggccacttcataggtgacaatttctccgttgggatctactggtggcgtccagcgaacccgtactggggactcggtgttgttggcgtgttctaaatctacttttaggtccatgactatgtcggcaaattctataagtaaaaccaaatcgttagtaattaaagtaaacacgctctcaagtccacctactctttctctttgtagtttggaaaacggtgtcataatcgctgcagagcgacttcttaaaactggtgtcccttaatttttcgctggggatttcttctctacaggctaccacgaagatagcgtagcgggtgaagtggcgcagtttttcaaagacaaaatgtgtttgatttggtggcaattccttggcaaacacctcatagaattgtttgttggaggacaagtcttcttcgtctttataggtattttcgtcgtccttttcgaaaaatgcatcggtatcgtctgtgatggagcgcacatggcgtagaagtacactgccctctacatcgtcgagctctggctcgagcgcaacgtctctccttctacgtgaagggttagtagctcctccatttggaatagcattagaatcgagagctgcaccttccgctccgtctgatttgtcagacgatccattcttgcttttccgaatgtttggaacaaatataaagttttgcaacgcgttctcaaactccatgcccgcttgaactttacgatcatcgtattcctgactgctagtcttcttcgaaccctccacgcacttacagtcgcctgctaaaggatctgatattttcttggtaggcgttgtggctggcaggtcattttccatggccttgacgagagctacacagatgaaatatttaaattaattaattatggatacaatttggctatgttgttgcttacgttcagtacagtaatcccggttattgtttcgagtaggccgatttataagtttggcttttataaaatagcgcgttagcacgccataaggcttatctaggtagctccatgttacgttctgaaaaggcaataaatgttgatcagtcaaagtgaacaattacttgacatttagtaatcatttataatcctaaactaatctattgcacaatttcatactcacaattttcgaatctgaaatggcggttgctaccacctccgtaacctttgacggtcgtccgggattcgtcctaaagttcttcacgtcgctctccgcgtttgtcaattccgaggatatagccatggtccgaacgtagtaggagtagttagtgtacggaatcaaattgcttaataccatgaccccgctcttttccggagagctaaccttccagcgatcatcgcatggatcgtcactgcttttagttgagttcccgtacggatcgatcatatgataaaacacgaaaccgatgaaggcgcgcggatccttaaaaacaattgtagcattgctcggcttttggggctctcctatttcaacttttgtcgtgacgttcagcatagcggagtttgctcccactgattgtaatgtgacattgagaacggctgttccacctggaaatgtttcatttaggttagtactgacaaagtttaaaattttactaaaatcttcgttaaagattacttacatgatccgcggtttccattcgagtctgcgcccacatctgacttttcaaaaaactttggcttggaggccagcatgggcagcaactggttaatggtggacacacatagttttgggttgaaatgaaagaagacgccgcccttcctaatgaacaccgtttggttgggtccccagagctcatctagatcgcgattatcaagcacatacaaagcatatttatccgcgtccatcggcggatcgccgctaatttcagttagggattgaaagaatttcaaggacttcaatccgtaggtcaaatgaaccattagggacgactgaattttatggacggcagccaggccatattttaattcatccatgacgtgagctgaagaaacaagaagttttaatatagagattatactttaatttagagcagcaaaaaacacttaccgccgctttcacgtttaatgctgatggtaaggggctcggttccggttataatggtgcagccgtggaactcccgagcacgctccaaactgtcgataagaccggaggagcactccttgtcacacttgccgcccggacaaggttcgcacatgcgcttgttctctgacttctggtaccccgttggacagtgggtgatacattgtccgttgtatggaataccggaatacacactgttcgtttcaaactttgtcagtgtgatgcactcgttcgccgttacgcagcggctgtcgaactgcaaaagagtttgaaagttagctacttgttgtatactaaaagtgaatcattagttacctgataatagcctttcggacaggagtccatacagatgttgttgaaagacacatttcgacaggagatgcagctctcattcccattcttatcgatcacgcatccacccaaacaatcctggctgcagcaggtgtgctcatcgatgcagttatttctgcacttttcagggcattctggagaagaaaaaaacgcgaaaaatgttaataagaaaacggtataactttacaccggccaactcactcgtctggcagagtttgctgttccagcacaggcgcctattattgtgcagctgacaactggcattaagctctccctcaatagccgtggtatcgtgcccctcctcaattctgatctcccccgggcacttggaaagcctgcactccttctccttgccgttctctgtcagcaccaccagttgggtttcgttttccgccagaatttccagccaatcgatggtcctatcatagcacagcttatgattcttctcaatccgcacaccgcctctggttatggatcgtagcttgtgaagtcccaaatccatgaggtcgaaattcgagtagacgaccaaggcatatccgtcgaacagcttgtttcccctaatgacgctcagattgggaaagatctttgacagcgagtgcaatccagtcacacggtagattatgatataatctgtgacctcggtcagttttggaaagcttctgttcagagggctggcgtcgtttatcaaatcgatcagcaggaagccctcgatgaccgtgcagttctccagctgattgaagtgcgacaccatgttcctgatgtccatggatttgcaagctataaggtgttaatggaaaagctattagtatctgtcagtctcgtgcaaatgggaatgttcctttaacttgcaaggtagatcataggtaatacatacgttttacattttgtgacagtcgcattgttgggtttgattcgctccttgtccatcgcgattgcgtccccgacaccgaaagcgctgttttatccagtccatcggctatatcattgtgcagcaggtgctgctgatgtgctggcaacacgaccgcttggatggccaatgtgttggccagtaggataaagagtagaaggctaatgccaggcgagtaagagtaattgtgcttgtagtgaaagcacttatgcctatctttctcttgttgcttttgttgcggtgtggcacgtggcagctgttggttatgctgtagttgttgttgttgtttgtagtttttagggcttaaactcagtcttgtggttgctgctgccagtgtttgtagcagcaataggaattttgtgtaactaacattggcttgctgccgctgatgatgctgctgatgatgctgctgatgatgatgctgataatgatgatgatgctgctgctgatgctgccgcctgcgtcgcttgttgaaaatgccgcaattgaacatgagcagcagcagcgattgcaatgttcgcaaaatattgtgacagttgctaaagatattgaagttttcgcgctgttgtcgattgtttttcgtgctgccatcgtcgcattcattgctgcactgatgcccgctgcatttaacgtccctctttttacccgtcgtctccacttcgtcaaattttggtctgcggcacagtacgatatcatcatgactgagaaaccagacctcctccgcactgatttcactgcttgcttgacagctgctgctgttgctactgctatacgcttcttcactgcttgcggggctgtcaactgcttctactgcttgccggcagcaacatgtatccagcaacatttcttgccggcacaaaacacaaatgtgtccaagcgtgcaggctgttgttgttgctgctgctgccatatcgttttccatcttaattttcccacgcttggatttactttttgtcactccccgtggcatattgaacatattgcggtgtttctattcgtattatgaaattgtttcctcaaattttcagctttccacgagttctgctttcgctttttgggtctctctcacccccgctaggtaatcatctttcgtcccgctctcacactctgttgcagccgaaaagcgcaacaaatatttcacttcagttggaatgcaatttttcttctatttgttccgccgttgcaactgtaacgagaaagcagaatgtgcaaattagttttcagttctcaagctgaaaaacaatacagaagaacagcaacctacgtaattccatgcgaaaaagggcgccaagtgctcggcacacgtgtcgaactacctgccatctgccgccgtctctctcgcacaaaagcgattttcattttaacgctttacgctcgtcatttcaaatccctaattattgcacctagtctatatactatacactattcagtttacgtagcacggaaacgagatggagtattcggaaattggacacgacttgacctatgcacatccagtttttcgcggaaagttctaatgcatcgcctgcacggaaaaactcagttctatgacatgaagtgcaaaatttgagttcacgtaataaaaaaattgtatgtacttatgtctatatgaaaaagaaaattaagtaaatgatttattaatgcagaaactattatgttattcaaactcctttctcattagcaaatatttttatgtttactattaatattttttaaattttaatattaattattcaattgccaaaaaaaatgaattcaaagcgttctaactggaaagcaacagcacatttcctaaacagctgagaacaaacgatccactctacccatctcactcgcactcgccgcacaatgaacccagcttgctaagcaacaaaaacagcaagaacaaaaaaataaataattttatgcgacagacaaaagagcagaacaaataaaagaatggcaagcatatggagagcgattcgattcttcagcttagcattgacgttcattttttcgagtgcctagtgttcttttttcaattttgg

SEQ ID NO: 13784 - DNA, 7170 bp, DROSOPHILA
tgaaaatttgaggaaacaatttcataatacgaatagaaacaccgcaatatgttcaatatgccacggggagtgacaaaaagtaaatccaagcgtgggaaaattaagatggaaaacgatatggcagcagcagcaacaacaacagcctgcacgcttggacacatttgtgttttgtgccggcaagaaatgttgctggatacatgttgctgccggcaagcagtagaagcagttgacagccccgcaagcagtgaagaagcgtatagcagtagcaacagcagcagctgtcaagcaagcagtgaaatcagtgcggaggaggtctggtttctcagtcatgatgatatcgtactgtgccgcagaccaaaatttgacgaagtggagacgacgggtaaaaagagggacgttaaatgcagcgggcatcagtgcagcaatgaatgcgacgatggcagcacgaaaaacaatcgacaacagcgcgaaaacttcaatatctttagcaactgtcacaatattttgcgaacattgcaatcgctgctgctgctcatgttcaattgcggcattttcaacaagcgacgcaggcggcagcatcagcagcagcatcatcatcattatcagcatcatcatcagcagcatcatcagcagcatcatcagcggcagcaagccaatgttagttacacaaaattcctattgctgctacaaacactggcagcagcaaccacaagactgagtttaagccctaaaaactacaaacaacaacaacaactacagcataaccaacagctgccacgtgccacaccgcaacaaaagcaacaagagaaagataggcataagtgctttcactacaagcacaattactcttactcgcctggcattagccttctactctttatcctactggccaacacattggccatccaagcggtcgtgttgccagcacatcagcagcacctgctgcacaatgatatagccgatggactggataaaacagcgctttcggtgtcggggacgcaatcgcgatggacaaggagcgaatcaaacccaacaatgcgactgtcacaaaatgtaaaaccttgcaaatccatggacatcaggaacatggtgtcgcacttcaatcagctggagaactgcacggtcatcgagggcttcctgctgatcgatttgataaacgacgccagccctctgaacagaagctttccaaaactgaccgaggtcacagattatatcataatctaccgtgtgactggattgcactcgctgtcaaagatctttcccaatctgagcgtcattaggggaaacaagctgttcgacggatatgccttggtcgtctactcgaatttcgacctcatggatttgggacttcacaagctacgatccataaccagaggcggtgtgcggattgagaagaatcataagctgtgctatgataggaccatcgattggctggaaattctggcggaaaacgaaacccaactggtggtgctgacagagaacggcaaggagaaggagtgcaggctttccaagtgcccgggggagatcagaattgaggaggggcacgataccacggctattgagggagagcttaatgccagttgtcagctgcacaataataggcgcctgtgctggaacagcaaactctgccagacgaaatgccctgaaaagtgcagaaataactgcatcgatgagcacacctgctgcagccaggattgtttgggtggatgcgtgatcgataagaatgggaatgagagctgcatctcctgtcgaaatgtgtctttcaacaacatctgtatggactcctgtccgaaaggctattatcagttcgacagccgctgcgtaacggcgaacgagtgcatcacactgacaaagtttgaaacgaacagtgtgtattccggtattccatacaacggacaatgtatcacccactgtccaacggggtaccagaagtcagagaacaagcgcatgtgcgaaccttgtccgggcggcaagtgtgacaaggagtgctcctccggtcttatcgacagtttggagcgtgctcgggagttccacggctgcaccattataaccggaaccgagccccttaccatcagcattaaacgtgaaagcggcgctcacgtcatggatgaattaaaatatggcctggctgccgtccataaaattcagtcgtccctaatggttcatttgacctacggattgaagtccttgaaattctttcaatccctaactgaaattagcggcgatccgccgatggacgcggataaatatgctttgtatgtgcttgataatcgcgatctagatgagctctggggacccaaccaaacggtgttcattaggaagggcggcgtcttctttcatttcaacccaaaactatgtgtgtccaccattaaccagttgctgcccatgctggcctccaagccaaagttttttgaaaagtcagatgtgggcgcagactcgaatggaaaccgcggatcatgtggaacagccgttctcaatgtcacattacaatcagtgggagcaaactccgctatgctgaacgtcacgacaaaagttgaaataggagagccccaaaagccgagcaatgctacaattgtttttaaggatccgcgcgccttcatcggtttcgtgttttatcatatgatcgatccgtacgggaactcaactaaaagcagtgacgatccatgcgatgatcgctggaaggttagctctccggaaaagagcggggtcatggtattaagcaatttgattccgtacactaactactcctactacgttcggaccatggctatatcctcggaattgacaaacgcggagagcgacgtgaagaactttaggacgaatcccggacgaccgtcaaaggttacggaggtggtagcaaccgccatttcagattcgaaaattaacgtaacatggagctacctagataagccttatggcgtgctaacgcgctattttataaaagccaaacttataaatcggcctactcgaaacaataaccgggattactgtactgaacctctcgtcaaggccatggaaaatgacctgccagccacaacgcctaccaagaaaatatcagatcctttagcaggcgactgtaagtgcgtggagggttcgaagaagactagcagtcaggaatacgatgatcgtaaagttcaagcgggcatggagtttgagaacgcgttgcaaaactttatatttgttccaaacattcggaaaagcaagaatggatcgtctgacaaatcagacggagcggaaggtgcagctctcgattctaatgctattccaaatggaggagctactaacccttcacgtagaaggagagacgttgcgctcgagccagagctcgacgatgtagagggcagtgtacttctacgccatgtgcgctccatcacagacgataccgatgcatttttcgaaaaggacgacgaaaatacctataaagacgaagaagacttgtcctccaacaaacaattctatgaggtgtttgccaaggaattgccaccaaatcaaacacattttgtctttgaaaaactgcgccacttcacccgctacgctatcttcgtggtagcctgtagagaagaaatccccagcgaaaaattaagggacaccagttttaagaagtcgctctgcagcgattatgacaccgttttccaaactacaaagagaaagaaatttgccgacatagtcatggacctaaaagtagatttagaacacgccaacaacaccgagtccccagtacgggttcgctggacgccaccagtagatcccaacggagaaattgtcacctatgaagtggcctacaagttgcaaaaacccgatcaagtggaagaaaagaagtgcattccggctgctgacttcaaccagactgccggttatttaataaagctcaacgagggcctttacagcttcagggtgcgagccaattcaatagcgggatacggcgatttcacggaagtcgaacatataaaagttgagcctccgccgagctatgctaaggtctttttctggctactgggaatcggcctagcgttcctgatcgtttccctgttcggctatgtctgttacctgcacaagaggaaggttccctctaatgaccttcatatgaacacagaggtgaatccgttctatgcgagcatgcaatacatcccagacgattgggaggtgctgcgagagaacatcattcagttggctccactaggccagggatcctttggcatggtgtatgagggtatcctgaagtcctttccacccaatggcgtggatcgcgagtgtgccattaagactgtcaacgaaaatgctacggatcgcgagcgaaccaatttcctgagcgaggcgagcgtcatgaaggagttcgatacgtatcatgtcgtaagattgctcggtgtttgctccaggggtcagccggctctggtggtcatggagctaatgaagaagggtgatcttaagtcctatttgcgtgcccatcgtcccgaggagcgggatgaggccatgatgacgtatcttaatcgcatcggagtgactggtaatgtgcagcctcctacttatggaagaatctaccagatggccattgagattgcggatggcatggcatatttggccgccaagaagttcgtccatcgtgatcttgcagctcgaaattgcatggttgctgatgatttgacggtgaaaattggtgactttggaatgacccgtgacatctatgagacggattactatcggaagggcactaaagggctgctgccagttcgctggatgccaccggagagcttgcgagatggtgtctactctagtgccagtgatgtattcagctttggagtggttctctgggaaatggccaccttagcggctcagccataccagggactttccaacgagcaagtcctgcgttacgtcatcgatggcggtgttatggagaggccggaaaattgtcctgattttctgcataaactaatgcaaaggtgctggcatcataggtcttcggcgagacccagttttctggatatcattgcgtatctcgaaccacaatgccccaattcacaatttaaggaagtatccttctatcactcagaggcaggtctgcagcatcgggaaaaggagcgcaaggaacgcaatcagctagatgcattcgcggcagtccccttggatcaagatctgcaggatcgggaacagcaggaggatgctaccacacctttacgaatgggcgattatcagcagaactcctcgttggatcaaccgcccgaaagccccatcgccatggttgatgatcagggttctcacttgccatttagcctgccatccggattcattgcgagcagtactcctgatgggcagactgtaatggctactgctttccagaatattccagcagcgcaaggtgatatttcggcgacttacgttgtgcctgatgcagacgctttggacggcgacaggggatatgagatctacgatcccagtccgaaatgtgcagagctgccgacgagcagaagtggcagtactggcggtggaaaactcagcggagaacaacatttgctgccaagaaagggtcgccagcctaccatcatgagcagctcgatgccagatgatgtcatcggtgggtcctcactgcaaccctcgactgcgtcagcaggcagttctaatgccagttcgcacacaggacgcccaagtctgaagaaaacagtggcggattcggttcgcaataaggcaaacttcattaatcgccacctatttaaccacaagcgaacgggcagcaatgccagccacaagagcaatgcctccaatgctccgagtaccagcagtaacaccaacttgacaagtcacccagtggctatgggcaatcttggaactatcgagagtggtggcagtggttcggctggtagttatactggaacaccccgcttctatactccatcagcgacgcctggaggaggcagcggtatggccattagcgacaatcctaactacagactactagacgagtcaatagccagcgaacaggccaccatcctaacgactagcagccccaatcccaactacgagatgatgcatccaccaaccagtctggtcagtaccaatccgaactatatgcccatgaatgagactccagtgcagatggcgggtgtgaccattagccataatccgaattaccagcccatgcaggcgccgttgaatgcacgccaaagccaaagtagctccgacgaggacaacgagcaggaggaggacgatgaggatgaggacgacgacgtggacgatgagcatgtggagcacatcaagatggagcgcatgccattgagtcggcccaggcaaagagcgttgcccagcaagacgcagccgcctcgcagtcgcagcgtcagccaaacgagaaaatctcctacgaatcccaactccggaatcggagcgacaggagccggaaaccgatccaacttgcttaaagagaactggctgcgaccggcgagtacgccaaggcctccaccacccaatggattcatcggaagggaggcgtaatcgttacgaactgtagttctgtagaaaaacatgtaaatagatgaggagaagcagcatggatatagatagagtagcaagtctttgccgcaagccaagcttcttggaatttgactcttctctatgcctgcaaattagggtggaggagatgtaggtccaaagatatttgtatattttcaatatgactggctagcaatccattgtaacatttctagcgatgaagcttcaaacaagaagttgattctttagttaaaattttgcattaatagaaaattaagcacattgtgtcagtcttcgtaaaataacacacctttccgtagatggatgacaccttttcttcttggtgtcgaaccaaaattgtaaattttagattcatagagcctaattttcaattctcaattgttcgacgattaggcaaacgactatatggagtcgaagatatggaaacaaaggcttaatttgctaagaacgagccaaaaagattgctaaccgccttcacgattctttgttcaagccatcgaaccaccctaaccgcgcatgtataataccaatagtttcgattaagcctatttatgtttacgtattcgtttagtatttactctacattttttgtttgtttaaattaatgcactagagcctctaacgcaatacaaaacgagagcagaaaacgatagtgaaagcaaaaacaga

SEQ ID NO: 13785 - protein, 2144 aa, DROSOPHILA
MFNMPRGVTKSKSKRGKIKMENDMAAAATTTACTLGHICVLCRQEMLLDTCCCRQAVEAVDSPASSEEAYSSSNSSSCQASSEISAEEVWFLSHDDIVLCRRPKFDEVETTGKKRDVKCSGHQCSNECDDGSTKNNRQQRENFNIFSNCHNILRTLQSLLLLMFNCGIFNKRRRRQHQQQHHHHYQHHHQQHHQQHHQRQQANVSYTKFLLLLQTLAAATTRLSLSPKNYKQQQQLQHNQQLPRATPQQKQQEKDRHKCFHYKHNYSYSPGISLLLFILLANTLAIQAVVLPAHQQHLLHNDIADGLDKTALSVSGTQSRWTRSESNPTMRLSQNVKPCKSMDIRNMVSHFNQLENCTVIEGFLLIDLINDASPLNRSFPKLTEVTDYIIIYRVTGLHSLSKIFPNLSVIRGNKLFDGYALVVYSNFDLMDLGLHKLRSITRGGVRIEKNHKLCYDRTIDWLEILAENETQLVVLTENGKEKECRLSKCPGEIRIEEGHDTTAIEGELNASCQLHNNRRLCWNSKLCQTKCPEKCRNNCIDEHTCCSQDCLGGCVIDKNGNESCISCRNVSFNNICMDSCPKGYYQFDSRCVTANECITLTKFETNSVYSGIPYNGQCITHCPTGYQKSENKRMCEPCPGGKCDKECSSGLIDSLERAREFHGCTIITGTEPLTISIKRESGAHVMDELKYGLAAVHKIQSSLMVHLTYGLKSLKFFQSLTEISGDPPMDADKYALYVLDNRDLDELWGPNQTVFIRKGGVFFHFNPKLCVSTINQLLPMLASKPKFFEKSDVGADSNGNRGSCGTAVLNVTLQSVGANSAMLNVTTKVEIGEPQKPSNATIVFKDPRAFIGFVFYHMIDPYGNSTKSSDDPCDDRWKVSSPEKSGVMVLSNLIPYTNYSYYVRTMAISSELTNAESDVKNFRTNPGRPSKVTEVVATAISDSKINVTWSYLDKPYGVLTRYFIKAKLINRPTRNNNRDYCTEPLVKAMENDLPATTPTKKISDPLAGDCKCVEGSKKTSSQEYDDRKVQAGMEFENALQNFIFVPNIRKSKNGSSDKSDGAEGAALDSNAIPNGGATNPSRRRRDVALEPELDDVEGSVLLRHVRSITDDTDAFFEKDDENTYKDEEDLSSNKQFYEVFAKELPPNQTHFVFEKLRHFTRYAIFVVACREEIPSEKLRDTSFKKSLCSDYDTVFQTTKRKKFADIVMDLKVDLEHANNTESPVRVRWTPPVDPNGEIVTYEVAYKLQKPDQVEEKKCIPAADFNQTAGYLIKLNEGLYSFRVRANSIAGYGDFTEVEHIKVEPPPSYAKVFFWLLGIGLAFLIVSLFGYVCYLHKRKVPSNDLHMNTEVNPFYASMQYIPDDWEVLRENIIQLAPLGQGSFGMVYEGILKSFPPNGVDRECAIKTVNENATDRERTNFLSEASVMKEFDTYHVVRLLGVCSRGQPALVVMELMKKGDLKSYLRAHRPEERDEAMMTYLNRIGVTGNVQPPTYGRIYQMAIEIADGMAYLAAKKFVHRDLAARNCMVADDLTVKIGDFGMTRDIYETDYYRKGTKGLLPVRWMPPESLRDGVYSSASDVFSFGVVLWEMATLAAQPYQGLSNEQVLRYVIDGGVMERPENCPDFLHKLMQRCWHHRSSARPSFLDIIAYLEPQCPNSQFKEVSFYHSEAGLQHREKERKERNQLDAFAAVPLDQDLQDREQQEDATTPLRMGDYQQNSSLDQPPESPIAMVDDQGSHLPFSLPSGFIASSTPDGQTVMATAFQNIPAAQGDISATYVVPDADALDGDRGYEIYDPSPKCAELPTSRSGSTGGGKLSGEQHLLPRKGRQPTIMSSSMPDDVIGGSSLQPSTASAGSSNASSHTGRPSLKKTVADSVRNKANFINRHLFNHKRTGSNASHKSNASNAPSTSSNTNLTSHPVAMGNLGTIESGGSGSAGSYTGTPRFYTPSATPGGGSGMAISDNPNYRLLDESIASEQATILTTSSPNPNYEMMHPPTSLVSTNPNYMPMNETPVQMAGVTISHNPNYQPMQAPLNARQSQSSSDEDNEQEEDDEDEDDDVDDEHVEHIKMERMPLSRPRQRALPSKTQPPRSRSVSQTRKSPTNPNSGIGATGAGNRSNLLKENWLRPASTPRPPPPNGFIGREA

SEQ ID NO: 13786 - DNA, 7397 bp, DROSOPHILA
gcttgttggccaccatgaccatgacgtagtccggcaattcatcgtctataaaaccggccgatcctccggttcccagctccagcagctttgcctttacggcgctctattaatgaagtgcaaaaatatatatagtattggagtatccaatccgagcggtatccataacgagttcattgatttttttccaatgacttacgcgcatcttctgaccaatctcgctgcccagattgcactccatgtttgctggtttatctatcgcctttttcgctgtttattcgccgcgagcatttattatttacgcttactttgtggctacactccactttttgttacattagaaaatggcaaaacctcccaaaaaaaaaaaatatcgcagctgctccgatattcataactagtggtgtgcgtttgacattaagggtattcacgtttaattcacacgttttataatgtatatatcgattttctataaacatagctttaaaataataaatagttacagaaatttcatttgaaattaaaatggcaaattaaaaacttctgaaatttaaaaatgctcctggccatggccatgaactgaagtgcaacataacttcaaaataatcaacaccaatgggacaatttaaaaatataaaaagatttcacttgttattcattaaatcataagtctagttatcaagaatttgtgtagtagctattaaattacattcgaaaattaaaagcgaataattgcaaacagtttatttaatcacatagctaaatataaatttcataataagcttaaattccaaaccaatggctacgaatatgtttgactgagaattaaaattctcaatttgaagtaaatatcttagattgtagaatcctgcgaagcatttcagtgcatcatctcaaattcaaatacgaaaattggctccttcggctaagactcgatacccatcttgtgagccccgccaccaactatcgatacgcaaaggcatttcattcggtgggaatggcaatcgagtgtcacacgggaagaagaagctgcgaaaagaattttagaagaaagcaactgcaattttgtcataatcggagctgcaattcgcaatgaataatggaaactagacaacccagttccggtgatgatctaaagccaggtgcgtaccgcccggtggcgcagcgagtgcgtccaacggggctaccaaaggcagcccctttgactttgtgaaatgtgtgtctgtgtttcgctcgcccttcgaatcgaatggctgcgttttttcgactgcgtttcgccaagcgaaattcacgggcccctttggccagatatatctggaatattgacgactcccagcgagcgcattttcgacaacttgttgcactaaaacccgtgaaatcctctatcttgcagagctgtacttcctcatttccaagttcctggccgcgggaccgctggaggagacggcgaaggtgggttgaaagcagcgctcgcgcgagatcgcattggaatcgtatttcgcgctaaaagagcggaatttcgttttgtttacaaacatttacattaattctgaaactaaattctatccaactgtaggtcttgatccgggaactcgaagagaagaaggtgagttttgttggtgctgcagctgtgtttttggcacagatatttcggactcgaattgagaggggggccaaaaaaaaaatagaaaaccgcgtttgtttatacgctttgttttggttttgttgttgtttctgctgccggcagcgaacgacgaaaaacccacttgtacgtccgcttgtctcagagttgggaatcagactgaattgtggatttgctggggccacgtgaatatatagtccattaaaaaaagaagagaaaaacatgaaaaaagaaatggaatcatagggatgcccccgcgacgtcatcgtcgacgtcacggagtgcaagtgataagagtcatacatgcatgcatatatatttacacccgtctatatatacgtacacctttcgattcccaggttttgccgcgtcgtctcgattggcagggaaacgagcatgagcagacctttgaggaattggtgagtgttttcataattaatcaattagcttttcaaagttatcgtttaatgccttttgatcggcatttaagtcttgcgtaagtgtgcgtctgctgcggcattttccgtctcagtcgttcgctcgcctttgtgacgtcatcgtgtcagggaatagagaaaaagttgcacatcaaaattcaagttgttaatttaaaaaacattacaactaaagacatcaatcattctgactgttaaattaacaaataagtaagcaactatttaattaaaaaggcagcaaaaaattgcaaaaattcgtaaaagactaaagtggaaagcaaaaattctaaaaccctcgtaaaaattgtaaattttgaaaaatcttaattttttaaacaaatgctttgtaatttagttttaacaattagctgcaaccagccgacattttggtttctcacacatacacatgcccatgcgcacagacacatgcaagcaaccaccactttgccttgacttgtgcgcgagggaacgagacaagcatacgttgttgaagctatcgcaccgtttatcgcccaatcgataggaatacgttaaattttgattttgaattcgcaggaacgaaagtacaagcacattggcgccaatcacttgcttgaaatatgcagtcgtctgggtccactggtggatcgcgagcttccgcccagtgttccgggcatcaactcgctgttgggtactgggcgccagaacctcctgcgcaccaaggaaaccgtctactgccatcgctccttaagggactactgcacccgcctgaatggagtctcgctgccggattcggtccttacaaagccgacccacaacttaggttagttgcatggtagagttttattcgcatattagagactaacccatttatatttccaaagatcgcgttctaactggacgggaacacggcggggaagtccgtcgcaagctcctcgtgcccacggacctctaccgccgaacaaaattgctccgtcgcactgtgggccacctgtcctcagtgtactgtgttctgtttgatcgcacaggaagatacatcatcaccggagccgatgatctacttattaagatatggtcagcggcagatggccgcctgctggccactctgcgaggcgcctcatccgagattacagacatagccattaacttggacaatacgatgctggctgccgggtcattggatcacatactaagagtgtgggacatgcaaaccacatcacccatcgccgtactgtctgctcacacgggcatgataacttcggttaacttttgtccgtcgccacgtagcgatctgaaatatctggtgactaccagcacagatggatcgatcgccttctggcaatactcaacgccgcgcgggcaaaagatcacgtttgccccgaagccaacgcagtatcatgagaaactgcggcccggacaagctcagatgatgtgtaccaccttttcgccaggaggcatttttctggccgctgggtctgccgatcaccatgtgcgcgtctatatgatgggcgaggacggtccgaagcgaatattggagacggaagcttacacagatgccgtggactcggtgcagtggtcgcatcgtggactgagatttatatcggggagcaaggacggcacagcacacatctggacgtttgagtcgcagcagtggaaaagttccaaactatgcatgacggagcgtctggccaggtgagtgcgattttctttaaaatgtttctagctagtaaggaattctctgaaaactaatagctttgtaattaaattgcagctgcccggaaccagaggagggaaagaggcttaaggtaaccatggtggcttgggatgcctcggaccgttatgtcatcaccgccgtaaacgattttactgtaagcatccgtcttaaaacgtgctaaacatttacttataattaataatcccatttaaaaacagataaaaatctgggactcgaagtcagccaagctgcatcgtgttctgcgtgggcacaaggatgagctttatgtgcttgagtcgaacccaagagatgagcatgtcctgctttccgccgggcacgatggccaggtatttctgtgggacatcgagcagggcgtttgtgtggccaacttccttaacgacatcgatggccaaggccatggcagtgtctttgatgcaaagtggtcaccggatggcacaatgatagctgccaccgattcgcatggacacatcctgatttttggtttgggcgtgtgcattgaaaagtacaaaatggtaagttgattgaggagtatttttcaaaggataaagttaaatgtatttattctttcagcttcccacggagctgttctttcacacggattttcgacctttattgagagatgcgcagcaccatgtggtggacgagcagacgcagataatgccgcacctaatgcccccgcctttcctggtcgatgcagatggcaacccgcatccatcaaggtttcaacgatttgtgcctggtcgtgagagctgtagcctagaccaattgattccaaatcttacggtaggcgtggatggcgtagtaatcgacgatggaggtgcaggtggagatgctgttgtggccgctgcacccgctgaagctccgccagccgcattgccccctgctgctgctggaggaccacagggagctaactactcccatatcgaccgcatgattgcagccttggccaatcggcagtcggttaatgtaaatgccaatgatgccaatccgaccaacggcaaccagtccttcgaacgtttgaccaatcgtcaaatgccggactccaatggcaggcaatcgtcacgtggcaatgtcctgggtagtcgtttgagcacgcctcgccaaggatggggtgccgcagctgccgcgccagttgaggatcaagcagggccgtctcaacctccggcagaacctgcagccgaacctggccaggcacaagtccaacaggcgctgcctctgaaattcatccgtcgcacttatgtgcgtcccatgaagtatccccagttgcaaaaccttaagcagactatttactctgccggtcagtttgaaaagcaggagtacaaacgcgaaatgcgacgccgacccatcatgataaacactgccagtgcagcatcttcgcagcagccaggaagcgttggcaggccacgaaacacacgtggcaatggcggcggcgcaagagctggacgaagacgtggcccccagccagctggcggacagccacaacccgcttatcgcacccgcgctgttcgggatcaggagccggagcactacgatgaggtagcgccgccacccgaggaagaggaggaagatgtgtccagcaactcgtccggcgacacgagctactcgaatgtggaagaaaacctagaggacagcagcgatgagtcggaaacggacagttccgattactctgactgggtggcggatactcctggcccgaatctggaaccaccaaaacgatccaagcgtaagccactctcacggcgaccccggagtagtgatgacagcagcgatgatgagcgagcgggcagatccagaggtgggcaggttacggcccggaaggttggacgtaaaactgttttgtttccgcccacagatgcaaatggagagataccggagctttatcgtcccgctgagtggctatctgaggtgattccacgtaaggcaccctattacccccagatgggtgatgaggtagtctacttccggcaaggacacgcaaagtacttggatgcagtccgcctgaaaaaggtctacaagctctcgcacagctcggagccgtggaactttcacacactgcgcgaccacgagctggtgcgtgtgattggaatcaagtacgaaatccgcccaccccgattatgttgcttgaagttggccatcatcgatgaggagggcaacatgacggggacaacgttcaagatcaagtaccatgacatgcccgacgttttggactttttagtgctgcggcagaccttcgatcttgcagtgcagcgcaactggagcattggtgaccggtttcgctgcatgattgtcgatggctggtggatgggtcagattgaatcgcgccacgccctctctgctgacttccccgactcgtccttcatgtgtttccgcgtgcgctgggataatggagagtatgagtttatgagtccctgggacatggaacccatcgatcagcaaagagtaccggacgaggtgggaggtgctgttccagttctaccggaggagattcgcgccactctataccagcccaagtccgaggaatggcacagaggggatcgcgatggcacctgcaggcgaattatcaatggattggagcaggtaagcatttgatttaaatattatcatattattttattaattgattttcttacaggttatgcgtctctctatcgcagagcatttcctggcccccgtggaccttaacatatatccagactacgcttatttgatcgaatatcccattgacctgaccacaattaaatctcgctttgagaatcacttctaccgcagaataacctcagcccagttcgatgtacgctacctagccaccaatgcggagcagtacaatcgccgacacgcaattatcgtcaagcattcgcgaattgtgacagatctttgtttgaggatcatcaggtgaatgaaggaattttaggtttaaaaaggtaattgttttaaaatatacgtcttctagggaaccggatgagatagatgtggctgctgtttaccatcagcttgcggatgtgtaccattcgtccgagtcggagaacgaggtagattcggatgtagtgccatcgaccagcacagggccaactacttcagcagctgcagcagcagctaggcaaagagtatcctcagccaggcggtaagaatatatataatgcctaataataatatggctcaacaacccaatcttctatagatccactcgaattcactcggaaggagactggcgtgccgattgtcgtcagctgcttgatcttatgtgggcgaggacagattcggcgccgttccgcgagcccgttgacaccatcgacttccctgactacctggagatcatagctactccaatggatctgcgcactgtaaaggaggatctgctgggcggcaactacgatgatccgttggactttgccaaggatgtgcggctgatcttccaaaactccaagaactacaacaccaacaagcgctcacgggtgagtggagagcagattggcagatcggttgcagatcgtcatttattgcattctaagactgagatatccaccctctttctcagctattgccttttcgtttatgttgtgaccccatcccattactcactcacgtagcc

SEQ ID NO: 13787 - DNA, 3774 bp, DROSOPHILA
atcgagtgtcacacgggaagaagaagctgcgaaaagaattttagaagaaagcaactgcaattttgtcataatcggagctgcaattcgcaatgaataatggaaactagacaacccagttccggtgatgatctaaagccagagctgtacttcctcatttccaagttcctggccgcgggaccgctggaggagacggcgaaggtcttgatccgggaactcgaagagaagaaggttttgccgcgtcgtctcgattggcagggaaacgagcatgagcagacctttgaggaattggaacgaaagtacaagcacattggcgccaatcacttgcttgaaatatgcagtcgtctgggtccactggtggatcgcgagcttccgcccagtgttccgggcatcaactcgctgttgggtactgggcgccagaacctcctgcgcaccaaggaaaccgtctactgccatcgctccttaagggactactgcacccgcctgaatggagtctcgctgccggattcggtccttacaaagccgacccacaacttagatcgcgttctaactggacgggaacacggcggggaagtccgtcgcaagctcctcgtgcccacggacctctaccgccgaacaaaattgctccgtcgcactgtgggccacctgtcctcagtgtactgtgttctgtttgatcgcacaggaagatacatcatcaccggagccgatgatctacttattaagatatggtcagcggcagatggccgcctgctggccactctgcgaggcgcctcatccgagattacagacatagccattaacttggacaatacgatgctggctgccgggtcattggatcacatactaagagtgtgggacatgcaaaccacatcacccatcgccgtactgtctgctcacacgggcatgataacttcggttaacttttgtccgtcgccacgtagcgatctgaaatatctggtgactaccagcacagatggatcgatcgccttctggcaatactcaacgccgcgcgggcaaaagatcacgtttgccccgaagccaacgcagtatcatgagaaactgcggcccggacaagctcagatgatgtgtaccaccttttcgccaggaggcatttttctggccgctgggtctgccgatcaccatgtgcgcgtctatatgatgggcgaggacggtccgaagcgaatattggagacggaagcttacacagatgccgtggactcggtgcagtggtcgcatcgtggactgagatttatatcggggagcaaggacggcacagcacacatctggacgtttgagtcgcagcagtggaaaagttccaaactatgcatgacggagcgtctggccagctgcccggaaccagaggagggaaagaggcttaaggtaaccatggtggcttgggatgcctcggaccgttatgtcatcaccgccgtaaacgattttactataaaaatctgggactcgaagtcagccaagctgcatcgtgttctgcgtgggcacaaggatgagctttatgtgcttgagtcgaacccaagagatgagcatgtcctgctttccgccgggcacgatggccaggtatttctgtgggacatcgagcagggcgtttgtgtggccaacttccttaacgacatcgatggccaaggccatggcagtgtctttgatgcaaagtggtcaccggatggcacaatgatagctgccaccgattcgcatggacacatcctgatttttggtttgggcgtgtgcattgaaaagtacaaaatgcttcccacggagctgttctttcacacggattttcgacctttattgagagatgcgcagcaccatgtggtggacgagcagacgcagataatgccgcacctaatgcccccgcctttcctggtcgatgcagatggcaacccgcatccatcaaggtttcaacgatttgtgcctggtcgtgagagctgtagcctagaccaattgattccaaatcttacggtaggcgtggatggcgtagtaatcgacgatggaggtgcaggtggagatgctgttgtggccgctgcacccgctgaagctccgccagccgcattgccccctgctgctgctggaggaccacagggagctaactactcccatatcgaccgcatgattgcagccttggccaatcggcagtcggttaatgtaaatgccaatgatgccaatccgaccaacggcaaccagtccttcgaacgtttgaccaatcgtcaaatgccggactccaatggcaggcaatcgtcacgtggcaatgtcctgggtagtcgtttgagcacgcctcgccaaggatggggtgccgcagctgccgcgccagttgaggatcaagcagggccgtctcaacctccggcagaacctgcagccgaacctggccaggcacaagtccaacaggcgctgcctctgaaattcatccgtcgcacttatgtgcgtcccatgaagtatccccagttgcaaaaccttaagcagactatttactctgccggtcagtttgaaaagcaggagtacaaacgcgaaatgcgacgccgacccatcatgataaacactgccagtgcagcatcttcgcagcagccaggaagcgttggcaggccacgaaacacacgtggcaatggcggcggcgcaagagctggacgaagacgtggcccccagccagctggcggacagccacaacccgcttatcgcacccgcgctgttcgggatcaggagccggagcactacgatgaggtagcgccgccacccgaggaagaggaggaagatgtgtccagcaactcgtccggcgacacgagctactcgaatgtggaagaaaacctagaggacagcagcgatgagtcggaaacggacagttccgattactctgactgggtggcggatactcctggcccgaatctggaaccaccaaaacgatccaagcgtaagccactctcacggcgaccccggagtagtgatgacagcagcgatgatgagcgagcgggcagatccagaggtgggcaggttacggcccggaaggttggacgtaaaactgttttgtttccgcccacagatgcaaatggagagataccggagctttatcgtcccgctgagtggctatctgaggtgattccacgtaaggcaccctattacccccagatgggtgatgaggtagtctacttccggcaaggacacgcaaagtacttggatgcagtccgcctgaaaaaggtctacaagctctcgcacagctcggagccgtggaactttcacacactgcgcgaccacgagctggtgcgtgtgattggaatcaagtacgaaatccgcccaccccgattatgttgcttgaagttggccatcatcgatgaggagggcaacatgacggggacaacgttcaagatcaagtaccatgacatgcccgacgttttggactttttagtgctgcggcagaccttcgatcttgcagtgcagcgcaactggagcattggtgaccggtttcgctgcatgattgtcgatggctggtggatgggtcagattgaatcgcgccacgccctctctgctgacttccccgactcgtccttcatgtgtttccgcgtgcgctgggataatggagagtatgagtttatgagtccctgggacatggaacccatcgatcagcaaagagtaccggacgaggtgggaggtgctgttccagttctaccggaggagattcgcgccactctataccagcccaagtccgaggaatggcacagaggggatcgcgatggcacctgcaggcgaattatcaatggattggagcaggtaagcatttga

SEQ ID NO: 13788 - protein, 1225 aa, DROSOPHILA
METRQPSSGDDLKPELYFLISKFLAAGPLEETAKVLIRELEEKKVLPRRLDWQGNEHEQTFEELERKYKHIGANHLLEICSRLGPLVDRELPPSVPGINSLLGTGRQNLLRTKETVYCHRSLRDYCTRLNGVSLPDSVLTKPTHNLDRVLTGREHGGEVRRKLLVPTDLYRRTKLLRRTVGHLSSVYCVLFDRTGRYIITGADDLLIKIWSAADGRLLATLRGASSEITDIAINLDNTMLAAGSLDHILRVWDMQTTSPIAVLSAHTGMITSVNFCPSPRSDLKYLVTTSTDGSIAFWQYSTPRGQKITFAPKPTQYHEKLRPGQAQMMCTTFSPGGIFLAAGSADHHVRVYMMGEDGPKRILETEAYTDAVDSVQWSHRGLRFISGSKDGTAHIWTFESQQWKSSKLCMTERLASCPEPEEGKRLKVTMVAWDASDRYVITAVNDFTIKIWDSKSAKLHRVLRGHKDELYVLESNPRDEHVLLSAGHDGQVFLWDIEQGVCVANFLNDIDGQGHGSVFDAKWSPDGTMIAATDSHGHILIFGLGVCIEKYKMLPTELFFHTDFRPLLRDAQHHVVDEQTQIMPHLMPPPFLVDADGNPHPSRFQRFVPGRESCSLDQLIPNLTVGVDGVVIDDGGAGGDAVVAAAPAEAPPAALPPAAAGGPQGANYSHIDRMIAALANRQSVNVNANDANPTNGNQSFERLTNRQMPDSNGRQSSRGNVLGSRLSTPRQGWGAAAAAPVEDQAGPSQPPAEPAAEPGQAQVQQALPLKFIRRTYVRPMKYPQLQNLKQTIYSAGQFEKQEYKREMRRRPIMINTASAASSQQPGSVGRPRNTRGNGGGARAGRRRGPQPAGGQPQPAYRTRAVRDQEPEHYDEVAPPPEEEEEDVSSNSSGDTSYSNVEENLEDSSDESETDSSDYSDWVADTPGPNLEPPKRSKRKPLSRRPRSSDDSSDDERAGRSRGGQVTARKVGRKTVLFPPTDANGEIPELYRPAEWLSEVIPRKAPYYPQMGDEVVYFRQGHAKYLDAVRLKKVYKLSHSSEPWNFHTLRDHELVRVIGIKYEIRPPRLCCLKLAIIDEEGNMTGTTFKIKYHDMPDVLDFLVLRQTFDLAVQRNWSIGDRFRCMIVDGWWMGQIESRHALSADFPDSSFMCFRVRWDNGEYEFMSPWDMEPIDQQRVPDEVGGAVPVLPEEIRATLYQPKSEEWHRGDRDGTCRRIINGLEQVSI

SEQ ID NO: 13789 - DNA, 3537 bp, DROSOPHILA
cagtaaatagagacaccaaatgagcacccagtaaacctgcctcctgttatcaggtacaaaatctgttgcagaacgttcaggacaagttccagacgatgtcggaccagataataacgcgcatcgatgacatgggcaaccgcatcgacgatctggagaagagcattgcggatctgatgaaccaggccgggatcgagggtcagggaccggagaaatgagatccgtagcgctggcacggccacgcccattcggaaagtgcatcccaataccattagatacatacatcgaacacctggcacccagtcacccgtatcaagtttacaattccaggttctcacattcatttaatctcctccgcacccagctgctccccaagaaatgaagaaaagaacacatttgctcatccatttattgcttagttttaagtttcgcccggtcggggcacatcataatttaagtaaagtaattcttttgtgagcaatggccaataattttgaattattgccgtttagtttctatttataaattaaaaattcaagaattgtaaattccctgctatttgggtgttcaggacttcgatttaacaacggttaccaggcgaccagttcccgatttgtgtttcctcacctgaaagtttattgcgaaaaggggaagagaagcgcgtcatttccgcttgattagttatgatatgcatatatttagtattgtttatctgggacaaataatgcaaatcgtgacccgtgtccattaataaaaagtgtatggaaatcagcgctgaatggcaaggagtgctatataacaatccctacttttaaaaggaaaatcaacattgatttgtggaccagaatgattttcgaatattaattgcaatttgtgttgcttctacatatcatgttttttaaggcaatgagatagagagtggtaatacattctgattaaattatgaaaggaagctctgagactgcggggttacaaaaaccaattaagataaacccttagaagtatgttcctaattcaattttatttaagctcttgctacgattccagaatgtgcctgcaatactgatgtgagctctaggaactctactactggtcataatttgagtgctagtgctggggcacgtggaactgcttctgcagccttacatgggtggaggccaccgccttgaatggatgtttgaccgtttgtctgctgggcttcgaaggagcagaagtggcactggcactggtcgatggcgtggctatatccttgctggcagatcggatcttggccccaaaaacattctcccgcggaggaacctggttgcccggctgcgtgggttccctctcgtcatccgttgccgttccagattcctcgtcctcttcgccactttgctcggtttccttgggaggaatggagttattctatcattccataatcatgccaaatcatacctcatcttcatcatcttcctcttcatcctgctcgtcggtttcatcttcgggttctgttttacttccatgattgattccggctcccgtcagattcctattgctcctggacaacttcgggcgcctcttgagcggactgaccaggtgctcgtgctccaagctatccatcgactgggagcgcagtccctttttgagtgcagttttcctggaagccagctcttctttggtcttcatgagtttctgaaactcaatgaaatcgtcgcgctcatcaatggttccaatatcatagtagcttgcgctgagtatctccaatgccttggtgtgctgtttcatggcgatcagtataaaatcgctgattatctgctttaagtcgcgcaacttccgctgctcgaagttgccaataatgtcgtctatctccttgtttgtgcgctgcacctccattttggccttaaacagctccgaatcggcggcactctacggtaagttttgggaattatataagaagtaaattgttcgttttaatacccacattgttcgcagaaaactttgacttgagctcaagcatctggcgctgacgtagtacctccttatcccgcgctatgacagccagtcgaagattgtcccttgtggacttgcaaagctgctcgaattgcgccaactcgttgacaatctacataagtcaataatatgatataagatgcagatttaaaaaaggataattcaccttgtgttccaatcggtgtacattgatgtccatgtaatcacccattatggtaaccgcgttggtgaagctcttcagtccctgacagagactctcgttgatttcctcgtcgtcggcgtagctcttcacactcttggccaactcatcaaaggagtcccgatatctgcaaggtcttatgattattcattcagatttatttatttaccaaactcacttggccattttccgcgttaccaaagcaaacgaagagcacatctccattagatgcctttctgttatgtttatgcgctcgtttattattttaacacggtcatctttggtgtttagaaaggatagttttccacgacgaaacattattattttattttagtcccttatatttgttttccttctttatttattttatttcgacaataaaatcaagtgaaaaccgttaccaaggcaacgtctaaattcatctggcaactctcgttcgaacagccagcatatttccagctctgtaaaattaacagaaatgttaagaacctactgctgccaggtggcgctagtatcagcgtcttctgcaagtacatagatggcgcaagaataaagtttatcaaggaaatttaaaacattctaaaaatattcaatcctaaaataaatatctgaatatgggtacttcatttttttccaacagtgtcaaggtcaagagcacgtttcgttataatctgtgagtgtttctgtctgtcatccggtgtctaaatttaaattcgaaagatttatgactaattaagagactgcaaatgataaagaaaaatatatataattagtatatataaaaaaatagaaaatatactacgatatttacctgaagatcatagcattgtaaatagtttatttaaaaacaagtcaatctgatattttaaaatatcgttggtcctaaaagccaagctttactcacttaaatatatgtaggactaagctgactcaaattcttctcacttcgaagccttgacaaccaaatcttgttttttggggaatttattgactcgaccgcaagaatgttgtgtcaacgattaaccgaaaatggtaatttattttaaatgctcctctgccacttaaaggcatagtgcaatcaaacctgtatttagtaaaacgaaaatagcagttcgaataaaaccaacgaaagtgtagttaaaacagaatccggttcgtgggaccacgacaagaattacaagttgtagagcatgaagagcagcctgcaggagattttaacagctgtagctgcgccgatcgcgatttcaatctggtcgaaaaccataaagcaacacggctcccaagaggcaagttcaggtaaaagggggcaggtggacttcattgtcaatccaagaacgtagcttggcgcgcgt

SEQ ID NO: 13790 - DNA, 1326 bp, DROSOPHILA
gaaaacaaatataagggactaaaataaaataataatgtttcgtcgtggaaaactatcctttctaaacaccaaagatgaccgtgttaaaataataaacgagcgcataaacataacagaaaggcatctaatggagatgtgctcttcgtttgctttggtaacgcggaaaatggccaaatatcgggactcctttgatgagttggccaagagtgtgaagagctacgccgacgacgaggaaatcaacgagagtctctgtcagggactgaagagcttcaccaacgcggttaccataatgggtgattacatggacatcaatgtacaccgattggaacacaagattgtcaacgagttggcgcaattcgagcagctttgcaagtccacaagggacaatcttcgactggctgtcatagcgcgggataaggaggtactacgtcagcgccagatgcttgagctcaagtcaaagttttctgcgaacaatagtgccgccgattcggagctgtttaaggccaaaatggaggtgcagcgcacaaacaaggagatagacgacattattggcaacttcgagcagcggaagttgcgcgacttaaagcagataatcagcgattttatactgatcgccatgaaacagcacaccaaggcattggagatactcagcgcaagctactatgatattggaaccattgatgagcgcgacgatttcattgagtttcagaaactcatgaagaccaaagaagagctggcttccaggaaaactgcactcaaaaagggactgcgctcccagtcgatggatagcttggagcacgagcacctggtcagtccgctcaagaggcgcccgaagttgtccaggagcaataggaatctgacgggagccggaatcaatcatggaagtaaaacagaacccgaagatgaaaccgacgagcaggatgaagaggaagatgatgaagatgaggaaaccgagcaaagtggcgaagaggacgaggaatctggaacggcaacggatgacgagagggaacccacgcagccgggcaaccaggttcctccgcgggagaatgtttttggggccaagatccgatctgccagcaaggatatagccacgccatcgaccagtgccagtgccacttctgctccttcgaagcccagcagacaaacggtcaaacatccattcaaggcggtggcctccacccatgtaaggctgcagaagcagttccacgtgccccagcactagcactcaaattatgaccagtagtagagttcctagagctcacatcagtattgcaggcacattctggaatcgtagcaagagcttaaataaaattgaattaggaacat

SEQ ID NO: 13791 - protein, 364 aa, DROSOPHILA
MEMCSSFALVTRKMAKYRDSFDELAKSVKSYADDEEINESLCQGLKSFTNAVTIMGDYMDINVHRLEHKIVNELAQFEQLCKSTRDNLRLAVIARDKEVLRQRQMLELKSKFSANNSAADSELFKAKMEVQRTNKEIDDIIGNFEQRKLRDLKQIISDFILIAMKQHTKALEILSASYYDIGTIDERDDFIEFQKLMKTKEELASRKTALKKGLRSQSMDSLEHEHLVSPLKRRPKLSRSNRNLTGAGINHGSKTEPEDETDEQDEEEDDEDEETEQSGEEDEESGTATDDEREPTQPGNQVPPRENVFGAKIRSASKDIATPSTSASATSAPSKPSRQTVKHPFKAVASTHVRLQKQFHVPQH

SEQ ID NO: 13792 - DNA, 3740 bp, DROSOPHILA
caggctagtggttgttaggttcgtgcgagcaaagtttaaataggatctcgccttttggcatgtccacagcgattcctccaacttcttctgcgtgtcattgatagcggcaaactcactgctgcaggcattccgctgctccaggatgttctggagcacctgtttggtaagaaccttctgctgagtgcgcaattgtgcaatggtgacctcgatgagctcgttgtctatgccatcgttgagaactttctacggaagatcgtggtgggtaattaaagccacagcttactggtctacctggtttaccttgagttcgtacagctgtggattgctgtcggggttgtagtagcactgttcgatgctctccaggatctcctggtccgacttttgtgcatttgactcgctggaagaagtggctgccgcgtctgtggcatcagtttcttgactggcggaggcgtctgtggtcaccgtttgaatgaaataatccgaaaaacccatggcaggaattttcatttgacggttcgtctttgtgtgcgtgagcagtattttgtttggtgggcggaatgcatagcaacggggttagttttggggattatttaaatgttcgatgatctgctacctgtttgtgcaatatgtccaagaatttgctcttgaattcgtccattttggccttggaattctgcatgatttagccatgaagaaaccagccaaaacacaaaaacgtctgcagccgagtgtgaccagcatccgcaagcattgctaaagctacttgcagtgttaaaaaatatataaagttatagtacctagaaaataggtacatcattgtctacagacctatttttaggaaaaacttttgccttgttgagaagaaaaagctttaagcacttttatacatattcgtggcacattaatttaatgttatattcaaatcgaaattgggccccagtaccgattagcattttcttcacctttcaacactactacatcgaccactctttggccattgtgcacactgttgttttttgcttgccgatttttgtttaacatattgtatttatttgtttatatgtggtatgtcaaattactggaagccgcagaacccaaagagtgaaaaatgcgcatctgcatggtgtcggacttcttctatccgagcatcggaggggtcgaggagcacgtctacaacctttcgcaaatgttgctcagcttgggtcacaaggtgactattgtcaattgggcggaccacgaatgataacgattatttgaactgactatctttgcccattagatcgtcgtgctgacccacgcctacggagactgcagtggcattcgctatgtgactggctacctgaaggtctactatctgcccattaaggtgtgctacaaccagtgcatactgcccaccgctgtttgcaatgtgccgatgttgcgagcggtgctacttcgtgagcgggtggaagtggtccatggccactctgccttcagtgctctggcgcacgaggcactgatggtgggctccctcctggggctaaaggtaggcataatcttcaatacgaaacgtatagtttaaatcgctaatgaatcatctttttgtttggcagactgtctttaccgatcacagcctctttggctttgcggacttgtcagccgctctaaccaacaatctgctggaggtcaacttgggcatggtcaatcacgccatctgtgtatctcacatagggaaggagaacactgttctacgcgctcgagtagctaaacatcgagtttccgtcattcccaatgcagtcgacactgccctgtttactcccgatcctcaacagcgtccgagcaatgatataagtatggggacttcgtcgttttgtagtatttttaattaacttatccctacttttcagtcaacattgtagtggcctcccgtcttgtctaccgcaaaggcattgatttgctagctggcatcattccacggttcaaaaacactcccaacataaactttatcattgtgggcgatggacctaagcgtgatctgctggaggagattcgcgaaaagaccaatatgcaggaaagggttcaaatggtgggcgccgtggagcataacagggttcgcgatttcctggtgcgtggccacatctttttgaatacctcactgactgaggcctactgcatggccatcgttgaggcggcttcctgtggactgcaggtggtgtccaccagtgtgggcggaattcccgaagtgctacccaagagtcttatactgctggcagagcccgaaattgatgccatttacgcagcgattctaattgccatcgaccgtcatcgaaagagttcctttaaggttagtccatcagttggcaatgggcatttggcctcggacgctaatggaaaggttaagcggcgacgtcgcaggaaagtcgatactcctatctctcctacacaactgccagcagtctctgctcctcctgcggatcagaacagctctacagagcccgtaatgtgtccatatagatgtaatgagttggtggaaacgctttacaattgggaggatgttgcccttcgcacagtaaaggtgtacgatcgcgttttaaatgaacgctctttcaccactagcgagctggtgtttgcggtgtggcagcacggatcctggtttctggtgttcttcgttgtggcccacttcttaatgcgcttgctggagctttggcgtcctcggaaacacgtagagatagcgcaggatgtacaacgtagggccagctagcaaacaccaaacggattccattcttccatcaactagccaattatatatttatgcgatagattttataacccttgttgtgtttatttgttgtccatagtagtagtcgaagtgatagttcccttaaacaatatgataatccattcttatgataaaattaacccaaacggcgctgctgatctacgccgataaaatattccgcccacagcaacgtttttataaagaagactgtttcttatattcatttcattctagaatcatagattctaggaagctaagctttaacaatttaaagtgtgcgataatgatttaaagagtcgctagtcgattcttcaatttaaaatctatatttattaaaaatatagttattttatgtatatctatgctcaatagaaattaactttttttttttaaagaacccaaaggaaataaataatctagagaattttctgatcatgtccgagttaaatttaataaattaaaacaggttgcataaatcaaatttctttcagtaatatggcacaatcctgcaataaaatgtattacaaaaatgaaatatataataaaaatacaaaatatttctatttaaaaaaaaaatcaaataatataccgaaaactttaaaaatacggtcctccgaagaacggattatctggccatactgcgatgcagccctggcttatttgggaaaaaattaagagggagcagcagcggaggctagtgataaattaattagccactgctaccacataacccagggtgcggaaacctgaacccagctctgcggcatatccactaccattgctagcaccccggttgccatccaggtcaaggtgagcacaactgtgaagtccgacattgactgtgaatttcctattgcacttttcagattctgttaccagctcagggtaacgacgatggcggaactggtgagggactggctggcggactaccagcgcatacggggtcagccctcggaggcggaagcgttcgtggtggagcacg

SEQ ID NO: 13793 - DNA, 1548 bp, DROSOPHILA
tgcacactgttgttttttgcttgccgatttttgtttaacatattgtatttatttgtttatatgtggtatgtcaaattactggaagccgcagaacccaaagagtgaaaaatgcgcatctgcatggtgtcggacttcttctatccgagcatcggaggggtcgaggagcacgtctacaacctttcgcaaatgttgctcagcttgggtcacaagatcgtcgtgctgacccacgcctacggagactgcagtggcattcgctatgtgactggctacctgaaggtctactatctgcccattaaggtgtgctacaaccagtgcatactgcccaccgctgtttgcaatgtgccgatgttgcgagcggtgctacttcgtgagcgggtggaagtggtccatggccactctgccttcagtgctctggcgcacgaggcactgatggtgggctccctcctggggctaaagactgtctttaccgatcacagcctctttggctttgcggacttgtcagccgctctaaccaacaatctgctggaggtcaacttgggcatggtcaatcacgccatctgtgtatctcacatagggaaggagaacactgttctacgcgctcgagtagctaaacatcgagtttccgtcattcccaatgcagtcgacactgccctgtttactcccgatcctcaacagcgtccgagcaatgatataatcaacattgtagtggcctcccgtcttgtctaccgcaaaggcattgatttgctagctggcatcattccacggttcaaaaacactcccaacataaactttatcattgtgggcgatggacctaagcgtgatctgctggaggagattcgcgaaaagaccaatatgcaggaaagggttcaaatggtgggcgccgtggagcataacagggttcgcgatttcctggtgcgtggccacatctttttgaatacctcactgactgaggcctactgcatggccatcgttgaggcggcttcctgtggactgcaggtggtgtccaccagtgtgggcggaattcccgaagtgctacccaagagtcttatactgctggcagagcccgaaattgatgccatttacgcagcgattctaattgccatcgaccgtcatcgaaagagttcctttaaggttagtccatcagttggcaatgggcatttggcctcggacgctaatggaaaggttaagcggcgacgtcgcaggaaagtcgatactcctatctctcctacacaactgccagcagtctctgctcctcctgcggatcagaacagctctacagagcccgtaatgtgtccatatagatgtaatgagttggtggaaacgctttacaattgggaggatgttgcccttcgcacagtaaaggtgtacgatcgcgttttaaatgaacgctctttcaccactagcgagctggtgtttgcggtgtggcagcacggatcctggtttctggtgttcttcgttgtggcccacttcttaatgcgcttgctggagctttggcgtcctcggaaacacgtagagatagcgcaggatgtacaacgtagggccagctag

SEQ ID NO: 13794 - protein, 479 aa, DROSOPHILA
MRICMVSDFFYPSIGGVEEHVYNLSQMLLSLGHKIVVLTHAYGDCSGIRYVTGYLKVYYLPIKVCYNQCILPTAVCNVPMLRAVLLRERVEVVHGHSAFSALAHEALMVGSLLGLKTVFTDHSLFGFADLSAALTNNLLEVNLGMVNHAICVSHIGKENTVLRARVAKHRVSVIPNAVDTALFTPDPQQRPSNDIINIVVASRLVYRKGIDLLAGIIPRFKNTPNINFIIVGDGPKRDLLEEIREKTNMQERVQMVGAVEHNRVRDFLVRGHIFLNTSLTEAYCMAIVEAASCGLQVVSTSVGGIPEVLPKSLILLAEPEIDAIYAAILIAIDRHRKSSFKVSPSVGNGHLASDANGKVKRRRRRKVDTPISPTQLPAVSAPPADQNSSTEPVMCPYRCNELVETLYNWEDVALRTVKVYDRVLNERSFTTSELVFAVWQHGSWFLVFFVVAHFLMRLLELWRPRKHVEIAQDVQRRAS

SEQ ID NO: 13795 - DNA, 3129 bp, DROSOPHILA
gcgagtgcggttggcggggcaacttggcggggagctccataattcatccaactttcacagcaaagacgacctggcactaagccgaaactcaagctgctgaaagccgcgaaggacacacattggcgaagacacgcaaacaaaaagttaattgaattcgcacttaaattattataatttcacatttgaacgtttcttcagaattataaatatcttttatcatatattaatgcagtcaagagccccaaacgaatttaaagaataaaccagactaaatcagacccaattttcgcatgcatgtgtattatggcctcatggaaatgaatgtatgaattattgagtccaggcaaatcccttccaattatctcattcaattgcaaagattttggccagcgttaggtattacgagtagaatcataggttgtttttttgtactattttgtggtcctgggtgaaatctggttgcgagcaaatttcattgcatacttttgtgggcttaagtatttaggcaccaaaaaccccacagagttggacagttgctggaccgcatgctcagcgaggagatttttggcattaaacaacttttggccgctgtcaacggcagacagtgcgagtccgaatacgaattcccagtccgccagtccgccagttcgaggttgaaggtgggaggttcctcttaatgaagcaagcaaatccactggtcagtcccctgggctcccatgggggagctgtgctgtgggctgggcggtacctttatggtttcttttttttcttctggctagtgggttgtgggtgggtgaggcttagcaattagattgctgcatatttaatgcatgaatggcaccgcaatttcgggcatttgaccaaagggccacgagcatattgaggcgtttatgaggtggaaatacgaagtgggagtgacttaaattacgagcaatccccacgctgtcctctcaaacgttatgtgcatgcaaagagtttcaagcacataagcggctttccttcacgtggccaaaacacccatcccaccccacccttttggccctttgaagtatgcatacgcacagctgggctcaaaagaatatagacatacacatagatatagaaggcttaacctatactttagatatgatacaataataaatcgctttatagtaaatcaactttatatacttctgcatttttgataatataaccttgtgaataaaagcaaacaagactgatactaattgcttgcccccagctgtgcggatgtatacgtaaggatgtggattttcgtatggtacttacacgctcctcctcgggggcgccggcggcagtcactttggccatgcaggcagcagatccgccggcacagcctaattggtatttgggcactaatggacggcacacattcaaaaagaactgcaaagaaataagagagtgaaacggaattggaacggaggagtcggtccgggtttgagttgagtggcaaagacaaaagccagcaaattacgatctgaattggcatggtgtttggtcatttttgcctgtgggaaatcaggttctacaacgactcaccttggtcgtcttgggcaccaggtgctccatgctggccggcagctccactcttgcctcgtagttgtcggtggcgctaatcaatggcgttaggtcgatcagctcgtcgccgctgctgcccagtccatcgtttgtgtggtccacataggtggttgccttgcatctaatcggctcccggcaggcaagcggcgtctgatattggatcaacagctgacaattggagtcctcaattattttcaaagaatcgctaccgccagcagtgctggctccattgtccttcgtcgcattgttcgcacagacaaactcgatttttgtcgaccagcgccgcatgcccgttgctgtggagcactcggcaccatcctcgtacagcaaatacagcgaaccggtctgattgaaacgcagctgcgagttggagttgcccaggctgatggtcgtggaattctgctcgtaacaagcgcctgcaagtgaacgggaagcgcacggatcaattgagagctccacggctgggcgccaagtgccaaaaagtcagaaagaaaaaacaaagaccatctcaaaggcaaacaaaacacgagcatggccggcaaatcctggccgaaaaaaacccaagccattcactgaaccaaattaggggtattgtctgtaagtcagtttatgttttaaaaattattttagaaatatttcagttcacaattaagtttagttcctaaagaattcgcgtttgtagaattttcactataattcactataactcacttttatttttgacagtgcacctctgagcacaggacttcgacgtcctgcaaaatgaagcgttacccgcttagtgcaggaatcgggataacaaggagcggcagtagaagcgactggacatcaaagccaaaattaattgttctcgttgtttgtcaacttgcaaggagcgattttttttttccagtaccctaactgcgagaatgtccaagcaatcggaaggctttcagtgccgcctactgccaggactatccagtgtccagactggcattcagacacaatggactcgggaacgcaacgcatcaatagaacacaatgcataaatgccagtacatttgcttcggttcatgtacttcttttacggaatttaagatttaattggccaaaaataacattaagttgtttgccctgacaaccaaaattttatggaaataaacagaatcacctccatgcccttccgccctgccctgcagttatagtctctggatctgcccttttcaatcttccatttcacttgcaacccaacaattttgagcaatgtcactcacatttgccggattttgattgagcgccctagagcagacagcattgtgattgtgatttgactagagtatggtaatttcagatccccgcctttcactccgcactctgttctcaatcctcggctccaaccacactgctttcacatttttatactttattacagacatcggacaaatatccacacacacacacacacacatgcaggatcaagagccatgaccaacaacgagaaaataacaaaaaacgatgagaaaaagaccaattgaggtggcttttggcaaatcg

SEQ ID NO: 13796 - DNA, 651 bp, DROSOPHILA
atgctcgtgttttgcgcttgttacgagcagaattccacgaccatcagcctgggcaactccaactcgcagctgcgtttcaatcagaccggttcgctgtatttgctgtacgaggatggtgccgagtgctccacagcaacgggcatgcggcgctggtcgacaaaaatcgagtttgtctgtgcgaacaatgcgacgaaggacaatggagccagcactgctggcggtagcgattctttgaaaataattgaggactccaattgtcagctgttgatccaatatcagacgccgcttgcctgccgggagccgattagatgcaaggcaaccacctatgtggaccacacaaacgatggactgggcagcagcggcgacgagctgatcgacctaacgccattgattagcgccaccgacaactacgaggcaagagtggagctgccggccagcatggagcacctggtgcccaagacgaccaagttctttttgaatgtgtgccgtccattagtgcccaaataccaattaggctgtgccggcggatctgctgcctgcatggccaaagtgactgccgccggcgcccccgaggaggagcgtcccagctgtgcgtatgcatacttcaaagggccaaaagggtggggtgggatgggtgttttggccacgtga

SEQ ID NO: 13797 - protein, 216 aa, DROSOPHILA
MLVFCACYEQNSTTISLGNSNSQLRFNQTGSLYLLYEDGAECSTATGMRRWSTKIEFVCANNATKDNGASTAGGSDSLKIIEDSNCQLLIQYQTPLACREPIRCKATTYVDHTNDGLGSSGDELIDLTPLISATDNYEARVELPASMEHLVPKTTKFFLNVCRPLVPKYQLGCAGGSAACMAKVTAAGAPEEERPSCAYAYFKGPKGWGGMGVLAT

SEQ ID NO: 13798 - DNA, 4354 bp, DROSOPHILA
agctagctccgttgggctccatgctgcagtacatactggatcatggtcatgagatcacggccaatgcggagctgaaagtttgggcgtcacagattgcgtgtggtaagtcaaattcaagacaatttgattcaattcaattaattaattaatgtttgtaccaggcatgcattatctggaatcacagcattttgtacaccgcgatctggccgccagaaatatattgctgaccgcacgccaccaggcgaagatcagtgacttcggcatgtcgcgatcactgagacccggtagcacggaataccaattcacccagggcggacgttggcccatccgctggtacgcaccggaaagcttcaacctgggcatcttctcgcacgccagtgatgtgtggtcctttggcgtgaccatctgggagatgttttccctcggcgcaccgccatatggggaaatatctaatgtcgatgccatcaagttggtggacagtggcgaacgcctgccgcagcccaatctctgtccagcttacatctatgccgtgatgcagagctgctggaaggaacgacccaaagatcggccaacctttgtctatctcaccgagtttttcgcccgcgatcctgattaccaaaacctgccggaattggtgcaaacggttcacatttaagccagtttccattttccattttttccgttctgagtgcaattttctgtagctatttatgcaatgtcttctatttcgttttcaacgtattaacgatctggaacccacagatcactattgttgttccgtatcctagtattcatgtttatagcttgtaatatattttttaatcatatgtacaaccaatttgtgtcaaaagaaagcgaacaagtgccttaaagatttagcatataagctttgtattcatttttacaaatccattttgtttcattggttatacaaaataaaaactatttttatacatactgcgctttttgatttagtattaaataatacagcagtatgctttaataatcaatgtttaaacatttaatgcagttcttttatataaaacgtggtaacaaaagtaaatagtttgttggtaaaccgcttaaatactaggttagtaatatggtttcttggaaagattataactacgttagcgtggttagtgctctagaaatggattatatatttttttgttaattttttcgagctagcacaacagtaatcaagctgatccgtttattgcctgcttcacattcgatgcgctgacgagcttaagggcgccaagtattccgttcaggttctcctcgttgtagggcttgccctggagcggagtcaccaccgggacgagctgatcgctctgcggcagctggatgccgatctccttcattaatccctacaaatttagtaaaatcataagtgataattctctaaaacagggcaaaacaaatcttaccgcttccacttccacgcttagtttcagtttcatgtcctgctcatcgcccttcacctccagttccttctgcacggtgaacttgggagtcttgccgatgacccagtcccaagagctgtagttggagcgcaattcctcaatgccggggaaccatttctctgtgggattgaccagctgaaagccgcgctgctgcatcgtctgtgtgctgccgccgtcttcaagcgtagttgcagccgttctcaaatactcgtaacccacggcggaacgcagctgagcaacgttcaccgtgcgattgacatcaaccaggttgcgaatgggcgacggcaccgaagccgtggccttgctaatataattggccggctcccgcaccagagattcgcccaagtgcaatttgttggcgctggccaaaatggtgcagtgatggtacgagttcgggtgtcccagcttggccgcagtgccggaaatctgtaattgaacaagggcatactcgttgagtgggcaaataaagaccagatgcacagccccagctgttggttaagtgagctgatgccaatgtgagggatcagccggggtcgcatcattccttgataagagccaccgctcctcctcaccttcttattcatcactacaatgtcgtcgcgctcatttatctctgccttgatggcccattcgcggaacaaggccctggtcacgatgttcaggttgtacttgcgatcgtagcgctctctgggcgagaaaaaggtgcagttgaggttcccaagatcatggtacaccgctccaccgccactattgcggcgtgcaagtgttatgccgcgttccaccagctgcgaaacattagcctcggtgaagggattctggtggcgaccaatgactacgcacgggtcgttggcccacagcagcagcacatggtggcggctgaaatcaaagtttttgtacagccaatcctctagagcgaggttggtgaacacatcgctggactgcgagatgaacacggacttcttgatctccgaatcgggaaccacgggcggtggctggcgcctctgctttttaatctcctgctgtccagcagatggtggctccactccgctggatgccaggcgcgtggcctgagcggcggaggagagaagtagccgcagctggctggaattgcgtcgcaacagcatgctcatggcttacacaaggaagtggggcgtacgggtgtgtgtgatttctgttgccaggtgatctgggacacaatgcacttgcaagcgaaacaaggtcaatggtgtcgaaaaaagcttttggctggttgattggttggttggttggttggtttctacggttgtcgtctgcctggttctgtgtggtccgtgtgtgctcttctttaggttatgtatggtctactatctacgctattcgttttggtctttaaatggctttggtcgctctggactttagactgtggcgttcttagtggctcgggatgtgtttgcagccacggagctggccgagatgaggtattcgtgcagggcgggcgtctgatgcagccacttccacgtttgatgcagaccacagacacgcttacggagacccaggcagtccttgttggcacagttcactggcatactacgcctcacacccatccaggtgggggatacaacgaatccggtgtttacggggggccgcaacgttacggggcccaaataagatggctaaagggtttcctttttagctgacaccaaaattttccactctttgttcgcggcgcacgggaactgcggggggcgggggcaaggcggatgatcgcagtgggcgggggtagcagttatagcacaaacaaacgaacgaacacagagccgatcgaaaagcagctgcgcgtgtggaaatatcacgaccgattggctttcgtttcagatgagcagtggtgctcgctgctcttgttcttcctcgacggtccccaaatgccattcgcagcgaacgacgaaagctccggtcattaaaaaaaaaaaaaaacaacggcactctggcgccgcacttaatttattttcatctttttaattcgaacttgtataatttacgctaaacatgtgtgataatccgagacgtctacaacagatgtgacattaatatgtgttatattttataagcagcatactttgagagccccttcagtttggaatacccccattattaatgtaagccgcctcttcgggatcaattggcttgcgggcaaatcgtgccggcagctcgtagtcctcaattgctggtccaccggccaactaaatgtagaagggacaattacgaagattagttatgatgcacagaagaagccgtggtattgtgtataaatgaaatgggctgggttaacctttttgcctcctgcggcctgggaacttgccttctggtttgctgtctgggcgcccggcactcctgcaccacccttgcggaagtgtatgagcggtacgcgcttagccagcgcaactagtgttggtcgaaccatagcaacagcaattgaatttctaccaaaaagccaaggcaaaagtaaaagttacgtgaataacagctgactgtaaactcatacaagcgctgccagatcgttaaaattgcatgccattcgccgcgcaatggattattatcgttattgaaatttacgtgatcctgtgaatggctaaggcagataagaggaagcgcaaaaaactattttggtccaaatcggtaatatttttatatttaaaatgaattggggacagaagataaccggcagccgacggccctaacttctggacggacatcgccagtatatggattgctcctaaaactagcaaaccaacgtacttatgctctatgcaacaataaatgtcatatgaaaacaaactattgaagacgtttttatgagtataaccggtaactatttcatttgtttattatattaatgacaaataaac

SEQ ID NO: 13799 - DNA, 2148 bp, DROSOPHILA
aagaacaagagcagcgagcaccactgctcatctgaaacgaaagccaatcggtcgtgatatttccacacgcgcagctgcttttcgatcggctctgtgttcgttcgtttgtttgtgctataactgctacccccgcccactgcgatcatccgccttgcccccgccccccgcagttcccgtgcgccgcgaacaaagagtggaaaattttggtgtcagctaaaaaggaaaccctttagccatcttatttgggccccgtaacgttgcggccccccgtaaacaccggattcgttgtatcccccacctggatgggtgtgaggcgtagtatgccagtgaactgtgccaacaaggactgcctgggtctccgtaagcgtgtctgtggtctgcatcaaacgtggaagtggctgcatcagacgcccgccctgcacgaatacctcatctcggccagctccgtggctgcaaacacatcccgagccactaagaacgccacagtctaaagtccagagcgaccaaagccatttaaagaccaaaacgaatagcgtagatagtagaccatacataacctaaagaagagcacacacggaccacacagaaccaggcagacgacaaccgtagaaaccaaccaaccaaccaaccaatcaaccagccaaaagcttttttcgacaccattgaccttgtttcgcttgcaagtgcattgtgtcccagatcacctggcaacagaaatcacacacacccgtacgccccacttccttgtgtaagccatgagcatgctgttgcgacgcaattccagccagctgcggctacttctctcctccgccgctcaggccacgcgcctggcatccagcggagtggagccaccatctgctggacagcaggagattaaaaagcagaggcgccagccaccgcccgtggttcccgattcggagatcaagaagtccgtgttcatctcgcagtccagcgatgtgttcaccaacctcgctctagaggattggctgtacaaaaactttgatttcagccgccaccatgtgctgctgctgtgggccaacgacccgtgcgtagtcattggtcgccaccagaatcccttcaccgaggctaatgtttcgcagctggtggaacgcggcataacacttgcacgccgcaatagtggcggtggagcggtgtaccatgatcttgggaacctcaactgcacctttttctcgcccagagagcgctacgatcgcaagtacaacctgaacatcgtgaccagggccttgttccgcgaatgggccatcaaggcagagataaatgagcgcgacgacattgtagtgatgaataagaagatttccggcactgcggccaagctgggacacccgaactcgtaccatcactgcaccattttggccagcgccaacaaattgcacttgggcgaatctctggtgcgggagccggccaattatattagcaaggccacggcttcggtgccgtcgcccattcgcaacctggttgatgtcaatcgcacggtgaacgttgctcagctgcgttccgccgtgggttacgagtatttgagaacggctgcaactacgcttgaagacggcggcagcacacagacgatgcagcagcgcggctttcagctggtcaatcccacagagaaatggttccccggcattgaggaattgcgctccaactacagctcttgggactgggtcatcggcaagactcccaagttcaccgtgcagaaggaactggaggtgaagggcgatgagcaggacatgaaactgaaactaagcgtggaagtggaagcgggattaatgaaggagatcggcatccagctgccgcagagcgatcagctcgtcccggtggtgactccgctccagggcaagccctacaacgaggagaacctgaacggaatacttggcgcccttaagctcgtcagcgcatcgaatgtgaagcaggcaataaacggatcagcttgattactgttgtgctagctcgaaaaaattaacaaaaaaatatataatccatttctagagcactaaccacgctaacgtagttataatctttccaagaaaccatattactaacctagtatttaagcggtttaccaacaaactatttacttttgttaccacgttttatataaaagaactgcattaaatgtttaaacattgattatta

SEQ ID NO: 13800 - protein, 394 aa, DROSOPHILA
MLLRRNSSQLRLLLSSAAQATRLASSGVEPPSAGQQEIKKQRRQPPPVVPDSEIKKSVFISQSSDVFTNLALEDWLYKNFDFSRHHVLLLWANDPCVVIGRHQNPFTEANVSQLVERGITLARRNSGGGAVYHDLGNLNCTFFSPRERYDRKYNLNIVTRALFREWAIKAEINERDDIVVMNKKISGTAAKLGHPNSYHHCTILASANKLHLGESLVREPANYISKATASVPSPIRNLVDVNRTVNVAQLRSAVGYEYLRTAATTLEDGGSTQTMQQRGFQLVNPTEKWFPGIEELRSNYSSWDWVIGKTPKFTVQKELEVKGDEQDMKLKLSVEVEAGLMKEIGIQLPQSDQLVPVVTPLQGKPYNEENLNGILGALKLVSASNVKQAINGSA

SEQ ID NO: 13801 - DNA, 7498 bp, DROSOPHILA
tacccccatcccacttactgcggatggacggagatggatgaggaaagcttgctcgaaaacggttcctgttccgcttttggttgtaatagatctctgacctgaaaactgtattgtgttcaacggatgctcaaaaaaaaaaaaaataaataaacgaaacaacatagctatatgccgaccgacaagcatgaattgtacaatttgttgtttaagttcggatattgtatgtatgttcaacgaagacttgactctgttatcaaatgctcaaagcgtgtactgaccacaacgcaatcgtgttccccaatttcgggggcgtaatttagcaaactgaaaatacaagtattacagaaattactcaatagtattaacgaatgaaatcaaacgtttttcaatatatgtacttattagtgagagtcatttatcaaaatttagtttcaaccgtaaaaccaaaacaaacaaatatgtacatcacggctaagtacgaatttttattcaataagctatatttactaataaacaaagtctcaagaaaccaaatattaaactaaaaagtacttggtaatagtagtttaaaattacaaaaggataaaaatacattaaaattaaattagtgtgctatagttaaaacaaatttaccaaatcgaaaaagaaaacgtttcaaaaattattcaacacaatcgatgtcgaagtcgaatcgctgctgacggacattgtgtttcaaaaacgatattgagatttgtatgaataattgcttaaacaacagaatattacgagtatcaatgtgttattgaaaaaacatcgtattgtaactatttaaatttaattgaactaaaagtggaaaaataaattggtctataatgaaaaataaacaagaagttgactttgctttttttctccatttatttagcgttttatatagcctacttatctgcgttcttcccaaaatttgcagaatttataaacgactccactccaaaagtcccaaaataacaagtcagttcttgcggttttaattgtaaaaaatgcaatacaatttgtttttttttttcgtttagtttttgttttgtatttaaatcataaaaacaattttacgatgtatcagatttgcctttagttattataatatataaaggtataccctattagttgcttttttaatgcctgattctgctatagatgcacaatactcgcaagcgaatcgtgtgttttcatattatatacatactcgacaacaaaattcaataaaataaattaagttaggtatgtatttcatgttggtactaattagtttcggtttgatcaacggacacgggaagaatggagctgtgggacaagaaggagcagtgtgaagaggcctaataaagatgatgctgccacttttgccgctgatgttgttcttaaaagtagaaccattcggatcctaactaaattctacttctttgccacctggctgtccagaacgggtgtgattgtcttgcctccgaagatctgaccccagccaatcaaactgaggagaaaaaatacatcattaagttgtgatttcaaatacaatttaaggggggctgtatactcaccgccaatggttctccacacgtctgctgagtgcaatcttctcgcccttctccgtgcacacaggcgtcgtaagaacgatcttggccaaatcacctttggtggccgagatgcggccaccagtgctgagggatccgatattaaccaacaggatttcgttcttctgcagcttctcaacgcgcgctcccttcttgtcaccatcggtacggacgccgagaaggcgacgcagcaggtaatacgagatttccagctcctggtagatgtccggcagctggccaacggcgcctagcacctgaccgaccaaacgatcggcacggcacagcgtaggatcgatcttggtgcccacaccaatcagaccgccgggcacggcgtactgcagctcattctgttcggcgaagagcgagacgatacgggagaagattggacggcaggtgatgttgccatcgctatccttggtcacaacgcccggacgcacctcgatctcttggcctaccttcagcacgccgctcagaatggagccaccggccacaccgcccttaaggtctgccacctcacagcctggcttgttcacgtcgaaggatcggatgacgatcagacggggcggggcattgaagtcacgcggcggcactggtatcttgttcacaatgtactcgcagagcacatcgatgttgtacttaagctgggccgagatcggaatgatcggagcgccctcagctacggtgccctggacgaatttggtgatctcctcgtactgctctttcgcctggctctccttgatcagatcgatcttgttttgcaagatcagaatctgtttcagcttcataatctcaatggcggccaaatgctcagaggtttgcggttgtggacaggattcattgcctgcacatggaataggtagtaatttgtatatcttttgtcggttcagagagatccagggttactcaccagcaatgagcagcagagcagcgtccatcacagcagcaccgttcaacatggtagccataagaatgtcgtgaccggggcaatccacgaagctcacatgtcgcaccagtctgaagttgccggagcagttgagccgagtgcagggcaagctgtcgtccttgctggatgcatccgatacgaagctggccgggcgcgggcacttggggttgtcacacttgtagattttggcgttggcataacctaaaagcaatgcgataataattatgaagaatattacaatacattcttcgaactcctggcctggcaaacacgtaaaataatccttcgttcttcacaaggaattaagtgctattgctaactaaattcatttctttgatccttccagatcatttatacagccacaaacaaacatcacttaataatcgtaaaatatttattgtaaaataataatttgcacttaatgcggtaataatttcagcacattacaaggttgtttgtcaaaacactaagttattactaaattaaaatttaagtttatgaaatgtatacaagtacaaactatatagaattactcgttttatcctctagtaatatagatcctcaaacataatatagatccaatatatcgatattagcatttattaacaaataaataattaaaacgtcggaatataaaatccaactagtaatatatatatatgttaacaaaaaaaaaaaaggttcaatgcaatgatgtctcaggtgggtaacggcgtgccatttaaatatagtacttcaagtccattcaaaagaggacctttctgcaattatcagctccgcagcggcactcgacacgcacagctgtcgagaggttctcgtagggcacatcttcgttgtccgcgcgaatgtagtcgaagctcaactcctcgcccgccttgattggacgcagtgtgaagaacacgaggtgcggcagcgcgacattcaggtgctcgatccaacaggggaacacggcgagattaggatcgcaagagtgattgataaagtgcgagatgttgccatagttagctgcatcgatagtgtactcgctatcctgagctgtgttgtaatccaagtcgaacagatatgtcctcccattgtcgtcatacgccttgccgcgctcatttgcctcatcgctggtgatgatctctccaatgtactcgcacacaaattcacccttacgcaaggcagttgcggctcgcaccccccatccgctgccgttggcggtcttaaacagcaccaacggtacctggcgtccgtgctgcaccagacggttggagcagcttgaatcgcacgagcagcggctattgcactcatagatggcacttccgggacgaaggcgcaagcgccgtgtgcttcgctcgtaggcgaacagctcgccggcgaagcgggcacaacacttcgtagaggcagtacactcctctgtgtcttcagtgcacttacagcccacaatccccgcttccggcttgggcacatccttgccgattatgttatcatgtatgtacatgaaattgctgtctatggtgtccagatcaatgttgttctcaacacgtattggcggtgacggtttctccacatgattcatgcgcttctcgaacaatgctagatcagccaactgcttgcgtcgtacaaattgggcccgcttgatttgcatgcttttcagggctcgttctccaattttctgcggttccctttggcttcgactgccagcagcgcgatattgggcgagcagtataagatcgatctgcagattgagtggctcataggcgtctacttcggccaccgtaatgttctccattagtggcaatgcctccagctgcttctcaagctcagtggttatcttggctatgtatatctcgtagagctgctgatgccgctccacaaacttctccatttcggcgcagtcggccacgttggcaagactttcccaggtgttctcgctatcatggtatcccagccatttgacgaagaagactggctgatattgatccatctcgacgcattcaatacgctccacaacgtactctcctttgggcggccttttggcaattactcccatgttatttttcgaccgcttggagttgggagttggggcgcccacacaactgctgcgtcgacgcttcagtttggcgaatccgttgagactgggtattttgtccacatcatgttcctcgcagccaaaaacgctgccatagccgctactattgcttggactcagtgaggtctgactggtgcttcgccgggtggtgcgtctatctacactggaggtggatgctggcatggaagacgaagctggcttggtgcagaggcggcggaatcggctatgtcgccgcaattcggccaggtggcgcagcattgaacgctgtttgatttcatactgctgtcgctgctgcttggaggtcaaaagatttttgatttttttttcgctcaagcgttctgcaaatgacaagttttggacaattgtggattggatgatgggtttggtgtgtttttttttttatttggcggacgcgtcgcaaccgaaaaaatcgtaaaaacaagagaaatagggaaaaagaagaaaaagattggcaattaattaaattgctggatcagtcgtatcaatcaatgtaacagattcaagactaagctaacaggaagatatgcttaataccaatctttgggaacgctttttaattcagctttgtaaagtacaacattctaaagacaacttcttttatcattttagactacttaggcgacgacacaaggcaacgcgtgctaatccagcaatttaagttaacaaaatacacaagaattcgaattacaagagacaatcattcgcagaacccttttacaacattatctcgatgtaaagcagcgacagagttggctacgcggtgtgccgtcgcgatacggtgttaaaaagtggttcttaagataattatgggttattttcggccagccgagaaggtttacaatcttagggcactacggggtttacgggcgagcaggaagaattaacatacggctaaattattatcaagtagaataatacatcttaagattatatgcttaggctagcttacacggatccctgactcacccagcttgattgtgatgttgcgctccagttcgttcttgaagcgcacagtctgcacgccggatatggctttgaccaccgtggatttgccgtgagccacatgaccgatggtgccgatgttgatggtcgcctgtcgggagatgacctccggtgatagaggcgttagtttagagacgtcctgcaagattccaaatgcaatacgataaataaaggcgctttaatagaggaaaatcagagcacaagtcttgtttaccgccgccacaccccctaacaaaacatcccctctcagatgcatgtgtgtatataggaaagccgtcaattttgaggttagaatgtcgcttgaattgcatcaactcaaaattgatgacaacagtcaggtagtcctcgcgaaactgatctgcttgccagagcccaaataccgccagagtccgcatcatgcccatatgcagagccaaagttgcgggataaaccaaacagaccctaaatgtagcgccacgtgctgcattttcaccgtgatctctcacccacaacaaatcactgctggccctggcgaaacccactggtatatccctcgaaattggtccgcgaaccgttcgagacaatctgggcgcgtccttgcgacccgcaccccgctgtttttccgggaagcggctccataatgacgacgcgtatactttcacacacgggcggaaaaaaagggaaggcggcgtctggcggtcgtctttgctggctgcttaccaagttgctgaggtcctgcttctgcaagttcctgttcacaccgatctgggcttcagccgtggccatgttgctgatgttttcaaaaacgatgcgtatgcaaaatgaaaataataattttcagctattacagctcggcatcaaatctcgatatcgaagaacgattggacccgacaatgcctatcgatagtgctctaatcatggttggccagtgttggacacgtcacaccggtgcccaactgcgatgcgtatcgatagagtgccgccctatcgatacacttacagttcttcagccgcaaacgaaaggttaaaaatccgcttcgcttctcttctgctcaactgtaccgccgctttttgttcaaatatctcgggaattacgagcgtacacacaacggaagagcgtgcagaatgtcgagcgtgccaaagcgagccaagctggacggcgcccccgccgatggcaacacatccgccgccgccggtaacaacgaggaggagtcggaggcgttggagcaaattgatgcctgccagaacgagatcgatgcgctgaacgagaaggccagcgaggagatcctcaaggtggagcagaagtacaacaagctgcggaagccctgctacgagaagcgcagcgagctggtcaagcgcatccccaacttttgggtgacctcggtgagtacttcgatccgcggccatgtttgtcccctccgcgtgttcgtctgatgggttctagtggagccgactagatctttcgaagccctgaagtgatggtaatcgctgcacacatgtacaagaaattttctctattcgaggcattttttcttgttcatctttgggctgcaatgccgacaccaccggctccccgcgcattttccccctcccggaaaaatcgtgctatcgatatatccgtctggccgggaaatacacaacatagcacagttcaaaatggcttcaaatcaaaaaccactgaaatatttgctgccataattgaaaagaaaagtagtgccataggggccataaacatggctttctgcttgatagcatgcatcccctagctaatcccaactgccatatttgcagtttatcaaccacccgcaagtatccggcattctggacgaggaggaggaggagtgcctgcacgcgctcaacaaacttgaggttgag

SEQ ID NO: 13802 - DNA, 1945 bp, DROSOPHILA
ttcgatatcgagatttgatgccgagctgtaatagctgaaaattattattttcattttgcatacgcatcgtttttgaaaacatcagcaacatggccacggctgaagcccagatcggtgtgaacaggaacttgcagaagcaggacctcagcaacttggacgtctctaaactaacgcctctatcaccggaggtcatctcccgacaggcgaccatcaacatcggcaccatcggtcatgtggctcacggcaaatccacggtggtcaaagccatatccggcgtgcagactgtgcgcttcaagaacgaactggagcgcaacatcacaatcaagctgggttatgccaacgccaaaatctacaagtgtgacaaccccaagtgcccgcgcccggccagcttcgtatcggatgcatccagcaaggacgacagcttgccctgcactcggctcaactgctccggcaacttcagactggtgcgacatgtgagcttcgtggattgccccggtcacgacattcttatggctaccatgttgaacggtgctgctgtgatggacgctgctctgctgctcattgctggcaatgaatcctgtccacaaccgcaaacctctgagcatttggccgccattgagattatgaagctgaaacagattctgatcttgcaaaacaagatcgatctgatcaaggagagccaggcgaaagagcagtacgaggagatcaccaaattcgtccagggcaccgtagctgagggcgctccgatcattccgatctcggcccagcttaagtacaacatcgatgtgctctgcgagtacattgtgaacaagataccagtgccgccgcgtgacttcaatgccccgccccgtctgatcgtcatccgatccttcgacgtgaacaagccaggctgtgaggtggcagaccttaagggcggtgtggccggtggctccattctgagcggcgtgctgaaggtaggccaagagatcgaggtgcgtccgggcgttgtgaccaaggatagcgatggcaacatcacctgccgtccaatcttctcccgtatcgtctcgctcttcgccgaacagaatgagctgcagtacgccgtgcccggcggtctgattggtgtgggcaccaagatcgatcctacgctgtgccgtgccgatcgtttggtcggtcaggtgctaggcgccgttggccagctgccggacatctaccaggagctggaaatctcgtattacctgctgcgtcgccttctcggcgtccgtaccgatggtgacaagaagggagcgcgcgttgagaagctgcagaagaacgaaatcctgttggttaatatcggatccctcagcactggtggccgcatctcggccaccaaaggtgatttggccaagatcgttcttacgacgcctgtgtgcacggagaagggcgagaagattgcactcagcagacgtgtggagaaccattggcgtttgattggctggggtcagatcttcggaggcaagacaatcacacccgttctggacagccaggtggcaaagaagtagaatttagttaggatccgaatggttctacttttaagaacaacatcagcggcaaaagtggcagcatcatctttattaggcctcttcacactgctccttcttgtcccacagctccattcttcccgtgtccgttgatcaaaccgaaactaattagtaccaacatgaaatacatacctaacttaatttattttattgaattttgttgtcgagtatgtatataatatgaaaacacacgattcgcttgcgagtattgtgcatctatagcagaatcaggcattaaaaaagcaactaatagggtatacctttatatattataataactaaaggcaaatctgatacatcgtaaaattgtttttatgatttaaatacaaaacaaaaactaaacgaaaaaaaaaaacaaattgtattgcattttttacaattaaaaccgc

SEQ ID NO: 13803 - protein, 475 aa, DROSOPHILA [sequence omitted]

SEQ ID NO: 13804 - DNA, 7464 bp, DROSOPHILA
tggatgaggaaagcttgctcgaaaacggttcctgttccgcttttggttgtaatagatctctgacctgaaaactgtattgtgttcaacggatgctcaaaaaaaaaaaaaataaataaacgaaacaacatagctatatgccgaccgacaagcatgaattgtacaatttgttgtttaagttcggatattgtatgtatgttcaacgaagacttgactctgttatcaaatgctcaaagcgtgtactgaccacaacgcaatcgtgttccccaatttcgggggcgtaatttagcaaactgaaaatacaagtattacagaaattactcaatagtattaacgaatgaaatcaaacgtttttcaatatatgtacttattagtgagagtcatttatcaaaatttagtttcaaccgtaaaaccaaaacaaacaaatatgtacatcacggctaagtacgaatttttattcaataagctatatttactaataaacaaagtctcaagaaaccaaatattaaactaaaaagtacttggtaatagtagtttaaaattacaaaaggataaaaatacattaaaattaaattagtgtgctatagttaaaacaaatttaccaaatcgaaaaagaaaacgtttcaaaaattattcaacacaatcgatgtcgaagtcgaatcgctgctgacggacattgtgtttcaaaaacgatattgagatttgtatgaataattgcttaaacaacagaatattacgagtatcaatgtgttattgaaaaaacatcgtattgtaactatttaaatttaattgaactaaaagtggaaaaataaattggtctataatgaaaaataaacaagaagttgactttgctttttttctccatttatttagcgttttatatagcctacttatctgcgttcttcccaaaatttgcagaatttataaacgactccactccaaaagtcccaaaataacaagtcagttcttgcggttttaattgtaaaaaatgcaatacaatttgtttttttttttcgtttagtttttgttttgtatttaaatcataaaaacaattttacgatgtatcagatttgcctttagttattataatatataaaggtataccctattagttgcttttttaatgcctgattctgctatagatgcacaatactcgcaagcgaatcgtgtgttttcatattatatacatactcgacaacaaaattcaataaaataaattaagttaggtatgtatttcatgttggtactaattagtttcggtttgatcaacggacacgggaagaatggagctgtgggacaagaaggagcagtgtgaagaggcctaataaagatgatgctgccacttttgccgctgatgttgttcttaaaagtagaaccattcggatcctaactaaattctacttctttgccacctggctgtccagaacgggtgtgattgtcttgcctccgaagatctgaccccagccaatcaaactgaggagaaaaaatacatcattaagttgtgatttcaaatacaatttaaggggggctgtatactcaccgccaatggttctccacacgtctgctgagtgcaatcttctcgcccttctccgtgcacacaggcgtcgtaagaacgatcttggccaaatcacctttggtggccgagatgcggccaccagtgctgagggatccgatattaaccaacaggatttcgttcttctgcagcttctcaacgcgcgctcccttcttgtcaccatcggtacggacgccgagaaggcgacgcagcaggtaatacgagatttccagctcctggtagatgtccggcagctggccaacggcgcctagcacctgaccgaccaaacgatcggcacggcacagcgtaggatcgatcttggtgcccacaccaatcagaccgccgggcacggcgtactgcagctcattctgttcggcgaagagcgagacgatacgggagaagattggacggcaggtgatgttgccatcgctatccttggtcacaacgcccggacgcacctcgatctcttggcctaccttcagcacgccgctcagaatggagccaccggccacaccgcccttaaggtctgccacctcacagcctggcttgttcacgtcgaaggatcggatgacgatcagacggggcggggcattgaagtcacgcggcggcactggtatcttgttcacaatgtactcgcagagcacatcgatgttgtacttaagctgggccgagatcggaatgatcggagcgccctcagctacggtgccctggacgaatttggtgatctcctcgtactgctctttcgcctggctctccttgatcagatcgatcttgttttgcaagatcagaatctgtttcagcttcataatctcaatggcggccaaatgctcagaggtttgcggttgtggacaggattcattgcctgcacatggaataggtagtaatttgtatatcttttgtcggttcagagagatccagggttactcaccagcaatgagcagcagagcagcgtccatcacagcagcaccgttcaacatggtagccataagaatgtcgtgaccggggcaatccacgaagctcacatgtcgcaccagtctgaagttgccggagcagttgagccgagtgcagggcaagctgtcgtccttgctggatgcatccgatacgaagctggccgggcgcgggcacttggggttgtcacacttgtagattttggcgttggcataacctaaaagcaatgcgataataattatgaagaatattacaatacattcttcgaactcctggcctggcaaacacgtaaaataatccttcgttcttcacaaggaattaagtgctattgctaactaaattcatttctttgatccttccagatcatttatacagccacaaacaaacatcacttaataatcgtaaaatatttattgtaaaataataatttgcacttaatgcggtaataatttcagcacattacaaggttgtttgtcaaaacactaagttattactaaattaaaatttaagtttatgaaatgtatacaagtacaaactatatagaattactcgttttatcctctagtaatatagatcctcaaacataatatagatccaatatatcgatattagcatttattaacaaataaataattaaaacgtcggaatataaaatccaactagtaatatatatatatgttaacaaaaaaaaaaaaggttcaatgcaatgatgtctcaggtgggtaacggcgtgccatttaaatatagtacttcaagtccattcaaaagaggacctttctgcaattatcagctccgcagcggcactcgacacgcacagctgtcgagaggttctcgtagggcacatcttcgttgtccgcgcgaatgtagtcgaagctcaactcctcgcccgccttgattggacgcagtgtgaagaacacgaggtgcggcagcgcgacattcaggtgctcgatccaacaggggaacacggcgagattaggatcgcaagagtgattgataaagtgcgagatgttgccatagttagctgcatcgatagtgtactcgctatcctgagctgtgttgtaatccaagtcgaacagatatgtcctcccattgtcgtcatacgccttgccgcgctcatttgcctcatcgctggtgatgatctctccaatgtactcgcacacaaattcacccttacgcaaggcagttgcggctcgcaccccccatccgctgccgttggcggtcttaaacagcaccaacggtacctggcgtccgtgctgcaccagacggttggagcagcttgaatcgcacgagcagcggctattgcactcatagatggcacttccgggacgaaggcgcaagcgccgtgtgcttcgctcgtaggcgaacagctcgccggcgaagcgggcacaacacttcgtagaggcagtacactcctctgtgtcttcagtgcacttacagcccacaatccccgcttccggcttgggcacatccttgccgattatgttatcatgtatgtacatgaaattgctgtctatggtgtccagatcaatgttgttctcaacacgtattggcggtgacggtttctccacatgattcatgcgcttctcgaacaatgctagatcagccaactgcttgcgtcgtacaaattgggcccgcttgatttgcatgcttttcagggctcgttctccaattttctgcggttccctttggcttcgactgccagcagcgcgatattgggcgagcagtataagatcgatctgcagattgagtggctcataggcgtctacttcggccaccgtaatgttctccattagtggcaatgcctccagctgcttctcaagctcagtggttatcttggctatgtatatctcgtagagctgctgatgccgctccacaaacttctccatttcggcgcagtcggccacgttggcaagactttcccaggtgttctcgctatcatggtatcccagccatttgacgaagaagactggctgatattgatccatctcgacgcattcaatacgctccacaacgtactctcctttgggcggccttttggcaattactcccatgttatttttcgaccgcttggagttgggagttggggcgcccacacaactgctgcgtcgacgcttcagtttggcgaatccgttgagactgggtattttgtccacatcatgttcctcgcagccaaaaacgctgccatagccgctactattgcttggactcagtgaggtctgactggtgcttcgccgggtggtgcgtctatctacactggaggtggatgctggcatggaagacgaagctggcttggtgcagaggcggcggaatcggctatgtcgccgcaattcggccaggtggcgcagcattgaacgctgtttgatttcatactgctgtcgctgctgcttggaggtcaaaagatttttgatttttttttcgctcaagcgttctgcaaatgacaagttttggacaattgtggattggatgatgggtttggtgtgtttttttttttatttggcggacgcgtcgcaaccgaaaaaatcgtaaaaacaagagaaatagggaaaaagaagaaaaagattggcaattaattaaattgctggatcagtcgtatcaatcaatgtaacagattcaagactaagctaacaggaagatatgcttaataccaatctttgggaacgctttttaattcagctttgtaaagtacaacattctaaagacaacttcttttatcattttagactacttaggcgacgacacaaggcaacgcgtgctaatccagcaatttaagttaacaaaatacacaagaattcgaattacaagagacaatcattcgcagaacccttttacaacattatctcgatgtaaagcagcgacagagttggctacgcggtgtgccgtcgcgatacggtgttaaaaagtggttcttaagataattatgggttattttcggccagccgagaaggtttacaatcttagggcactacggggtttacgggcgagcaggaagaattaacatacggctaaattattatcaagtagaataatacatcttaagattatatgcttaggctagcttacacggatccctgactcacccagcttgattgtgatgttgcgctccagttcgttcttgaagcgcacagtctgcacgccggatatggctttgaccaccgtggatttgccgtgagccacatgaccgatggtgccgatgttgatggtcgcctgtcgggagatgacctccggtgatagaggcgttagtttagagacgtcctgcaagattccaaatgcaatacgataaataaaggcgctttaatagaggaaaatcagagcacaagtcttgtttaccgccgccacaccccctaacaaaacatcccctctcagatgcatgtgtgtatataggaaagccgtcaattttgaggttagaatgtcgcttgaattgcatcaactcaaaattgatgacaacagtcaggtagtcctcgcgaaactgatctgcttgccagagcccaaataccgccagagtccgcatcatgcccatatgcagagccaaagttgcgggataaaccaaacagaccctaaatgtagcgccacgtgctgcattttcaccgtgatctctcacccacaacaaatcactgctggccctggcgaaacccactggtatatccctcgaaattggtccgcgaaccgttcgagacaatctgggcgcgtccttgcgacccgcaccccgctgtttttccgggaagcggctccataatgacgacgcgtatactttcacacacgggcggaaaaaaagggaaggcggcgtctggcggtcgtctttgctggctgcttaccaagttgctgaggtcctgcttctgcaagttcctgttcacaccgatctgggcttcagccgtggccatgttgctgatgttttcaaaaacgatgcgtatgcaaaatgaaaataataattttcagctattacagctcggcatcaaatctcgatatcgaagaacgattggacccgacaatgcctatcgatagtgctctaatcatggttggccagtgttggacacgtcacaccggtgcccaactgcgatgcgtatcgatagagtgccgccctatcgatacacttacagttcttcagccgcaaacgaaaggttaaaaatccgcttcgcttctcttctgctcaactgtaccgccgctttttgttcaaatatctcgggaattacgagcgtacacacaacggaagagcgtgcagaatgtcgagcgtgccaaagcgagccaagctggacggcgcccccgccgatggcaacacatccgccgccgccggtaacaacgaggaggagtcggaggcgttggagcaaattgatgcctgccagaacgagatcgatgcgctgaacgagaaggccagcgaggagatcctcaaggtggagcagaagtacaacaagctgcggaagccctgctacgagaagcgcagcgagctggtcaagcgcatccccaacttttgggtgacctcggtgagtacttcgatccgcggccatgtttgtcccctccgcgtgttcgtctgatgggttctagtggagccgactagatctttcgaagccctgaagtgatggtaatcgctgcacacatgtacaagaaattttctctattcgaggcattttttcttgttcatctttgggctgcaatgccgacaccaccggctccccgcgcattttccccctcccggaaaaatcgtgctatcgatatatccgtctggccgggaaatacacaacatagcacagttcaaaatggcttcaaatcaaaaaccactgaaatatttgctgccataattgaaaagaaaagtagtgccataggggccataaacatggctttctgcttgatagcatgcatcccctagctaatcccaactgccatatttgcagtttatcaaccacccgcaagtatccggcattctggacgaggaggaggaggagtgcctgcacgcgctcaacaaacttgaggttgag

SEQ ID NO: 13805 - DNA, 2377 bp, DROSOPHILA
ttcgatatcgagatttgatgccgagctgtaatagctgaaaattattattttcattttgcatacgcatcgtttttgaaaacatcagcaacatggccacggctgaagcccagatcggtgtgaacaggaacttgcagaagcaggacctcagcaacttggacgtctctaaactaacgcctctatcaccggaggtcatctcccgacaggcgaccatcaacatcggcaccatcggtcatgtggctcacggcaaatccacggtggtcaaagccatatccggcgtgcagactgtgcgcttcaagaacgaactggagcgcaacatcacaatcaagctggaacgcttgagcgaaaaaaaaatcaaaaatcttttgacctccaagcagcagcgacagcagtatgaaatcaaacagcgttcaatgctgcgccacctggccgaattgcggcgacatagccgattccgccgcctctgcaccaagccagcttcgtcttccatgccagcatccacctccagtgtagatagacgcaccacccggcgaagcaccagtcagacctcactgagtccaagcaatagtagcggctatggcagcgtttttggctgcgaggaacatgatgtggacaaaatacccagtctcaacggattcgccaaactgaagcgtcgacgcagcagttgtgtgggcgccccaactcccaactccaagcggtcgaaaaataacatgggagtaattgccaaaaggccgcccaaaggagagtacgttgtggagcgtattgaatgcgtcgagatggatcaatatcagccagtcttcttcgtcaaatggctgggataccatgatagcgagaacacctgggaaagtcttgccaacgtggccgactgcgccgaaatggagaagtttgtggagcggcatcagcagctctacgagatatacatagccaagataaccactgagcttgagaagcagctggaggcattgccactaatggagaacattacggtggccgaagtagacgcctatgagccactcaatctgcagatcgatcttatactgctcgcccaatatcgcgctgctggcagtcgaagccaaagggaaccgcagaaaattggagaacgagccctgaaaagcatgcaaatcaagcgggcccaatttgtacgacgcaagcagttggctgatctagcattgttcgagaagcgcatgaatcatgtggagaaaccgtcaccgccaatacgtgttgagaacaacattgatctggacaccatagacagcaatttcatgtacatacatgataacataatcggcaaggatgtgcccaagccggaagcggggattgtgggctgtaagtgcactgaagacacagaggagtgtactgcctctacgaagtgttgtgcccgcttcgccggcgagctgttcgcctacgagcgaagcacacggcgcttgcgccttcgtcccggaagtgccatctatgagtgcaatagccgctgctcgtgcgattcaagctgctccaaccgtctggtgcagcacggacgccaggtaccgttggtgctgtttaagaccgccaacggcagcggatggggggtgcgagccgcaactgccttgcgtaagggtgaatttgtgtgcgagtacattggagagatcatcaccagcgatgaggcaaatgagcgcggcaaggcgtatgacgacaatgggaggacatatctgttcgacttggattacaacacagctcaggatagcgagtacactatcgatgcagctaactatggcaacatctcgcactttatcaatcactcttgcgatcctaatctcgccgtgttcccctgttggatcgagcacctgaatgtcgcgctgccgcacctcgtgttcttcacactgcgtccaatcaaggcgggcgaggagttgagcttcgactacattcgcgcggacaacgaagatgtgccctacgagaacctctcgacagctgtgcgtgtcgagtgccgctgcggagctgataattgcagaaaggtcctcttttgaatggacttgaagtactatatttaaatggcacgccgttacccacctgagacatcattgcattgaaccttttttttttttgttaacatatatatatattactagttggattttatattccgacgttttaattatttatttgttaataaatgctaatatcgatatattggatctatattatgtttgaggatctatattactagaggataaaacgagtaattctatatagtttgtacttgtatacatttcataaacttaaattttaatttagtaataacttagtgttttgacaaacaaccttgtaatgtgctgaaattattaccgcattaagtgcaaattattattttacaataaatattttacgattattaaaaaaaaaaaaa

SEQ ID NO: 13806 - protein, 635 aa, DROSOPHILA
MATAEAQIGVNRNLQKQDLSNLDVSKLTPLSPEVISRQATINIGTIGHVAHGKSTVVKAISGVQTVRFKNELERNITIKLERLSEKKIKNLLTSKQQRQQYEIKQRSMLRHLAELRRHSRFRRLCTKPASSSMPASTSSVDRRTTRRSTSQTSLSPSNSSGYGSVFGCEEHDVDKIPSLNGFAKLKRRRSSCVGAPTPNSKRSKNNMGVIAKRPPKGEYVVERIECVEMDQYQPVFFVKWLGYHDSENTWESLANVADCAEMEKFVERHQQLYEIYIAKITTELEKQLEALPLMENITVAEVDAYEPLNLQIDLILLAQYRAAGSRSQREPQKIGERALKSMQIKRAQFVRRKQLADLALFEKRMNHVEKPSPPIRVENNIDLDTIDSNFMYIHDNIIGKDVPKPEAGIVGCKCTEDTEECTASTKCCARFAGELFAYERSTRRLRLRPGSAIYECNSRCSCDSSCSNRLVQHGRQVPLVLFKTANGSGWGVRAATALRKGEFVCEYIGEIITSDEANERGKAYDDNGRTYLFDLDYNTAQDSEYTIDAANYGNISHFINHSCDPNLAVFPCWIEHLNVALPHLVFFTLRPIKAGEELSFDYIRADNEDVPYENLSTAVRVECRCGADNCRKVLF

SEQ ID NO: 13807 - DNA, 14170 bp, DROSOPHILA
acaatcgaaagaaaaaccaaccacatttgtggcttacttagccgtgaagtgaaagtacattatgtgttgcagacgattgttatgcacattacacacgtacacacactcgagtgacttatttccattcaaattaaagtcaaatttatgggtacgctcatttctcggctcatgtgtgcatatagtttcaatataaatacgtttaattgccggaatgattgatggaataagtgcaaatctgcagcgtcatgttatgcaaagatttttggctacttctttttgacttcggtttgctatggttttgaactgggtttggccctacttaatgttttaaaagaaggcaggctgacagacaaaagagctcgtcatattcaaattattgtgatacaattacgttgtcggcatgttgaaatgtacgattcaaaatatattgcactttaagcgtaaatttcaggtgcaaatgcctttaaattacataatagttccacgtcatatgatcacacttgatatataaaaatctgattcatacatatgtacgtaaattagcttgcttatatttataacacataatgcacacacatttctttcatccaatcaaagtcacttttattaattaaaacattcttaatacctattacattccatgactagaatcactcggtattaacacgcctgactggctgttaacttagaatcagcataacataaacataactataaaccaaattttactttccttttttttttatttaattaatttatatacgttttctattgcatatgcagacagtaattaggttgaggcggcgttaagtggtgtttatatcgtaaatttatttcgatgccaattgattaccaatccattatatcatcaagcttgttagtggttcacaatttcttgtcgttcttcatataatttattgagtaagttaaacagaatttcataaaaatccgctaaatatgttaggagataaaacaagtgcagcagatgttgccgatgttgcgttgatgttgatgttgctgctgtcgctggtgttgcagctgcactttctagtactcggtggcaccaatcacgctgtacatgagacgattgaaggagccgctctggcgtatgttctcatcgtgggtgtttaccacctgttcacccatcataagacacatcattagtataacattcagttaacagtgaataaatccgcgctactcacattgtacggcggccgggatactggcgctgatactggtttctgtaatagcatttggatggagtgaacagataagatatagcttaataactctggctaaatccagcaatttcggttaaaaactttttaaatgcaatattcaactgttatgagcttcggttagatgttattattccgtgttagaatgccaaaaagatgtgtgcttcttgtgatttggaaaatatacacatatatggagttaatggatgtgtttagtgtagttcgatgccagcagatgatcgatcgaccaaaaaatcaagttagtaacactacttcggccccgttagtcgtcgttacagcgcgtttacatgccgccagacaaggacacacagacactgttgactaacattcggttggatcaactgtacacgttacattgacacgaatagagagacagcgagcgagatagaaacagagagaaatagatagactttgtacaggatgagcttgagaatcgagcgatattgtcggatgccttcacataaagttttaactgagttcgactgattcgagttgattgagagatttgcttgattttcgaacggttgcgcacgatcttacctttcctggaaccaatctattgggctgatagaccttagtctgcacaggaatggtcacttcctgtggcgaggattggccatagttgctgtagccgccctcttcttgaatggctctgtaggtttcgctgttcctgggatcgtactggacagttttcttatagctgctcgttggcagtggtcagtgattcgggttccgattgagattaagtttcagtaattcgggggtttgcattgagatcgttgaaagcgccgttattttggtcaattattcgttggattttttgttttggtgttacgcaagttttaaaagatttatttattttaatttgttttattgttgttggttaatcgagatttataaaaaatatgttggtttttttgtttttgatttttttttacatcggttgagtagcgtgagacagagtagtgagagaatagaaagagaaaacaggatgtgcacaaaatacgttagaattattttgtttttgttgtagttgttgttggttgttgctgttgttgttgggcaataggtgtgctttgttgtcttggaactgcacactcctcaaacggattgcgattaataggaaactcataaacaaattccttacaatctagttattattattattaagagtaatcaaacagaactgcataacaaggtgcgagattatattgagattatcatgtatgtatatcatcggatgagtcgaagccttgagatcgggcgggattagggtggttagttagtctcgttcggttaatactggatgggttgcgatagcgatggggatcaagaataggaactttcagtgctgtctttcaaacagttcgtaaatataattcagcaaacgtcttttagtttcggattagtcttttggggtggtgggtcggaaagaagtgtggacgggaaggacttttagcaggggtcttgggaaagggtatttggctcatagtctattagaagtgggttcagtttttggctactatttgattgatcatttgttttgttgatagagtatttgcagttgatgctggcgttgttgacgttgttgctctgccagttggtctttttgcttttgttgctccagaataatacgtttttgttccaggaaagatagatcgatgaaaattctaacattaatcgtgcagctatgttctaagcatatcagaaactaagagctagagtggtagagtggtctagggttcgtttatttgttgaacttggttaatctatggaaacagcacctgatctacccactgaaaactcttaccgatgcacctacgccacttttgccataccttaaacttacatatgtcctaaaaaccaaaactgaaaagcctcaagacaaacaacgttcgctgggggtttcggtgaagatcatttccagaaatacacatatttacatagcatgatttcctaagcgcagactcagatcatttgagcttttctttgcaataggacgtttttaggaagaagaaaaaaaaggaacacacatattcgtagacagcagagcacatgcattcgggtttttggactcgtgtcgtgttgtttctgttgttctgacatagatattgtatctggttcttagaaactacatatatagttcagttgttcaggttgcgggagacaacaataatcgagggttagtctgtacagacaggcaggggaaaacacgggaaacttggcaaacattcctcatattcaatttaatttgtctcaaggcaagttcaggtacaattccacgttcttgctcattgtgctttccatatcaaagtgaaagtgaaagtgaaaggattcaatcaaagaacgaaatcaggctgtgctcaagatatgaatttacttttacccgttaagttttgttggcaaaggacgatgcaaaggactgtccttcaagcgattgctttcgcttgtggcgaagctacaacaatatacatagaatatatataggatatatagagagtggtatatttatatatgtaaatgtatataaatgcatgtaaaacagagatccggcagtaggcagtagtaagtagtacgtacaacatctatggactggttttcgtgttcaatcgtatgttcgaattgtgtgtgtttctcatttcgtgtgtgcatcggtttagtaaatttcgtttcgactttgattttgtggcttttgggttagtggattatggccgcagcttaaccaggaaccaatttttcgggttatgtggaccttaggctactcgtaaccgtgtgttcgtgactcgttttattagttttcaagctacttggcgcatttcgagtggctctctctgtctctctggcaaaaagaaaagctgcatcaaaaatttcgaagaactctacgcaggtttattcgtaaattgcaaaatccaaagaatatgtagcgtaattcataggcttataagttcaatttgacaagcgaattccaaaagttcatatattagtgttttttttttttcattgtatcgagctaagcataggagtttccagatggtacatttctgggtgacaacttacggaactgtggatctgatggtgtcctcgatgttgttgttggagtacaggccaatgggcgagttgaattgcttgtggaagacctaaaatcgggggatatatgtacacaaatgtaagtaaaacccattacaacttacacttaaattaaatacaatcaatttcgtaacaggattagaacaaagactacaggtcacgaattcgaaatgttaacattgaaaatatcaattttaaatgtagaaaactctagtttttgtaattttccattatgtgggtgtgactttaagaagtcccctgtacttacgcggccagtgtcggcttccgaaccgaccaccttgtgcagcatggtgtcggccacgcgctgcttcatgatactgtcatggtagtcgtgtcctgggtgggcgcgcacagccgggttggggtagtgcctcaagtaggactctgtcgtgggcgcatccttcttcactttggcgccgggcaggaccagcggagttgtacggtagggctggaaagcggatcggtgaagattaacgactttgtttacgccgaaatggggcacacatttggccgaccagccgttgcggcaaatgataatataaataaatcagacagagattaaaagagtttctagaaatcaccagatctttgcccactgtgctacgtatttctccttcgagcgtgtgtgtgcataatttttttcgctatatctaaattccattttatgtgcgcccgtttatatactttaaaaatatcccatagccaggggaaatatttttaggcgcttacgtaagcgtgttcaacgtccagcgatttgtgttttctatctgccgcggaccattttatttttaccaggccgtccacacgcgagtatgtaagtaattcaatataggcggactgctgtttgaaatgttgtaactatgcgcgcctaatcgataggcgatcgacaataggcagctctgggctagagctgccagatgaccagaccaggcttgatcagctgttgctcgtggcgaatggcaaactcaatttgcgcgcttttttaactgtgactgccagctgaaaattgtaacgcacgctgtggcttatttaactcgtatttaatagtaactaactgctgatcaataaactaagctaaagaatggctgccgtacgccgctccacgcgccttagtagcatcagcaaagcgaccgccgcctctccgctgccgccgtcgacgcagacgccgcgtcgctcggaagtttggaaacgcaggcagccgaaaaaagtgcttgccgatagcgacgaggaggaggaggtggtgacggcgatctatgacctgaccagccccgtttcagagaacaacgagaaccgcaacgtgctcaacaaaatggacaagatctccaggcgcaggacatcgcaagtgcaggtggctcaatcggagctgccaaagacgccacgcagcacaaagaaaacagtccaatcagctggcagttcacgggccaaacgtgaggaggaaaaccgtgaggccaccgctagattcttggagggcgaacaggattcggaggtggacccgcttcatggatcgccgccgaagcagaggaagttgcagccactgccacagcacctgatcagtccttcgcggctgctggacagactcagcatcgacgagcgccaggaggaagaggtggaggcgaccacacacaagactgaaacggctgagcagcagccgaaacatcaagccaaggacgaggcaaagcctcggccaaaacagcaggaggatccattagcgcaaaagcagcaggagaaacctccaacaaagcagccgaataaaaaccaaactaaagaaaaaagcaatatccaaaccaatgaggaaacccaacagaataacctgccatctccctcacgcaacaaataccaaaacgccagacgagtgctcaacagcgccgagacacaaaacttgccaggacgtgagtcccagctccaagagctacgtgaattcttcagcaatcacctggaaagccagacttccggcagcctctatgtctccggtcagccaggaacaggcaagaccgcctgcctatcgctactgctgagagatcccgacttctccaagcgtctgcaacgtgtgtacattaactgcaccagcatagcaagtgtaggagcagtttacaagaaactatgcaccgaactgcagctcaaagtcagcggtcgcacagagagagatcacttggaggccattcagcgtcacctaaagacagcaaagcgaatgcttctgctggtgctggacgagattgatcagctctgcaccagcaggcaggaggtgttgtacacgatcttcgagtggccagctcttcccggctccaggatactgctcgtgggcattgccaatagtttggatctcacagatcgtgcgctgatgcgactgaatgcaaggtgcgagctgaagcccagactgatgcacttcccgccctactccaagcagcagatcgtggagatattcaagtcgcgtctggctgaggcggaagtgctggacgtctttccacccgtgaccctgcagctgctggccgccaaggtgagtgcgatcagtggagatgtgcgaagggccctggacattggacgacgagtggtcgagatagcagagcagcagaagcgcgatggcgaaaaggagttcaatatgaaggccctgcagctggagggcaaggatgcggtggaggccaaggaaaagcaaggtaaaccttcgtttctttagtatataaagataaatttatagaatgtgttaaaaagaaatcctatcttgactatttcagacactctaaagcctgttcaggtcacccaagtggctgcagtgctgaacaaggtctacggtgcctcacagaatctggaggaggacatcgaggcatcatttccgctgcagcaaaagctaatgctgtgcaccctggtgctgatgctgcgcaacgagcgcaacaaagacatcagtatgggtcgcctgcacgaggtctacaggagagtgtgcgccaaacgcaacatcctggccctggaccaagcggagttcactgggactgtggatctggtcgagacccgaggcattctgcgaatcatgcgcaaaaaggagccgcgcctgcacaaggttctgctgcagtgggacgaggaggaggtgcatgcggcactgagcgacaagcagctgatcgcctcgatcctcagcgataccgcctgcctgagcaagtgacgatctggacgattacctctaggaaatgagtgtgcccgacaaaccgctggttaattgcgcatttttctcattttcattcaccttggggacgaacgtatatgtataggaatactttttgacgctaattttaaaattcgtggctggcgcaagcactgaaatattttgaaatatcatttgacggtcactttcgacattttctgctattttctgactattaattgaatcgattcttttagactttgtgtgtgtcataaatctaagtaaatgttgcgcccataatctatttctaatccgatccgttgaccaataagttatagagaatccccttcctgttagccctaagcaaataagaataaactagatagttccgcaatacataaaacgcaaaagtgaaaacgttttccactttcgctgcgccgcaagtttgaatcttgggtcgtgccaaaagttgtgaaaatcttagggaaagtctgttgccattgttttctgaggcgttttcagaacataccagtcaaattaacaccagtgcttctgaatttgtgtgggcttttgttggccatctcgacatgaaattaatttgttctataatcattttgtttatttatttgctggcttattgttgttcttcctgcgctctctgctctaaaaatatccccatttgagtggtatgaattacattgagcaccaccgacacaaccagagcgcaatgaaaaatatgtttcaaaaactctggttgcctttcgacgcgtattgacgaaaggcgaacaaatgtttgaataataagctatatgcagagaggccagctagatatatgcatgaatgtatctataggtatatggcgttctatattcctattcctcaaaaatacatatatttctgagggagcagtaaggcgaaaaacctcgaaaaacatacaggtctgttggcgctgccatttgcatttgaacttgaattccaagatcaaacggttgacggtaaaggtgaaatgtttcatctggattgggccacgttcttagaaatttgaaatatttaaaagtaattcaaaattaattaaatatcagcatgatttgctttactttctatctctaatggggttaaaccagtatcctttataaaaccaatagttaaatcttcatttaagattatgtgcatatatcaaaacacacttttcgcgttcctcaggcttctctttaaatatttttctatatgtggcttaattcgagttaattgttcactggctcgcttacttggtattgaatgcactcattgaggtctggctgctccttgtagtagactggggatccgtttttgaactgaacgtactccatttttgcaatgtgtgtgttttgtgtttgaatttaaactccttcaattcgaacaaaatagaaacgaaagatattatagccagatgcaattacgtaatggaagatcacgcagtgtttttaatttttgtttggtaaatttttttttttttttgaattttgtaatatattattggcaacttgcttcttcgtcacgtttaaatcaacgctgcagctggtgagatcggagatctttacactaggattcactacaaaaaggatgctcgagctcgagtcttattgttgtttatttttcaatattccgaacgcaactgattcgaaaattttcaaatgctggcgaattattgctattccgactgcgcggaattccaatttgtctatatagccaactcggtattggttggagagtgtctatctgcctgtctgtctgtgtgagccaccatatagaaaaccgagtgctgacggtcagaggccgttcgttcgacccacgcactcataccaatccactagaaaatcctatatattcgagagagagagcagattttcctaaatatacaaaatatgtttttgtgcaaatagcctgttcaccgagcgtaaacgcgggcaacaacaatacaccatcgtataaacttggacttggtgtgatctatatttttgttttttttttcctcggttcccgcccacgcgccaccttaaacaccgcccccatttcctccccttaccaaacggatgttgttgtttgtcctgccgcctcagtcgagaattattcacattattcacatataacaaatctcgcgtatatgttttaattgctgcttttgtggagcaatttcacatagcacttttttcgtatttcgaaaattaggcacaaatatttatcgcactcgaggttattgtttcgccccactgcagcaacataaatgtgaatataaaaatatttcgcaaatctgctgttaaattattgatttgctcagtttgctttcgccaaattgccaaattgcactgtcacttagcatttccaaatcgcagatttgtcaaccaattctgacagttccaaagataccgatcccagttcgtaaatctcaaaaccatattggcattggcatgctgagttttcttggctgtcataagcaattggcattggaacagggcattgggcatatcatttgatgttgattttgactgatccaaaaacacacgagcaggtgtaattggccttgaaaggcgttggaaaagtctcaagttcgatggagaaaccaaggaacgcataacttacacggaatcatgtgctaaatatgttccctactgcgaaggctgcagttcgtttgactatgtgatgcacttggagaaaaataatgatttacagaaagcaaaaaaaaaaaatatattttttatgagaatatctcataataatatatatatacttaacataattctcataaccttgttgcaatattaataatttctaaaacatatcagctacattctcagcacaccaatggaatttttcttggtgcacccgcgcttgtttaaaacaaaacgatcaataaacaatccgactgatggttttttgtgcgttccgcgcctctaacaaagagaaattaacgaacacaaatagaacgcattcaaggtacatattaaccataaattagttaaggcaaagtacaataacccctcgcaatactataatgctgagaatagaccaactcccatcatcgtggggaggtcacctgttctggaacttttccccgagacaattttctgacaccttcgtatgacaaatcgtcaaacatcaaaacatgtaggtaggtaggcaccttgattttatttcggtgccgcactgccaaacatcaaattgcgaccttggcaagtgtcttgattcattagcagcgtcatccgaggataatgggacatatggagtgagaagggaggtgttctgagtggccttgccacggggcatcacaggttttggacggacagtggatcaaaatccgcgccgtgcacccccactcacctggcacagaaatagttcggaaaatagacgcttgtttatttgcgtttttggctcttggcatttttcgccgagttttgggggcgggctagttctctgtaagagattctgacttgtttttctttgattcccagccaatttccacctgcgcactgcgtcaccgagccttttcctgtttagcaccccgcatcctcgctccgaagtctatatatagcgtatgtaagcgatggaaccttgaccaacaacattgttatgtgctgacgtcatcgttcgagtgtattcaaattacaaaaacgaactgttttctacattttcgaaagcgttttacatgaacattttaaaaatctacatacactgacaatggaaatgaacaacaaatagaacccagttggttcaaacatttagcattgtggtaaacaatttacgtaggtattttcgattgacatcgcggaaaatattttaccacattcattttacacacattttttaatttaattcccgaaaagtatgcaacgggcaactacaaaattatgcatatgaaaatattggatattattacaaccttgttgttatatttatagatccaaaagataccaactcacataaaaataactgtatgagatgcagtcctagatattagattgtaaaataatctatgatgaatatattcaattattagttgcaactagctttatccaaaatttttaaaaattgctaaaggatttatcaaaatctcagtactcgcagcataccattcgggataaatgtttttcaacacacaatgggatcatccataaaaaaaacatttaaatatctcacctgattcacaatggccgcctgctcctcatcgacgtcttgttgatggtccctggttggcttgggtgagaacacagtcgatggcacctcatagccaccggatgagttcagctggggaaacacggtctgcggcaacgtgtccaccggcaactggagggccctctcaaagtggctgggtccgggcaaaaagggcgacggaccgcggtggggcatcagatccggagtgaccggcggcaaagtggagttgctccgagatccaggacctgcctcctgagttgcaccctgcgtgtaggcgattttgttgtccctgcaatttagaattattaatatttgtcatatcacagaccatacaaaagaaaaatcagttcctaacgtttcttagtgcaaattgatccaagacgaaggtttccttttggcaatggagtaaaacttaagttaagttttttatactatgactataatcaactaacttttatgatgataaaagccctgtttaaaaaacagaaaactaaaatgaaggtgttctctttactcaatacacttgacactcgtagaagaaattgatgttaaacatacggaactgattggtatctttgatgcagatacacggatttcctggctcacctgtgcaccaccaggcggatctcgttgccagcgccgcggaacagctgctgtgcatccgcatgactcaggtcgcgtgcgtcgtactcgccgatcttcgagatgatgtcgcctcttagaagttcgccatgcgctgggctgcccacttgcacctgcaacgggtggggtggaaaaggaggtgggaaggtcattagacacacatagtatagggtgcaacgggctggttgcaaccttgacacagatttatgggtgcctaaatagatgcagacagaattatgatcgccaaaatgtgtgtgtttacatcgcagctcagtgaaaagggggtaggtaggaaaagtggaaattttcttcgactattcggttgcgcctcaattagttttactggcgtcgcattttggcaacgctgcagcgtttattgttgctgtgcccgtttcgctattttgatttgttgttgtttatttgggcgctgagaacaaagcggcatgcggggcacaaaggccaatcgcttttcctcaggcatttcttctctggctcaattttgatgaatggaccacaagcgaccacaaggcgacagtctctctggttatataacgcccatttaccctggtgataattagcggcgtgtccagatcgttgccgcccaccaaacgaatgccccagggcgtggcctgaccatcgcgcagtagcaccaccgcaaactcatgcagcttggggctcatcctgatgttgaagatagactggaagatcagacgctcatccgatccagcgatggtttatcccgaaaatatatatttattttttattgtttatttttttttctggccttttctggccgagccgcaggcggcgcgcgattgcaatccgttaagcgttttgttcgatcgcaaagctgctcaagtactaattttaaaatacaattcgtattcctttttgcagcaacagcagcggcagcagagtacactgcgccacaagtttgtttcttacatacacatatgtacatacatgtacaacttatatccgccggcaacggcgactacatgctgagaaacatgaattcgattggcgaatcctaatcgttaaatggggtttccgctaagagcactctgaatttctcagagcggatgtcgtggattcaaaaagcatcaggagcatttacctcggcaaagctcataattaccacaagataattaggcgtatacttgataagcggctgcatatcaaattacgcatacgcagtgttaataaacatgattgcttgcatgtgtgccatgtatttaaagctttactattttcattattatatatacccaaatcgcgaagagcatccgcaagccaccacaaactcaaaccttttcccacattgttcccattgtttaattcgacgtgtgccctgcatttgtggcattctgcatttcgttgaccacattttagggcagcacttgatccagttgcacgctgaccctgaagagatgaatgccacatatcatcatctaggcgaatgctttgatgagctagctcgcctgatgcaaaaaagcataaaaatcaagtatctaggcatctgtttttcctcgacattttcgactattttattagtgttttattcctctccgacttgtttgccgaacgatgaggcaaccaagagagagtgtaattagttttagttactgaggcggtactagcacaactgcaacaaccaattcgacactcttgcccaatttaaataagcaaatcatattagatttttaatgcattagtcaatggaaaagtctacggccaacgtgacgtatacgcaatatgaacgggtcaacggttgaaggacgttggtttgtattaaacattctgtctgcctctcgattttggcaacaattttactgtttacagc

SEQ ID NO: 13808 - DNA, 1187 bp, DROSOPHILA
atcgaacaaaacgcttaacggattgcaatcgcgcgccgcctgcggctcggccagaaaaggccagaaaaaaaaataaacaataaaaaataaatatatattttcgggataaaccatcgctggatcggatgagcgtctgatcttccagtctatcttcaacatcaggatgagccccaagctgcatgagtttgcggtggtgctactgcgcgatggtcaggccacgccctggggcattcgtttggtgggcggcaacgatctggacacgccgctaattatcaccagggtgcaagtgggcagcccagcgcatggcgaacttctaagaggcgacatcatctcgaagatcggcgagtacgacgcacgcgacctgagtcatgcggatgcacagcagctgttccgcggcgctggcaacgagatccgcctggtggtgcacagggacaacaaaatcgcctacacgcagggtgcaactcaggaggcaggtcctggatctcggagcaactccactttgccgccggtcactccggatctgatgccccaccgcggtccgtcgccctttttgcccggacccagccactttgagagggccctccagttgccggtggacacgttgccgcagaccgtgtttccccagctgaactcatccggtggctatgaggtgccatcgactgtgttctcacccaagccaaccagggaccatcaacaagacgtcgatgaggagcaggcggccattgtgaatcagccctaccgtacaactccgctggtcctgcccggcgccaaagtgaagaaggatgcgcccacgacagagtcctacttgaggcactaccccaacccggctgtgcgcgcccacccaggacacgactaccatgacagtatcatgaagcagcgcgtggccgacaccatgctgcacaaggtggtcggttcggaagccgacactggccgcgtcttccacaagcaattcaactcgcccattggcctgtactccaacaacaacatcgaggacaccatcagatccacagttccaaaccagtatcagcgccagtatcccggccgccgtacaatgtggtaaacacccacgatgagaacatacgccagagcggctccttcaatcgtctcatgtacagcgtgattggtgccaccgagtactagaaagtgcagctgcaacaccagcgacagcagcaacatcaacatcaacg

SEQ ID NO: 13809 - protein, 298 aa, DROSOPHILA
MSPKLHEFAVVLLRDGQATPWGIRLVGGNDLDTPLIITRVQVGSPAHGELLRGDIISKIGEYDARDLSHADAQQLFRGAGNEIRLVVHRDNKIAYTQGATQEAGPGSRSNSTLPPVTPDLMPHRGPSPFLPGPSHFERALQLPVDTLPQTVFPQLNSSGGYEVPSTVFSPKPTRDHQQDVDEEQAAIVNQPYRTTPLVLPGAKVKKDAPTTESYLRHYPNPAVRAHPGHDYHDSIMKQRVADTMLHKVVGSEADTGRVFHKQFNSPIGLYSNNNIEDTIRSTVPNQYQRQYPGRRTMW

SEQ ID NO: 13810 - DNA, 3805 bp, DROSOPHILA
cattgagtagatcggagtacttgtccactatgttggcgttctcatcgagacctgcaaagtgtggggtcttaaccactactattgttacatttatcaatttgcttacctatagatgtgccaaacagatcggagtcgatgccaaaaccacctcctcctccgtttgccgccgacattatttgcaactgggcctgcatgtacttggtgtactccagtttggccatcacctccttgtactcgttggcgtaggcaagtgcggcgctgtttgtctgctgcctgttgcgcagcatcatcgctgcattcgcagtggagctactgccagcagaagcggctccactcaccctcgttatctccacttgtggcacatgcgtcttgattgctagctcctggttggtgtccattgctggctcctcgtccgccttggggcgcgatggcacggccgtgacggttatgtcgctgtacctggagcggaaggattcaatgtccaggtagtccattttggcgattgaatctctaacgacgatcgatggttgataatgaaagggatttatttgacaggcctacttagtagctaatatttcagtgctgcaaatttcttagggctggaaaaccatttcttctattttgattttcctccctggccaaatctactcgtactcccatttccttaacatgagccccaagcaagtggcatacccaaccctcacttggtttttgcctttgcccccaaagctaaaaacctttctttttgctctttcttttgggctatcgcatgaccaagtgggtaattacgggaagcagaacaaaaaaacacgtttgtaaacagttcattctgctggcgttgtccattcgcccgttcttcccgcgggttccactgcttcagcgaccggaagccgctcaagcgtgcttcccgttctgcgcaggcgcattctccttggtcaccccaattttttgccatgactcatggggtatggcgtattcaaataagagaggtggagatctgatcgtaatggttgttttacttgttttacatgcaaattttgaccagaacattgtccagaatttcggttttaacaatcttcagctgttgtgctaataacaatttagtgttctagactctgcttaatggctagttaattgctgctctggtgctgcgagcgaatgatcgcctccaggctgcgttccgtgtgctctccgcactcgaagcgatggtagtcgacgatctcgcagttgtgctcctgcaaagcctcgcccaccgtcttgtccgcatcgagcagatactcctggtgaatcaggcacgtctcatcgtccttgttctccgccggcttgtccttgtcatattcgccgatctttgtcggcttcatgcccacgatttgctggcaaatgctcttgtgaaactcaaagtccagcagggggtgcgtggatcggtaggctacgatcgctccgtacttgcccacctgggtgatgccttccgtggtgcccacattggtgggtgcgggatgggcgtagcccaccagcttcaggtcgttgttagccttaaagcacaatgcgcgccggatggtggcattctccccgatggcgccgatcagcagagccaggtggtcgcccaacgtgcgtccctcctccgtgcgcaagtttctgagggcgtccgcatcaaagccaagctgaaaggatatgcacattctttaattagcaatttctttaggaatggatgcaaaaccggttctgatccaaatattgtgtacatttcccataaaaatctcgctcaccttccacagatctccatcgaagtccgtcaagtccgtgtattgcagacacatgcaggcgacgtggtcaacgaaccgcttgaaggtatcgttcctggctacgaaatccgtctcgcaattcagctcgaccatggcgccccggtttccgcggatgagcactccaatcagaccatgtgcagtggctcgatctgcgaccttggtggccttcgaccagccgagggtctgggcctgctcgtgcagccacttttcagcctgcaagagcgagatgatggcaaggtgagttgattagcacagatgtgttttgatcacaaaggagtttgcatgcggtgcagctatatatattacataataatatagaaaaatcagcaatttttcaaaatgtagagatccccatttcgtgctctttgtaatggaaagctcactgcaccgcttgcaataaaactattagccaactacccaccaatccgacgtcgttgttgtgcttctccagcgccttcttgcaattggcgaaggtgtatccggttttcttcctcagcgccgccagggcactcttctccaggccaccggatccgccagagccggcataaagctgccgcgtggagtgaagtgcgcgtgtgaaaaacctttgtagcagcatttttccaaaaaatttccgaaatttactgggaggccaaaatgatttctagcgtgatttgtgtgcgaattgaattgttgctctttgcctgctgtcaagggcaactcgccggcttgtttgtttttccgttttccgacctgtcgctatgtagtagttgcccggaaaatcaattcattctaaacaacggaaaagcctgtgtgagatttgcatttgttttcaactccttcgtatgttcgcttcggttcaagaaaaattaatcgcgttgcggcgcgaataaatccaaagcgagtgtggtgcctcgataggtgaacgactggtaagcgtcgatagtttagttttcggcttttctgtgtgcttaattcgagcaattaattttgaaactgaaaattttgacaattttccgtgttgcacaattcggctgttagggatggcaaaaaagccggtagggcgcgtgtgcggagaacagctgttgcgaagcgactatcgatagtggcgacgctatcgttggccaaatgacgtttagtggatgttacaacctattaccggttacaaccgattcgaaatggattgaaaccaaatatttaaaacttaaacctaataaatagttttttttttaattctggcgcacgtagttattttcttaattaatattttagtgtttttttttactttaaatagtactttgattaataactcggcgggatacaatcgttttatgtttcaaaaacaattattgaaaacaattttcattttctgtagtcacattttgattcgaacgttgaaccgatttcaggcttcaacatgcagggcagacagaatccgaatcgggagttcagcatccccagcttcacgtccatatgcggcggtcgccgcctatgcgagaagtcgaagatgctgtacacgcgacccaagccggatgtgctgcagagcatcctgcagtcaaaggccaatccggagtacaagtcgcgtcgcctgtggtacgaactgaacatgccggaatgcgccagctccctgctggacggcaagatgaaatccgacctgccggacaacatactctgcgcgaagaaacagcagaagaaacgccagaagaagcgtgagagcggcgtggccaaggccaactacatgaccatgcgactggagcgggagcacttccgccgcaagctggtggagctcatcctgcacatggacgacgaccaggatcccgagctggccgcccagtgcgccgtaccctttcccgaccaggaggagcgcgagattctgcgatattactattacatcaagcatggcattgacaccattcacgtgtcgccgttgagcaagaagatcctcaagaggtgcgttccactgaacactttcaaatgtatctgcttttttgctaactgctttccgtctgcaggataaccgatct

SEQ ID NO: 13811 - DNA, 1492 bp, DROSOPHILA
caacacggaaaattgtcaaaattttcagtttcaaaattaattgctcgaattaagcacacagaaaagccgaaaactaaactatcgacgcttaccagtcgttcacctatcgaggcaccacactcgctttggatttattcgcgccgcaacgcgattaatttttcttgaaccgaagcgaacatacgaaggagttgaaaacaaatgcaaatctcacacaggcttttccgttgtttagaatgaattgattttccgggcaactactacatagcgacaggtcggaaaacggaaaaacaaacaagccggcgagttgcccttgacagcaggcaaagagcaacaattcaattcgcacacaaatcacgctagaaatcattttggcctcccagtaaatttcggaaattttttggaaaaatgctgctacaaaggtttttcacacgcgcacttcactccacgcggcagctttatgccggctctggcggatccggtggcctggagaagagtgccctggcggcgctgaggaagaaaaccggatacaccttcgccaattgcaagaaggcgctggagaagcacaacaacgacgtcggattggctgaaaagtggctgcacgagcaggcccagaccctcggctggtcgaaggccaccaaggtcgcagatcgagccactgcacatggtctgattggagtgctcatccgcggaaaccggggcgccatggtcgagctgaattgcgagacggatttcgtagccaggaacgataccttcaagcggttcgttgaccacgtcgcctgcatgtgtctgcaatacacggacttgacggacttcgatggagatctgtggaagcttggctttgatgcggacgccctcagaaacttgcgcacggaggagggacgcacgttgggcgaccacctggctctgctgatcggcgccatcggggagaatgccaccatccggcgcgcattgtgctttaaggctaacaacgacctgaagctggtgggctacgcccatcccgcacccaccaatgtgggcaccacggaaggcatcacccaggtgggcaagtacggagcgatcgtagcctaccgatccacgcaccccctgctggactttgagtttcacaagagcatttgccagcaaatcgtgggcatgaagccgacaaagatcggcgaatatgacaaggacaagccggcggagaacaaggacgatgagacgtgcctgattcaccaggagtatctgctcgatgcggacaagacggtgggcgaggctttgcaggagcacaactgcgagatcgtcgactaccatcgcttcgagtgcggagagcacacggaacgcagcctggaggcgatcattcgctcgcagcaccagagcagcaattaactagccattaagcagagtctagaacactaaattgttattagcacaacagctgaagattgttaaaaccgaaattctggacaatgttctggtcaaaatttgcatgtaaaacaagtaaaacaaccattacgat

SEQ ID NO: 13812 - protein, 318 aa, DROSOPHILA
MLLQRFFTRALHSTRQLYAGSGGSGGLEKSALAALRKKTGYTFANCKKALEKHNNDVGLAEKWLHEQAQTLGWSKATKVADRATAHGLIGVLIRGNRGAMVELNCETDFVARNDTFKRFVDHVACMCLQYTDLTDFDGDLWKLGFDADALRNLRTEEGRTLGDHLALLIGAIGENATIRRALCFKANNDLKLVGYAHPAPTNVGTTEGITQVGKYGAIVAYRSTHPLLDFEFHKSICQQIVGMKPTKIGEYDKDKPAENKDDETCLIHQEYLLDADKTVGEALQEHNCEIVDYHRFECGEHTERSLEAIIRSQHQSSN

SEQ ID NO: 13813 - DNA, 4037 bp, DROSOPHILA
catttgaagagtattttatttgattttcttagattttattttggatttatttcattcacttacatttcaggtaggaacttcattttatattttctaaataaatagcaactattttttctatgttatataaaaatacttttaatgactaggtcaatgcatacgcaaccctcttatttcgaggcaaataattttattcaagctgctttaaaaggttgtcatgtgtccaaacattaagacttcattattagtgtattaaattgaatgcaaattaattgggctgaactcgtgtgcatattaattggactaaaactgaaactgaaaccgaaactgatacatatattgccaaatttgtcattttgacttttagcattttcccataacctgttggccttccgggatgtcatagagcgggtaatatttaaatagcttttagcagcgagttgcgagattattaatgtagttttccaaaaattaactgactcttaatttataggtctcctaatttgaagatgacttttagcaccttccacaatgttgtttgcttgagaaccaatttcttgtttgaaattgaattaagaacattttccagactcaactagcaatcaaaaaatgttttatatttacgtttaaatgccccttaaaatgtcatattttcgttacggagttttaaccaatgttaatatttacattgaatataatataatagtaataataagaataataatgatatagattcgtatcgaaataaaagagaacttctaaagaatttgagaaagttaagaggcaggctactggatttttgtcagtagtgattttatttcaaataaaattttaagtcaacacgaaattttgaccaagcttaatttctcaagaggttgatgtacatacccagaaacgtaaaaagtaatgtaagcgaaatgtttgataaatataagtattaaaaacatcaaaatttgtcccaaagaaacttgtcatattacatttttgtttttgtatttcgttttgttttttttttaactaaactacaatgtataaatttccaaattaattaatttattaattaaagttttttattatttaagttttttgaatttatttcttttcatttaaacttttagcggtaatctatagtcttgctaagtagcgccagagggcgcttttccggaacagctgtgactctgcttctttattgccgttcacccgcacgcgtaactgtgtccatctcgctcgcactcgcctagctcaaaacgaggcgaattttatcatttaattttattttgaccaaattacgagcgctgcgcggaaaatgttggcccacaggatgcagctttggaggacaacaaacgcggcaatggccatgacttccgcagccggccgtttcaccccacaggtgagtgaagatcattgaaaaagagccggcgacctgtgacataacctgcaagttggccaatgtttgtgttcgaaaatgtacgcaaatttcaatgaaaactctgtttgccaggcatccacgggcagcaggagagatctctacctccaaaggattaccaggggcagcagtctgcccttagcggcccccgaaaaatggtccaatctcggccagcttcgtttcgccagcggtggagcaactgcagcgggagtttcagccaccaaaggcgaggagttcatgcaggctgtgccgaaaacggaactagtggatctgccggacatacccgccgctccagtgcctccacccgccgatggtctgaatgtaatggatgtgatgaatgccgctggcgaaccctccttcgcctccattggcttgggcggctggtctccggtgggcatggtacagaactgtttggaattcttgcactgcacgtgggatattccctggtggggaaccatcgccattggaacactcgcagtgcgaaccataatctttccattggtcatcttggcccaaaggaactctgccaagatgaacaacaatatgccgcagatgcagatgctgcagctgaaaatgaccgaggccaggcagtcgggaaacgccattgagtccgctcgttatgcccaggaaatgatgctgttcatgcgggagaagggtgtcaatccgctcaagaacatggtagttcccttggcccaggcaccgctcttcattagcttcttcatgggactgcgacagatggctaacgcgccggtcgaatcaatgcgggatggcggactcttctggttcacggatctcacaatggcggatcccttctatctactgcccttaatcaccagtgccacgttgtacctgaccattgagatcggaacggattcggctcgcttatcggctgccaacatgaacaccatgaaatatgtgctcagagccctgcccattgttatcttcccgtttacgatgaacttccccgctgccattttgacctattgggcgtgcagtaactttatatcgttggggcaggttgcggtgctaaggattccctccgtgagggagtacttcaagatcgaaaagatgctgacccatgcgcccagtgcactgccacctaagaagggattcgtcggcggaatgaaggagtgtaagtaacaaggactgtcccgcttcatcttttacctctttcgatttacaacctttctgttttgacttttccagcctgggacaacatgaagatctcgaaagaaatcgaggagcgacagcgcctggacgagatccgattcgccaaggccggcaagggtccgctggtcaagacgtacaagttcgatcccacgaaagtggcaaaacccatttccgcggagccgcacatgcggctaaaggagccgccgaacaagcagggatagttcctccatcctgtaatcgccgctgagcgctgtgtcttgttacgttaatttaaccccttagtctatagtccttcatcatccgaacgttttgctgctaaaatataatttgtaaatgtacagaggcaaacttcttgctgatgaaacctgatttgagaagttggagacaaagttttggtagatgtaatcgctgtaaaaataaactcgtcatggaagatacgaatgtatataaaaacatgatcagctataaatgaaattggtgagtgttttcagttcagataagatacggtcccgaaagacaatcaaatatacaattaattgcggatagctaacgcattactataaaaaatatggaaatgctcagcaaatactattagtctcagtttaaatgccgtgcaatcaaaaaccatcaatcaatcgaagccggtgtgaattttcaagttgctgacctcgattattagcttttagttagcataggctcaggtaataaataaaagatttaatagcaattataataactagagaagtagaagcaaagcatttacatgtttttaatggcaaaccataaagattggttggatagtttaaaaaccattttggattatttatctatccaaacaagtctagtcatagacataaaaacaatgatgattcctaaccatacgtggaatgcaaacttgaaataggaaataatttagtttctctgacagacaattcgatttgagtaaaaggttattattactacttaaccagctgagaaagagtacccaataattaaatgatgtatggcgaatgtccatgttattgctacctactaataactaacaattaagataataaacattacaatgtctgaaaaattaaaatcgatccaaatttcgggaaaggaaaacaggcacaaactgcttttaaaacaaaattattattactaaaccaacatcattatatatatatttatatatatctaaaacgaggataaaatcatgtagttaacccttggcggcgatgcactggttgatcacctcggcgaggtgattgttctccagggcggcggccactcgttccttgtctgccagctgcttgttcaccgccagctcggaggcgtgggtgccgggcgttatttccacggtgaccttaaagcgaggtggcagcgagcggagcaacttcacccggatggagaggccaatcaaagtggccatcgagcaatggggaatcgtcggggt

SEQ ID NO: 13814 - DNA, 1852 bp, DROSOPHILA
ttttgttttttttttaactaaactacaatgtataaatttccaaattaattaatttattaattaaagttttttattatttaagttttttgaatttatttcttttcatttaaacttttagcggtaatctatagtcttgctaagtagcgccagagggcgcttttccggaacagctgtgactctgcttctttattgccgttcacccgcacgcgtaactgtgtccatctcgctcgcactcgcctagctcaaaacgaggcgaattttatcatttaattttattttgaccaaattacgagcgctgcgcggaaaatgttggcccacaggatgcagctttggaggacaacaaacgcggcaatggccatgacttccgcagccggccgtttcaccccacaggcatccacgggcagcaggagagatctctacctccaaaggattaccaggggcagcagtctgcccttagcggcccccgaaaaatggtccaatctcggccagcttcgtttcgccagcggtggagcaactgcagcgggagtttcagccaccaaaggcgaggagttcatgcaggctgtgccgaaaacggaactagtggatctgccggacatacccgccgctccagtgcctccacccgccgatggtctgaatgtaatggatgtgatgaatgccgctggcgaaccctccttcgcctccattggcttgggcggctggtctccggtgggcatggtacagaactgtttggaattcttgcactgcacgtgggatattccctggtggggaaccatcgccattggaacactcgcagtgcgaaccataatctttccattggtcatcttggcccaaaggaactctgccaagatgaacaacaatatgccgcagatgcagatgctgcagctgaaaatgaccgaggccaggcagtcgggaaacgccattgagtccgctcgttatgcccaggaaatgatgctgttcatgcgggagaagggtgtcaatccgctcaagaacatggtagttcccttggcccaggcaccgctcttcattagcttcttcatgggactgcgacagatggctaacgcgccggtcgaatcaatgcgggatggcggactcttctggttcacggatctcacaatggcggatcccttctatctactgcccttaatcaccagtgccacgttgtacctgaccattgagatcggaacggattcggctcgcttatcggctgccaacatgaacaccatgaaatatgtgctcagagccctgcccattgttatcttcccgtttacgatgaacttccccgctgccattttgacctattgggcgtgcagtaactttatatcgttggggcaggttgcggtgctaaggattccctccgtgagggagtacttcaagatcgaaaagatgctgacccatgcgcccagtgcactgccacctaagaagggattcgtcggcggaatgaaggagtcctgggacaacatgaagatctcgaaagaaatcgaggagcgacagcgcctggacgagatccgattcgccaaggccggcaagggtccgctggtcaagacgtacaagttcgatcccacgaaagtggcaaaacccatttccgcggagccgcacatgcggctaaaggagccgccgaacaagcagggatagttcctccatcctgtaatcgccgctgagcgctgtgtcttgttacgttaatttaaccccttagtctatagtccttcatcatccgaacgttttgctgctaaaatataatttgtaaatgtacagaggcaaacttcttgctgatgaaacctgatttgagaagttggagacaaagttttggtagatgtaatcgctgtaaaaataaactcgtcatggaagatacgaa

SEQ ID NO: 13815 - protein, 426 aa, DROSOPHILA
MAMTSAAGRFTPQASTGSRRDLYLQRITRGSSLPLAAPEKWSNLGQLRFASGGATAAGVSATKGEEFMQAVPKTELVDLPDIPAAPVPPPADGLNVMDVMNAAGEPSFASIGLGGWSPVGMVQNCLEFLHCTWDIPWWGTIAIGTLAVRTIIFPLVILAQRNSAKMNNNMPQMQMLQLKMTEARQSGNAIESARYAQEMMLFMREKGVNPLKNMVVPLAQAPLFISFFMGLRQMANAPVESMRDGGLFWFTDLTMADPFYLLPLITSATLYLTIEIGTDSARLSAANMNTMKYVLRALPIVIFPFTMNFPAAILTYWACSNFISLGQVAVLRIPSVREYFKIEKMLTHAPSALPPKKGFVGGMKESWDNMKISKEIEERQRLDEIRFAKAGKGPLVKTYKFDPTKVAKPISAEPHMRLKEPPNKQG

SEQ ID NO: 13816 - DNA, 3192 bp, DROSOPHILA
acatagagatcacaaatcatgaccaggagggaacctggtagccctccccagtaatcaaaatagagcaagcgctaacgaaatcttaaaacgcatacattctgacaatgaaaatattacttaaagcatcaattttttttttcgacaagaatctagtttgtagtctatatagagctatatagtatatatatatatgcttgtatgtataactgatcgtgggacttgagtcaaagttgcgtccaagtttttggtgcgcgaattgtttgcgcgttattttgcaaatatctaagagagacgaatggatggatggttttatatgttgaccacggcgagatggcgatttaaagacggaacaataaagagttaatttattgtagcacgtaacgtacatgtagcgtatctaaaataataataaagaaatatgtgtatgtatctaagctaaaagtttcattgtacaatgtatatgaatgtaataatgcgcgacaagcttcaattgtcttccaagtatagtgcatattgtatgtagagctgtacgtttaatgaataaaagtttcttacgttaatttaacagtttttagctccttttggcgggacttcgtttttgtttttccacaactggggtattcaagttttgttaataagcttatcaagtcgtgtgagagaaatttttgactttattaaaactaaacagaattgtagtcttcatttcactctgccatttgttctcgtttcgttaattccgaaatattttgaaattgttgtttctgatagttaatattccacctattggtccacctattatgccaatgtggtgttatgtgatctggtagaaatatgcttattgtttaatattttggataagcttcattagatttgttcctacatttaaaaatcgatttctaatttagccgttttttttaaatggccagagccagagttgccaccctgcagtccagcggcgttttccacactagacgtctgcatcgatagtatcgcataagctcaccgatttccgatagacccgtatatatgtacgtgcacaatttcaatggaataaacaatcttcttgcagcaaagccgacgtaaacataataactatagaagtatgagcgcagagaagtccgataaggccaagatcagtgcccaaatcaagcacgtgccgaaggacgcgcaggtgatcatgtccatcctgaaggagctgaatgtccaggagtacgagccgcgcgtggtcaaccaactgctggagttcaccttccgtaagcggcgattaatgccttgcttttcccacatcattttcctaaatgctgtcttgcattgcaggctatgtaacctgcattctggacgacgccaaggtgtacgccaaccatgcgcgcaagaagaccatcgacttggacgacgtgcgtctggccaccgaggttacgctggacaagagcttcaccgggccgttggagcgccacgttctagccaaggtggccgacgtgcgcaacagcatgcccctgccacccattaagccgcactgcggtctccgactgccgcccgaccgctactgtctcaccggcgtcaactacaaactgcgggccactaatcagcccaagaaaatgaccaagtcggcggtggagggccgtccactgaagaccgtcgttaagcccgtctccagcgccaatggtccgaagaggccacactccgtggtggccaagcagcaggtggtgaccattcccaagcccgtcatcaagtttaccaccactacgacaacgaaaacggtgggcagctccggcggatctgggggcggcggtggtcaggaggttaagagcgagagcaccggcgccggcggagatctcaagatggaggtggacagcgatgcggcggccgtgggcagcatcgctggcgcatccggttcgggagcaggaagtgccagcggaggaggaggaggaggaggatcatctggcgttggagtggccgtcaagcgggaacgtgaggaggaggagtttgagtttgtgaccaactagcgaaacgacatcatttaccttaaattaatattcttaaaccagaccaaagcacttgcatttggttgagcgaactgggggtctaaatttcaactcgaatgtgaagtcccaaaaaccttagtatagattcgcccgttaatcattatgaaatctacgttttatacacaaatacaactaccagattttcatattaaatataacatttattttagactccagtcgcggataaagtacatgtaatgaatgtgctgagtgggatgagattactttaaagctaagatgatgcagcagccaaggtccatgatctgcagatactcggagccgccgtcctgcagtcgaaagcagcattcctgtgggataaaggcagcaataaacaagaggaatcatatctatctatgcagtcagtacgtacgcccagcttatcgcagatcgtggccttttgcggatcattcagccccggatgatggacaatgaactcgacgaactgttccatcatttggccaacgctgtaggcggagaagccaatctcccgcacgaactgctccaggcgctcgtagttcccagagcgacagacctccaggtaatcctccagatagtactccggtataacgcccgacatctcgaacagatcagcagtgttgatgatgtgctcgggccctttaaggcggtagcaggactgcaaggtggtgatagcgcgtcgcagatctccgccggaaattttgacaatggatttataggcatcgtcctctatctttactccctccatctcgcaaatgtacttcaaacgatcgatcaccttgtcttcgcccagcgccttgaagcgaaatttagagcaacgcgacgtgattggcacgataattcgggacacatagttgcagatcaggcaaaaacgggtgctccggctctccttctccatggtgcgacgcagcgcagactgtgcggcatgggtcatcgaatcggcctcgtccagaatgatgatcttgaagggcggacacggcttaccgtccggacgcacactgctggccgacagctgcgagaagtttttgatcttggtgcgcaccacattgatgccacgctcgtcggaggcgttcagctcgaggatgcggtccttgaacatgtcgccgaagatctgtcggctggcagccaggatcgtgctggtcttgcccgtgccgggcggtccgtagagcagcat

SEQ ID NO: 13817 - DNA, 1128 bp, DROSOPHILA
caccgatttccgatagacccgtatatatgtacgtgcacaatttcaatggaataaacaatcttcttgcagcaaagccgacgtaaacataataactatagaagtatgagcgcagagaagtccgataaggccaagatcagtgcccaaatcaagcacgtgccgaaggacgcgcaggtgatcatgtccatcctgaaggagctgaatgtccaggagtacgagccgcgcgtggtcaaccaactgctggagttcaccttccgctatgtaacctgcattctggacgacgccaaggtgtacgccaaccatgcgcgcaagaagaccatcgacttggacgacgtgcgtctggccaccgaggttacgctggacaagagcttcaccgggccgttggagcgccacgttctagccaaggtggccgacgtgcgcaacagcatgcccctgccacccattaagccgcactgcggtctccgactgccgcccgaccgctactgtctcaccggcgtcaactacaaactgcgggccactaatcagcccaagaaaatgaccaagtcggcggtggagggccgtccactgaagaccgtcgttaagcccgtctccagcgccaatggtccgaagaggccacactccgtggtggccaagcagcaggtggtgaccattcccaagcccgtcatcaagtttaccaccactacgacaacgaaaacggtgggcagctccggcggatctgggggcggcggtggtcaggaggttaagagcgagagcaccggcgccggcggagatctcaagatggaggtggacagcgatgcggcggccgtgggcagcatcgctggcgcatccggttcgggagcaggaagtgccagcggaggaggaggaggaggaggatcatctggcgttggagtggccgtcaagcgggaacgtgaggaggaggagtttgagtttgtgaccaactagcgaaacgacatcatttaccttaaattaatattcttaaaccagaccaaagcacttgcatttggttgagcgaactgggggtctaaatttcaactcgaatgtgaagtcccaaaaaccttagtatagattcgcccgttaatcattatgaaatctacgttttatacacaaatacaactaccagattttcatatt

SEQ ID NO: 13818 - protein, 278 aa, DROSOPHILA
MSAEKSDKAKISAQIKHVPKDAQVIMSILKELNVQEYEPRVVNQLLEFTFRYVTCILDDAKVYANHARKKTIDLDDVRLATEVTLDKSFTGPLERHVLAKVADVRNSMPLPPIKPHCGLRLPPDRYCLTGVNYKLRATNQPKKMTKSAVEGRPLKTVVKPVSSANGPKRPHSVVAKQQVVTIPKPVIKFTTTTTTKTVGSSGGSGGGGGQEVKSESTGAGGDLKMEVDSDAAAVGSIAGASGSGAGSASGGGGGGGSSGVGVAVKREREEEEFEFVTN

SEQ ID NO: 13819 - DNA, 2702 bp, DROSOPHILA
aatggtgctgctgcggcacagcattgtcgtccgcatccacacactgggccctctttctgcattcgccatcattgtacggtttttgcccgcaacggccaaagacaaataatgcaatttcctgactaactcattttgggtggttgagcagcaggattgggacggcccattccacactccatccgtactccatcctggctgtagttccgtgtcactgacacttggccctcgccgcctccctgccttcccactcagacatttattacctagtcggggatgtgcaatcgctgcgagtgatcaaaggactgggagttctcatgctggaaatgtaagagcaaggaacagaaactggtggatggatcacttggaaacccactagatctgcttccagctgccttgttccacgtgactccctttggggcatctgacgcaatcattggcaacttttggtttcatgttgcaccacttcgcacacaccaacagcataagattaatgcggttcggcatcgaactttaaactcatttttagcccgacgagctgaactgccaccaaggacctctcgccagacgaacatgtgttcggcatcggaaaaccaggagcatgtcctgcagttgttccttgctccatgctccttgtcctttcgctggcccctgtaatttgtcccccatccggcgttgtttgttttgcgcaaaagtttgcggcgacaattgttttgcactgcggcagcagccagcacacaaactcacaaaactcacaatcccaatttcgcacatgcgattggaattttcttgaaaatgttttcccaacgcccggccattttgctcttttgcgaggggcaagtcaggatttatggcataacgaattgtgtatgttagttctcggaaatgtcgcagcagttcaatttgttggcttcaatatgtgtcagcgcttatcatatctggcccactcgaccaccgctcatatatcaattattttccaatcaatttaaagttaataacatttcaattcggacacttttaatcgcggcaagtggatggcgatggatgaactataattaaaacgccacacatcacatcatcagtcgtcgacgcagttacgcaacgaacgccactcggaccacgcgaagcatcccagatagccatcctgggagacgaacgccttgccatcgggacacgacaggagcgtggctccctcgctggtgcacagatagaagctggccacatcgtcggcggcctggggctgcaacttgctggttccggtgcagtcgggcaccttggtgtcgaggttcacacaggagggcttcatcaggtcggagggcaggcagccgctgatggtggcgttgttcacgaaatagtatcccgagtcgcattcgtcggctatcaccttgccgtccaggcagaagtagaacttcctgatatcctcgccgccccatagctcgtcctgcgactggcaaacttcgctggcatcgctggcggtgcccacggaggcggcatagcccagagccaggatgccaaagaaaatgatgagtgctgcagggagaataggcaagtgataaatagtatgcgtgattaagattatcaaactcatagttccaggaaatgtgataatattctagaaattcactttatcgaacgcactatagttgagtagattattcctaaggatgtttacctttcagcatggtgattcctttatcagcttcttctcgattcaaaaatttaacgcagactaaacgaatggaaggccactgattggacttttataacattcaacgagtatccgatcgggcaacttatcgggactttcgagagcggtaccatatcattgccattgccattgacttgttgacacttccgatgatgaacgtagtgcgcgggctgttttggcttctggtcttggccacatcgcttatcgggtgtttttcttatgcagataatggcaaattcttggcttaatttgctgttctgcctgtggcagataccacgtctcaagtggttggcgatgagcagttccacgaaccgaagtaacattgatttcggagtgccatggtgccaaatgttcgcttctcactgtcacctgctgctcacgtctgggaaacttttaattgaattccctgccggttgaagccaacatcgatagcaagcctattggaatttatgtcgattatattgtcaactttggcagaactccacgaagtttgcctatttaaacttggggctcgcgtaaatagagtgcaaaaagtggagaagcgagtaagtaaggaagttgaattgacaacgtgactcaacaacaaaaacggctaagaagtttttctttttcccttttttttttttgtttcagcaggttatgggctggcttcgtgtcctggccgcaaagtgacttctttccaggcagcgccagctgtgctcctccatttgggcgctctaagccaaatcaattagaacttttgacggcagctgggcctgcaactgaatactcatacaactgaagccattcgaaaatgctccattatctcggcagtggagcgtaattaaatttcgaactgatttctgcagtaataatttccaatttggcttcatttaaaaggcaattaatgtctctactctgctatcgcttagataagcgatgtgcatgtgtgtgtgtcagctcgttttcggtagtcgaaaatcgtaatggcactctgattcattcggcccagttagca

SEQ ID NO: 13820 - DNA, 560 bp, DROSOPHILA
aagaagctgataaaggaatcaccatgctgaaagcactcatcattttctttggcatcctggctctgggctatgccgcctccgtgggcaccgccagcgatgccagcgaagtttgccagtcgcaggacgagctatggggcggcgaggatatcaggaagttctacttctgcctggacggcaaggtgatagccgacgaatgcgactcgggatactatttcgtgaacaacgccaccatcagcggctgcctgccctccgacctgatgaagccctcctgtgtgaacctcgacaccaaggtgcccgactgcaccggaaccagcaagttgcagccccaggccgccgacgatgtggccagcttctatctgtgcaccagcgagggagccacgctcctgtcgtgtcccgatggcaaggcgttcgtctcccaggatggctatctgggatgcttcgcgtggtccgagtggcgttcgttgcgtaactgcgtcgacgactgatgatgtgatgtgtggcgttttaattatagttcatccatcgccatccacttgccgcgattaaaagtgtccgaattg

SEQ ID NO: 13821 - protein, 153 aa, DROSOPHILA
MLKALIIFFGILALGYAASVGTASDASEVCQSQDELWGGEDIRKFYFCLDGKVIADECDSGYYFVNNATISGCLPSDLMKPSCVNLDTKVPDCTGTSKLQPQAADDVASFYLCTSEGATLLSCPDGKAFVSQDGYLGCFAWSEWRSLRNCVDD

SEQ ID NO: 13822 - DNA, 3631 bp, DROSOPHILA
cccgacataaaggcattgagaggagtctgcaggtttacgatctggtatttggcatcgaattccgttcgcaacagtcgcgatattttgctgggttccgagtccgttttgccttcgtcctcgggcagttcgccttccgaggaagggtccttcgataaggattccatcttttctttttttttgtctgtgatttttgtgcgtttactggtgcattttagcagaatttacctgattttgactgatttttcaaagctgcaatctgtttagtgttgcctaacgcacgtcacactgcgattatgcgcaggactgtttgtgaatttgatttgttaagtttatgcgcgagtgtgaattttttcattctgacttatttttaaaattatagtttaacagataaaactcctcatgaaaaatattcagttgcttaagaaaatgcaatttaccacattcttgtttatttatttttcatttttattaatatgctaaaatttttcaagaaattatatttagttggttgagaatagatgggtttttttttcttttatttaacgaaaaggttgaagtatatttctaaaaaatttaatgaataatacaggacgttagtgtcgtggttatcaattatatgtttaagttgtttcagcttatggttttataagcatcgctatttgaatacaagcaatatattgttttaaaattttaaacaataatagttttaataaatacatatgaatgtgaaaattaaaagaaaaaatgcaaatacgttgttacgtagttaataacgtaaacatatttttttttttagatatatgcatgttattagatattttacatattttttacataagtagtattgaaaaatcataagtatcggtaatcagctgtcttacgaacagtgctggaaattgggaaagcgtgatggcttttttatcccctttttgcttccgcatctgattcatagcgctgccaacactgcccctttattgcagttttatttggcaaacgaacgcgacgcgaggtctgcaaaatgtttaaagcgcgaggaacggccaaccagtgagtgcacctcgattgatctgttcgatccgatctggtctcgcaatcgggcagcgctaaaccgcagggcaaccgcagcaaatgccatcgtgaatagaaacgcccacccgcacagacacacgaacggggatttggatttgagtttggactcggagtcaccacacacgcacacactcgcgcggacccttggagcaccacccgcacacacaaacacacaccgcacaccccgccagccacacacacacacgcacacccgcaacgatgtcacacctaccattgccgctttatggcttcgcggcattcttcatggttttctggctgggcacctggatggtgcatgtgatagccatctgctacgggcgctacaagctgcacaagaagtcctgcaagctgcccacggaggcacaacccctgccaggtgtctctattctcaagcccctcatgggcgtcgatcccaacctgcagcacaacctggagacctttttcaccatggactatccgctgtacgagctcctcttctgcgtcgaggacaaggaggacccggccatacagctggtggagcgactgctggccaagtatccgctggtggacgccgccctctttgtaggtggctccgacgtgggtgtcaaccccaagatcaataacatccatccaggttatatggccgccaagtacgactttgtgatgatctcagacagcggcatcaagatgaaagacgacacgctgctggacatggtgcagaacatgtccgagaagcacgccctggtccatcagatgccattcacttgcgaccgggacggatttgcggccaccttcgagaaggtcttcttcggcacggtgcagagcagaatctatctatcggccgatgtgctgggcatcaattgccacacgggcatgtcttgtctgctgcgcaaggctgtcatagaccagctgggcggcttgcgagcatttggctgctacttggctgaggatttcttcatcgcgcgcagtgtaacgcgactgggctggaagatgcgcatctccaatcagccggcgctgcagaacagtggtctctgcgacatcggaagcttccaggcgcggctcattcgatgggccaagctgcgcgtggccatggtccccaccaccatactgctggagccgctctccgagtgcatgatccttggcgccatagccgcctggtcggcatccgtgctgttcagctgggatccgctggtgttctacctggtgcacgtgctctgttggttcctgtccgactggctgctgctctccattgtccagcatggctcgatgccgttccacaagttcgagttcgtcgttggctggctgttcagagagctgaccggaccctatctgttcctgcacgcactctggaatccggccatccgctggcgcgcccgcacctacaagcttcactggggcggagtggcctacgaactgaacagcctcgccagcgatgctgccaacgacccgctggcgccgcagccacagcccgcacccacgttagagcctgcggtagtcaacgctggaacaacgggggacacgctgatctgcacgggcgccaaacagcgactgctggtgtcgtagcacctaatagttaagtttgttattttgtacttgtgagcaaacgaactcagcggactgcaagcgactggcgggcggcgtctagcgtctggtagtagtattattagctgaaccttagtcactacgtaagtctagacttaaagctgtaaaaaggcgaatgcggagcggcatccacgcactcctcctggacgtgaagcgcggcaggcggacctagattagtttagaagacactgtttagacgacgagcgtatcgctgcgatcgctcgccagagatttagatgtaggcgttcgagtagatcgacccgggcgcattttggtggcttcatggaaactggttaatgatgatgctttgtgtatatatatatagcgtacatattttgtagccagcctgtacagagacgtaagccctagttagcattatgattgcgatagttagttctccccgcttctgttgttgctttattgagttgtaattatttattttggccaagcacactaggtatactgttatcgctaagcctatacttatgattatttttagttaagttgtttgtgttgttttttgtttgccccagctgctgtacataggcgccaaaagggaatgccattgaataaatcaaatcaaatcgaatcgaatcgaatcgaaacgatcgtgagaatgaaaacccattaggttctgattgatgtttatttacagtatcgtttctcatagatcccccctcttatcagttagctgactcaggggccttttggccaaataggtgagaaacgtttggctgagtcacaccatcgaccatagtcggtttcagcgtaattatcaccgcactcacttgactcgaccctacgctcctaatgcgggcttggcggcgattgcgcccctgtttgtgtctaagttatgtgggaggtgatgggtcaggctggtggcgaccattatagcgtactctagatgctgctcgtagaaccttccagtcaaatgatcgcatgggattggtgtgggggaaaa

SEQ ID NO: 13823 - DNA, 1631 bp, DROSOPHILA
cgacgcgaggtctgcaaaatgtttaaagcgcgaggaacggccaaccagtgagtgcacctcgattgatctgttcgatccgatctggtctcgcaatcgggcagcgctaaaccgcagggcaaccgcagcaaatgccatcgtgaatagaaacgcccacccgcacagacacacgaacggggatttggatttgagtttggactcggagtcaccacacacgcacacactcgcgcggacccttggagcaccacccgcacacacaaacacacaccgcacaccccgccagccacacacacacacgcacacccgcaacgatgtcacacctaccattgccgctttatggcttcgcggcattcttcatggttttctggctgggcacctggatggtgcatgtgatagccatctgctacgggcgctacaagctgcacaagaagtcctgcaagctgcccacggaggcacaacccctgccaggtgtctctattctcaagcccctcatgggcgtcgatcccaacctgcagcacaacctggagacctttttcaccatggactatccgctgtacgagctcctcttctgcgtcgaggacaaggaggacccggccatacagctggtggagcgactgctggccaagtatccgctggtggacgccgccctctttgtaggtggctccgacgtgggtgtcaaccccaagatcaataacatccatccaggttatatggccgccaagtacgactttgtgatgatctcagacagcggcatcaagatgaaagacgacacgctgctggacatggtgcagaacatgtccgagaagcacgccctggtccatcagatgccattcacttgcgaccgggacggatttgcggccaccttcgagaaggtcttcttcggcacggtgcagagcagaatctatctatcggccgatgtgctgggcatcaattgccacacgggcatgtcttgtctgctgcgcaaggctgtcatagaccagctgggcggcttgcgagcatttggctgctacttggctgaggatttcttcatcgcgcgcagtgtaacgcgactgggctggaagatgcgcatctccaatcagccggcgctgcagaacagtggtctctgcgacatcggaagcttccaggcgcggctcattcgatgggccaagctgcgcgtggccatggtccccaccaccatactgctggagccgctctccgagtgcatgatccttggcgccatagccgcctggtcggcatccgtgctgttcagctgggatccgctggtgttctacctggtgcacgtgctctgttggttcctgtccgactggctgctgctctccattgtccagcatggctcgatgccgttccacaagttcgagttcgtcgttggctggctgttcagagagctgaccggaccctatctgttcctgcacgcactctggaatccggccatccgctggcgcgcccgcacctacaagcttcactggggcggagtggcctacgaactgaacagcctcgccagcgatgctgccaacgacccgctggcgccgcagccacagcccgcacccacgttagagcctgcggtagtcaacgctggaacaacgggggacacgctgatctgcacgggcgccaaacagcgactgctggtgtcgtag

SEQ ID NO: 13824 - protein, 440 aa, DROSOPHILA
MSHLPLPLYGFAAFFMVFWLGTWMVHVIAICYGRYKLHKKSCKLPTEAQPLPGVSILKPLMGVDPNLQHNLETFFTMDYPLYELLFCVEDKEDPAIQLVERLLAKYPLVDAALFVGGSDVGVNPKINNIHPGYMAAKYDFVMISDSGIKMKDDTLLDMVQNMSEKHALVHQMPFTCDRDGFAATFEKVFFGTVQSRIYLSADVLGINCHTGMSCLLRKAVIDQLGGLRAFGCYLAEDFFIARSVTRLGWKMRISNQPALQNSGLCDIGSFQARLIRWAKLRVAMVPTTILLEPLSECMILGAIAAWSASVLFSWDPLVFYLVHVLCWFLSDWLLLSIVQHGSMPFHKFEFVVGWLFRELTGPYLFLHALWNPAIRWRARTYKLHWGGVAYELNSLASDAANDPLAPQPQPAPTLEPAVVNAGTTGDTLICTGAKQRLLVS

SEQ ID NO: 13825 - DNA, 3935 bp, DROSOPHILA
cctatctctcctacacaactgccagcagtctctgctcctcctgcggatcagaacagctctacagagcccgtaatgtgtccatatagatgtaatgagttggtggaaacgctttacaattgggaggatgttgcccttcgcacagtaaaggtgtacgatcgcgttttaaatgaacgctctttcaccactagcgagctggtgtttgcggtgtggcagcacggatcctggtttctggtgttcttcgttgtggcccacttcttaatgcgcttgctggagctttggcgtcctcggaaacacgtagagatagcgcaggatgtacaacgtagggccagctagcaaacaccaaacggattccattcttccatcaactagccaattatatatttatgcgatagattttataacccttgttgtgtttatttgttgtccatagtagtagtcgaagtgatagttcccttaaacaatatgataatccattcttatgataaaattaacccaaacggcgctgctgatctacgccgataaaatattccgcccacagcaacgtttttataaagaagactgtttcttatattcatttcattctagaatcatagattctaggaagctaagctttaacaatttaaagtgtgcgataatgatttaaagagtcgctagtcgattcttcaatttaaaatctatatttattaaaaatatagttattttatgtatatctatgctcaatagaaattaactttttttttttaaagaacccaaaggaaataaataatctagagaattttctgatcatgtccgagttaaatttaataaattaaaacaggttgcataaatcaaatttctttcagtaatatggcacaatcctgcaataaaatgtattacaaaaatgaaatatataataaaaatacaaaatatttctatttaaaaaaaaaatcaaataatataccgaaaactttaaaaatacggtcctccgaagaacggattatctggccatactgcgatgcagccctggcttatttgggaaaaaattaagagggagcagcagcggaggctagtgataaattaattagccactgctaccacataacccagggtgcggaaacctgaacccagctctgcggcatatccactaccattgctagcaccccggttgccatccaggtcaaggtgagcacaactgtgaagtccgacattgactgtgaatttcctattgcacttttcagattctgttaccagctcagggtaacgacgatggcggaactggtgagggactggctggcggactaccagcgcatacggggtcagccctcggaggcggaagcgttcgtggtggagcacgaaacagatcccgagatcgccgaagccatattcaccatcttcaacgagcgacagcggaacgaaacgctggttcacgacatctgccagcagctactggccttctaccgctcgccggagcagacgctgcacaagttcccgctgcagttcatcccagtgcttctctacacgtacctccactcggtggccggcggcgataagaaggctgcgcgcggcgtggagacgctgctcatctgcatttacaatggcgaggtgtccaccgaagacggcggccagaaggtggtggcctttcgcatgcccatcctggcccagacgtccgtttaccacgaggtaaagaacctgcccatgacggatctgcgccgttgggaggagaactgcaaccgggaggtgaagtggggtccacaccagcgcatcgaatcgattcatgcccagaaccgaatgcgtattcttactgctttgctgttctgctacaaccagcaggtcagccaaacgcagaagtcttcgctactgcacttgtgccgggtcacatcgcagttggtgaaccaaggattcaccacgaagtcgggtcatggccatcgaatgagttatgggtaaagtaaactacatagtcggcttgcaattataataaatttctaaaaattccagatctgatcctgcaaccggagtaccttttcccaagccctcttcaccgcgcattccactgtccgccgccttcctgatcgagctggtgcacgccatctatttcgccatgtttaatggcttcggcacgatagccattcagacactggacgacatccacaaccgggccatctacgagatgtactcggaagtgatcctggtgaccagcgcagtgcgaaattcgctgcacgccaatccttccggacagcccaacgacggtcccatgggcttgagtgtggccttaacgccgtccacaacaacggtgaccacatcggtgtccaagtctatgatcacgaacgcatccttccgtacgaaaaaactgcccgacgacatacccatccaggtacaggacctcacaatacagcaggctccgcagcagctggccagcgtcactgaggagacggaaccgggcaccaaggaatcgccctcaacgaaggagagttccggtacgcgcacttccatcatgcggcccagcatggagggcatcaaggcacaggcacacaaggcgctcattgcgggcttcaagaaatctaaggacaaggagaaagagaaggacaaggagccaccgaagccaccgcagcgcaagttcgacaagcacacgcagcgcaactcactgctccagctgcaggcggaacccagctcgaattccagcgcggaacagccacccaccggcgaagtgttgcccctgcagacgctctcgctgatcaacgagaacggcagcaacagtttcagcgtggacagcgacctcaacgacggcgtgctgggcgtaagtgccaacacatccctgcccccgctgagcagcaccaccaactcggtgaccagtagcgacctgatcaccaagagcttcgactccagcattgaactggcgccgatagggcacagcagcagcaatggcggcaagttggccgagcacggcttggcggagtagtgcaatcaatcgtctcgttccaaaggcgattagccaaatccaagtatcaagtatataaatttacaactacaactggggtgagtgggttttgtatgaatgcaataatagatgtaggcattgtgcaggcatttttttttttgtaatacaaggataattctagggcatttcgtttgcaattttgatcaagttataccaatatatataatttatcattattaccagtttgtcaatatataaagtaatgtttctggttagatgcaattatagcccctgcattttggtcggaccctatattgtgaatacttagaattatccaaagatttcatgccgacacaatggcatcatgaccgcgagattcactcaccctaaattatgtgtacattcgccacctaccgctgtgtattagccgaatagaaccgtggctcgaaatttgaatttatggcataagcatcgtttgagtttgttgactttgatgggttttcttagttgttcgtatgtattatcgtattccaaatccaattgttggttagattaagtgttgctaggacgtcacaagaattatatatacaaaatgtatacacacacggaaccctcggtagagatcgtttgcaaatgcttcagtcagagggagactatgttccattttcggggaacagaacgtacccatcccggtgcatttcacttgttttaggtaagcagcatgatgctcacacattcgatatctactcgacgacattcagtgagagttgggtccaggcaatttcaactgaattctacaggaaaccttttagttctgtcacttattagcatatacatgtgtaaactaatatatacatacaaatatttattgaacgttgacttgaaccatgttattgatttaaaataaatacaaaaactaaatacgtaacaatggtcatgattattaacctctggtcacaggtttttcctcctaaacttgccttgcagaaaaatgcgcggcacatccacgccttccttaaga

SEQ ID NO: 13826 - DNA, 1818 bp, DROSOPHILA
ccctggcttatttgggaaaaaattaagagggagcagcagcggaggctagtgataaattaattagccactgctaccacataacccagggtgcggaaacctgaacccagctctgcggcatatccactaccattgctagcaccccggttgccatccagattctgttaccagctcagggtaacgacgatggcggaactggtgagggactggctggcggactaccagcgcatacggggtcagccctcggaggcggaagcgttcgtggtggagcacgaaacagatcccgagatcgccgaagccatattcaccatcttcaacgagcgacagcggaacgaaacgctggttcacgacatctgccagcagctactggccttctaccgctcgccggagcagacgctgcacaagttcccgctgcagttcatcccagtgcttctctacacgtacctccactcggtggccggcggcgataagaaggctgcgcgcggcgtggagacgctgctcatctgcatttacaatggcgaggtgtccaccgaagacggcggccagaaggtggtggcctttcgcatgcccatcctggcccagacgtccgtttaccacgaggtaaagaacctgcccatgacggatctgcgccgttgggaggagaactgcaaccgggaggtgaagtggggtccacaccagcgcatcgaatcgattcatgcccagaaccgaatgcgtattcttactgctttgctgttctgctacaaccagcaggtcagccaaacgcagaagtcttcgctactgcacttgtgccgggtcacatcgcagttggtgaaccaaggattcaccacgaagtcgggtcatggccatcgaatgagttatggatctgatcctgcaaccggagtaccttttcccaagccctcttcaccgcgcattccactgtccgccgccttcctgatcgagctggtgcacgccatctatttcgccatgtttaatggcttcggcacgatagccattcagacactggacgacatccacaaccgggccatctacgagatgtactcggaagtgatcctggtgaccagcgcagtgcgaaattcgctgcacgccaatccttccggacagcccaacgacggtcccatgggcttgagtgtggccttaacgccgtccacaacaacggtgaccacatcggtgtccaagtctatgatcacgaacgcatccttccgtacgaaaaaactgcccgacgacatacccatccaggtacaggacctcacaatacagcaggctccgcagcagctggccagcgtcactgaggagacggaaccgggcaccaaggaatcgccctcaacgaaggagagttccggtacgcgcacttccatcatgcggcccagcatggagggcatcaaggcacaggcacacaaggcgctcattgcgggcttcaagaaatctaaggacaaggagaaagagaaggacaaggagccaccgaagccaccgcagcgcaagttcgacaagcacacgcagcgcaactcactgctccagctgcaggcggaacccagctcgaattccagcgcggaacagccacccaccggcgaagtgttgcccctgcagacgctctcgctgatcaacgagaacggcagcaacagtttcagcgtggacagcgacctcaacgacggcgtgctgggcgtaagtgccaacacatccctgcccccgctgagcagcaccaccaactcggtgaccagtagcgacctgatcaccaagagcttcgactccagcattgaactggcgccgatagggcacagcagcagcaatggcggcaagttggccgagcacggcttggcggagtag

SEQ ID NO: 13827 - protein, 544 aa, DROSOPHILA
MAELVRDWLADYQRIRGQPSEAEAFVVEHETDPEIAEAIFTIFNERQRNETLVHDICQQLLAFYRSPEQTLHKFPLQFIPVLLYTYLHSVAGGDKKAARGVETLLICIYNGEVSTEDGGQKVVAFRMPILAQTSVYHEVKNLPMTDLRRWEENCNREVKWGPHQRIESIHAQNRMRILTALLFCYNQQVSQTQKSSLLHLCRVTSQLVNQGFTTKSGHGHRMSYGSDPATGVPFPKPSSPRIPLSAAFLIELVHAIYFAMFNGFGTIAIQTLDDIHNRAIYEMYSEVILVTSAVRNSLHANPSGQPNDGPMGLSVALTPSTTTVTTSVSKSMITNASFRTKKLPDDIPIQVQDLTIQQAPQQLASVTEETEPGTKESPSTKESSGTRTSIMRPSMEGIKAQAHKALIAGFKKSKDKEKEKDKEPPKPPQRKFDKHTQRNSLLQLQAEPSSNSSAEQPPTGEVLPLQTLSLINENGSNSFSVDSDLNDGVLGVSANTSLPPLSSTTNSVTSSDLITKSFDSSIELAPIGHSSSNGGKLAEHGLAE

SEQ ID NO: 13828 - DNA, 5347 bp, DROSOPHILA
gcagctggtcctgctccacctggacacaggtgcaggtgctctggtgggtgtcgtgatgaacggttttgacttttaggaaagccaactgccccacgtgtagcttctgagctggcttctcgcatggcacgaatgcctgaagtccttgtactcccgactcgatgacatagccgtgctccagagcctccgccacggcgccagagaagatgaaacccttcttaatgctcttgtgatgcagattaccgtgcacatcggccggcttgagggaaaggagcaggctaacccgaccggtgtccagcttttctgttttgatggccttgccgtagacgatgcggcccaactggaagagctcggtaaggtcgtggtactcgctggtgtctccggacatggccgccttggccacacgggtgtaggcgtcggatatatccgccaccaaggtgcgggcgaacatccgaccgggcaaagcgatctgcagtgcggtggctgtcaactccttgaccactcccatgaccagcatgtcctcctgcagcgtgtccatattgagcgtttccgcggagaaggcctccagttggccattttgttcctcggtttcgtagctcagaaggttctcttttactttcggcgccttcttcaccttcttctgcgaggcaccgaaaacctgtgggacagaaaagtatgtacaaagatctcggatatttcgctggctaaactcacgatattcaggctcacgtcgtcggttttgacttcgctgtggattgtcccgcctcggggaaagcttttctcgttcggcaccatccgggagctgtgtaatttagcgttttaaataacaaaatttgagcaacgtgcgttctacacgtgctaagcgccgatatagaaaatcagttcaataaatggtactaaattataccttaagatacggggcagtccgtagactcaaaccactgtgaccattgcggctgcagtgtgaacaggccttaggcagataataccgcagtcgaatcatgcacgggcctccctattccggcacacatgtgaaggtgtaacaattcgaacgcggttcaacaaaatgcaaactttacgcgaatttacgcgtaaaaccaagcgcggcaacattctgaagattgtacgggagcactatctgcgcgacgacatcggctgcggctccgagctgtgccgggagtgtttccaaaacgaggtataccagctcacctcgcagcacgcgaataagagcaccctcttcaaattcccgcactatctcgttttggacacaaatgtggttctggaccagatcgacgtgctggaggaggatgttttgcgcaacgtagtcgttctgaccaccgtgctcaacgaggtgaagcacaggagctccgccatttacaagcgattcaatgagatcgtccacgaccgcaccaggaacttctatgtgttcgtcaacgagcaccacaagtgggttaatggattttcttgggaaacctttataatatagtgcttcttctagggaaacctatgctgatcgcgaaccagatgagaccgccaatgatcgcaatgatcgggccattcgtctggccaccaagtggtacgatgatcacctgcaggcctcgcaatcctctaaagagttcgagcgcagtggcaaagctgctacgcgagttgttctgctcacagatgatgctgccaatcgtgctaaggccgaagcagaaggtattctggtgaccacagcagcggagtacgtgaaatctctcgaggattttccacttctgatggataagctgtcgcacaaaacattcgacagcgagaagaatggtctgccccagtacccgccgcatctcagcatgaaggagctgctggaaggactgcgccaaaataagctactacagggcacttttcaggcatccagggaaaactacttggagggcaccgtcaatgtagagaaattcgaaaagggggtaagttaaaacgctaaatatcttccctggcatacgcttcacaatacgatttctgtttaatagatccttatccaaggacgcgagtctcttaatcgggccgtggatggcgacctggtggccgtggagcttttgcccgaggcggagtggtcagcacccagtgaaattgtactggaggagaagaatgtctatgccgatgaagtgcccagcgaggaaagggccaaggatgaaaatgagatgttgaatcaggtgcgtgccgctgccttatccgcagagcgcacgcccacagggcgaattgtcggtattgtgcgacggaaatggcgacagtattgcggcatcctgcagcctagcttaatagaggatacaaatcggcacatctttgtgcccgccgaccgtaagattccgcgcatccgtatcgaaacgcgacaggcagcaatgctgcagaaccagcgcatcatcgtaacgattgacacatggccgcgcaactcgcgctacccacatggacattttgtgcgctccctgggaccgctcggagacatggccaccgagaacgaggttatcctgctggagcacgacgtcccgcactgcaagttctcggacgaagtgcttagcttcttgccgaaaatgccctggacaattactgacgaggactattccaagcgtgtggatctgagggatctgtacatttgctctgtggatcccccgggctgcacggatatcgatgatgctttgcactgcaaggaactaccgaacggcaatctggaagtgggcgttcacatagccgacgtaagtcactttattcgtccaggaaacgcactggacatggaggcagcggccaggggaaccaccgtgtacttggtgggcaaacgaatcgacatggtacccgagttactcagctcaaatctctgctcattggttggcggtgttgagcgattcgccttctcctgcgtgtgggaagtggacaatgaagcaaatgtgttaagcaaacgcttccacaagagcgtcatcaaatcgaagcgtgccatgacctacgaggaagcgcagaatatcatcgacgatgccacgcaacagaatgaaatagccaagtccctgagaaatcttaatcggttggccaaaatactgaaaaagcgacgaatggataatgggtaagattatattaacacctcgtaatcaagtgaactaaggcatccataatttacagagcccttgtccttgcctccccggagatccgcttccaggtggacagcgagacacacgaaccactcgaggtggaggtgaagcagatgcgcgagacgaattccatggtggaggagttcatgttgctggccaacatcacggtggccgagcatatcgcaacggagttctccgagtgcgctgttctgcgtcgccatcctcggccaccgcctaccaatttcgatccgctggtaaagtctgcgcgctaccagggcttccaggtggacatcaattcgggactggagctgtcgcattcactggacaagtgtgtcaaggcggataatccgtactttaacacaatgatccgcatcctcaccacacgctgtatgatgcaggcagtgtacttcatcagcggcagtctgcagaaggaggagttcttccactacggtctggctgctcccatctacacgcactttacgtcgcccattcgtcgttactccgacattatggtacatcgcctgctggccgcctcaatcggcgcggatagcacctatgcccagctattggaccgaaagtcaaatgaggagctgtgtcataatcttaactaccgccacaaaatggctcagtacgctggtcgcgcatcagtggccctcaacacgcatctctttttccgcggcaaggaggaggatgaggaagggtgagtcgaagaaaccactagtgggcaacattcttttcaattattacccatccctagatatgtgctatttgtgcgcaagaatgctctgcaagtgctaatccccaagtatggcctggaaggcactttgtatctaaagtcggacaaggatggcaaggacggtgtggagcgcgtcaagagcgagattgtcttcaccttcaacgaagaggatcatacacagcgttgcggtgacgtggtgttccactcctttgatccagtcacggttcgtcttagcctggattccagcaatgtgcagcacgagaagctgatcttccggctggtcaagccgtacatcaagggcttcagcgtggaaacgaccaccgaaggaactgatagccaagcggtttctgcggcacctccatcgaaaaagacaaagaaggataagaaaaagaagtaattctttggatctttgcttatgtggaactagactacgctgaagatgtgtaactacaatcatttcgtataaataaaatgtaaggtttttaaattccgctccgtttcgtaaaccttttccaccgttccggctctgccgatctcggagagtttcgaaagcatacctttgatcgggtgttttgtttaaggttttggtttccaacttgcgttctacattctccagacccattgcaaagtttcgactacagtgcgacggttgtgctgagctcgtttgatccaaaaaattcaaaaagaatatatataataaatacatatatacattaacttgacttgaatatatacaagaacggaagttatacaaagttacaatggaacccggtcctagtgcagtgaactacgaaggcagtaagtcgaaaaaggtttcgaaattcatatgaaaaggctaaaaaatttaatcaatgagtaatcgcgtgatttttgcggaacatatatttatatcggtacacatattttaatacgcatattgaaaacatcagttaaaataaacaacttttagaacatcaaataaagtgcttggaaaactaatatgccaactttcgttgtgatctaaatgaattctatagattttcgaattttccaaaaactatctaagtggagtccaactttttacaatattcttggattcttgcagtgcgatgtagatagatagataatttatgcacaagagttcaaggtgataaatattgtgttttaaaccactgctcgccaattaaaataatgaactttcgatgcgactttgaagtgattaattagtgtttagttgtgcgcccaaactgtcggcactaaatattaatgaattcgattagcttattcaacaaggaggcttttaggtccaatatccatcgccaatcacgtgtggattatgctcggcgtctgggtgagccgcacacccgacgcatatgtgcagtacatgggtgccaggttgggtatatagaaatcagttgagtgaccgcgacatttggaaaatttaaaattcaatgtgcctggtgtgtgtaaggtggtatggagtggaaggtttgtaatttagtttgatagcctaattaaaagcagc

SEQ ID NO: 13829 - DNA, 3119 bp, DROSOPHILA
gcacgggcctccctattccggcacacatgtgaaggtgtaacaattcgaacgcggttcaacaaaatgcaaactttacgcgaatttacgcgtaaaaccaagcgcggcaacattctgaagattgtacgggagcactatctgcgcgacgacatcggctgcggctccgagctgtgccgggagtgtttccaaaacgaggtataccagctcacctcgcagcacgcgaataagagcaccctcttcaaattcccgcactatctcgttttggacacaaatgtggttctggaccagatcgacgtgctggaggaggatgttttgcgcaacgtagtcgttctgaccaccgtgctcaacgaggtgaagcacaggagctccgccatttacaagcgattcaatgagatcgtccacgaccgcaccaggaacttctatgtgttcgtcaacgagcaccacaaggaaacctatgctgatcgcgaaccagatgagaccgccaatgatcgcaatgatcgggccattcgtctggccaccaagtggtacgatgatcacctgcaggcctcgcaatcctctaaagagttcgagcgcagtggcaaagctgctacgcgagttgttctgctcacagatgatgctgccaatcgtgctaaggccgaagcagaaggtattctggtgaccacagcagcggagtacgtgaaatctctcgaggattttccacttctgatggataagctgtcgcacaaaacattcgacagcgagaagaatggtctgccccagtacccgccgcatctcagcatgaaggagctgctggaaggactgcgccaaaataagctactacagggcacttttcaggcatccagggaaaactacttggagggcaccgtcaatgtagagaaattcgaaaaggggatccttatccaaggacgcgagtctcttaatcgggccgtggatggcgacctggtggccgtggagcttttgcccgaggcggagtggtcagcacccagtgaaattgtactggaggagaagaatgtctatgccgatgaagtgcccagcgaggaaagggccaaggatgaaaatgagatgttgaatcaggtgcgtgccgctgccttatccgcagagcgcacgcccacagggcgaattgtcggtattgtgcgacggaaatggcgacagtattgcggcatcctgcagcctagcttaatagaggatacaaatcggcacatctttgtgcccgccgaccgtaagattccgcgcatccgtatcgaaacgcgacaggcagcaatgctgcagaaccagcgcatcatcgtaacgattgacacatggccgcgcaactcgcgctacccacatggacattttgtgcgctccctgggaccgctcggagacatggccaccgagaacgaggttatcctgctggagcacgacgtcccgcactgcaagttctcggacgaagtgcttagcttcttgccgaaaatgccctggacaattactgacgaggactattccaagcgtgtggatctgagggatctgtacatttgctctgtggatcccccgggctgcacggatatcgatgatgctttgcactgcaaggaactaccgaacggcaatctggaagtgggcgttcacatagccgacgtaagtcactttattcgtccaggaaacgcactggacatggaggcagcggccaggggaaccaccgtgtacttggtgggcaaacgaatcgacatggtacccgagttactcagctcaaatctctgctcattggttggcggtgttgagcgattcgccttctcctgcgtgtgggaagtggacaatgaagcaaatgtgttaagcaaacgcttccacaagagcgtcatcaaatcgaagcgtgccatgacctacgaggaagcgcagaatatcatcgacgatgccacgcaacagaatgaaatagccaagtccctgagaaatcttaatcggttggccaaaatactgaaaaagcgacgaatggataatggagcccttgtccttgcctccccggagatccgcttccaggtggacagcgagacacacgaaccactcgaggtggaggtgaagcagatgcgcgagacgaattccatggtggaggagttcatgttgctggccaacatcacggtggccgagcatatcgcaacggagttctccgagtgcgctgttctgcgtcgccatcctcggccaccgcctaccaatttcgatccgctggtaaagtctgcgcgctaccagggcttccaggtggacatcaattcgggactggagctgtcgcattcactggacaagtgtgtcaaggcggataatccgtactttaacacaatgatccgcatcctcaccacacgctgtatgatgcaggcagtgtacttcatcagcggcagtctgcagaaggaggagttcttccactacggtctggctgctcccatctacacgcactttacgtcgcccattcgtcgttactccgacattatggtacatcgcctgctggccgcctcaatcggcgcggatagcacctatgcccagctattggaccgaaagtcaaatgaggagctgtgtcataatcttaactaccgccacaaaatggctcagtacgctggtcgcgcatcagtggccctcaacacgcatctctttttccgcggcaaggaggaggatgaggaaggatatgtgctatttgtgcgcaagaatgctctgcaagtgctaatccccaagtatggcctggaaggcactttgtatctaaagtcggacaaggatggcaaggacggtgtggagcgcgtcaagagcgagattgtcttcaccttcaacgaagaggatcatacacagcgttgcggtgacgtggtgttccactcctttgatccagtcacggttcgtcttagcctggattccagcaatgtgcagcacgagaagctgatcttccggctggtcaagccgtacatcaagggcttcagcgtggaaacgaccaccgaaggaactgatagccaagcggtttctgcggcacctccatcgaaaaagacaaagaaggataagaaaaagaagtaattctttggatctttgcttatgtggaactagactacgctgaagatgtgtaactacaatcatttcgtataaataaaatgtaaggtttttaaattccgctccgtttcgta

SEQ ID NO: 13830 - protein, 982 aa, DROSOPHILA
MQTLREFTRKTKRGNILKIVREHYLRDDIGCGSELCRECFQNEVYQLTSQHANKSTLFKFPHYLVLDTNVVLDQIDVLEEDVLRNVVVLTTVLNEVKHRSSAIYKRFNEIVHDRTRNFYVFVNEHHKETYADREPDETANDRNDRAIRLATKWYDDHLQASQSSKEFERSGKAATRVVLLTDDAANRAKAEAEGILVTTAAEYVKSLEDFPLLMDKLSHKTFDSEKNGLPQYPPHLSMKELLEGLRQNKLLQGTFQASRENYLEGTVNVEKFEKGILIQGRESLNRAVDGDLVAVELLPEAEWSAPSEIVLEEKNVYADEVPSEERAKDENEMLNQVRAAALSAERTPTGRIVGIVRRKWRQYCGILQPSLIEDTNRHIFVPADRKIPRIRIETRQAAMLQNQRIIVTIDTWPRNSRYPHGHFVRSLGPLGDMATENEVILLEHDVPHCKFSDEVLSFLPKMPWTITDEDYSKRVDLRDLYICSVDPPGCTDIDDALHCKELPNGNLEVGVHIADVSHFIRPGNALDMEAAARGTTVYLVGKRIDMVPELLSSNLCSLVGGVERFAFSCVWEVDNEANVLSKRFHKSVIKSKRAMTYEEAQNIIDDATQQNEIAKSLRNLNRLAKILKKRRMDNGALVLASPEIRFQVDSETHEPLEVEVKQMRETNSMVEEFMLLANITVAEHIATEFSECAVLRRHPRPPPTNFDPLVKSARYQGFQVDINSGLELSHSLDKCVKADNPYFNTMIRILTTRCMMQAVYFISGSLQKEEFFHYGLAAPIYTHFTSPIRRYSDIMVHRLLAASIGADSTYAQLLDRKSNEELCHNLNYRHKMAQYAGRASVALNTHLFFRGKEEDEEGYVLFVRKNALQVLIPKYGLEGTLYLKSDKDGKDGVERVKSEIVFTFNEEDHTQRCGDVVFHSFDPVTVRLSLDSSNVQHEKLIFRLVKPYIKGFSVETTTEGTDSQAVSAAPPSKKTKKDKKKK

SEQ ID NO: 13831 - DNA, 10394 bp, DROSOPHILA
tgcatatacgatctttgcgatcatgtgatggtggcattaagccccataagtcctcctacaacatttgatacgtgattacaattgccacagagcactcttttgcgtatggttcatgagatacgccctgaatttgcatcgattcgcagtcgacaaggtcgtttcgggggagtcgaaaacggggcattaaatgtggggctgaccgtttaatgggatcgcgctgacattgtaacagctttgaaataaagcaaaatagtacacaatcgaaagaaaaaccaaccacatttgtggcttacttagccgtgaagtgaaagtacattatgtgttgcagacgattgttatgcacattacacacgtacacacactcgagtgacttatttccattcaaattaaagtcaaatttatgggtacgctcatttctcggctcatgtgtgcatatagtttcaatataaatacgtttaattgccggaatgattgatggaataagtgcaaatctgcagcgtcatgttatgcaaagatttttggctacttctttttgacttcggtttgctatggttttgaactgggtttggccctacttaatgttttaaaagaaggcaggctgacagacaaaagagctcgtcatattcaaattattgtgatacaattacgttgtcggcatgttgaaatgtacgattcaaaatatattgcactttaagcgtaaatttcaggtgcaaatgcctttaaattacataatagttccacgtcatatgatcacacttgatatataaaaatctgattcatacatatgtacgtaaattagcttgcttatatttataacacataatgcacacacatttctttcatccaatcaaagtcacttttattaattaaaacattcttaatacctattacattccatgactagaatcactcggtattaacacgcctgactggctgttaacttagaatcagcataacataaacataactataaaccaaattttactttccttttttttttatttaattaatttatatacgttttctattgcatatgcagacagtaattaggttgaggcggcgttaagtggtgtttatatcgtaaatttatttcgatgccaattgattaccaatccattatatcatcaagcttgttagtggttcacaatttcttgtcgttcttcatataatttattgagtaagttaaacagaatttcataaaaatccgctaaatatgttaggagataaaacaagtgcagcagatgttgccgatgttgcgttgatgttgatgttgctgctgtcgctggtgttgcagctgcactttctagtactcggtggcaccaatcacgctgtacatgagacgattgaaggagccgctctggcgtatgttctcatcgtgggtgtttaccacctgttcacccatcataagacacatcattagtataacattcagttaacagtgaataaatccgcgctactcacattgtacggcggccgggatactggcgctgatactggtttctgtaatagcatttggatggagtgaacagataagatatagcttaataactctggctaaatccagcaatttcggttaaaaactttttaaatgcaatattcaactgttatgagcttcggttagatgttattattccgtgttagaatgccaaaaagatgtgtgcttcttgtgatttggaaaatatacacatatatggagttaatggatgtgtttagtgtagttcgatgccagcagatgatcgatcgaccaaaaaatcaagttagtaacactacttcggccccgttagtcgtcgttacagcgcgtttacatgccgccagacaaggacacacagacactgttgactaacattcggttggatcaactgtacacgttacattgacacgaatagagagacagcgagcgagatagaaacagagagaaatagatagactttgtacaggatgagcttgagaatcgagcgatattgtcggatgccttcacataaagttttaactgagttcgactgattcgagttgattgagagatttgcttgattttcgaacggttgcgcacgatcttacctttcctggaaccaatctattgggctgatagaccttagtctgcacaggaatggtcacttcctgtggcgaggattggccatagttgctgtagccgccctcttcttgaatggctctgtaggtttcgctgttcctgggatcgtactggacagttttcttatagctgctcgttggcagtggtcagtgattcgggttccgattgagattaagtttcagtaattcgggggtttgcattgagatcgttgaaagcgccgttattttggtcaattattcgttggattttttgttttggtgttacgcaagttttaaaagatttatttattttaatttgttttattgttgttggttaatcgagatttataaaaaatatgttggtttttttgtttttgatttttttttacatcggttgagtagcgtgagacagagtagtgagagaatagaaagagaaaacaggatgtgcacaaaatacgttagaattattttgtttttgttgtagttgttgttggttgttgctgttgttgttgggcaataggtgtgctttgttgtcttggaactgcacactcctcaaacggattgcgattaataggaaactcataaacaaattccttacaatctagttattattattattaagagtaatcaaacagaactgcataacaaggtgcgagattatattgagattatcatgtatgtatatcatcggatgagtcgaagccttgagatcgggcgggattagggtggttagttagtctcgttcggttaatactggatgggttgcgatagcgatggggatcaagaataggaactttcagtgctgtctttcaaacagttcgtaaatataattcagcaaacgtcttttagtttcggattagtcttttggggtggtgggtcggaaagaagtgtggacgggaaggacttttagcaggggtcttgggaaagggtatttggctcatagtctattagaagtgggttcagtttttggctactatttgattgatcatttgttttgttgatagagtatttgcagttgatgctggcgttgttgacgttgttgctctgccagttggtctttttgcttttgttgctccagaataatacgtttttgttccaggaaagatagatcgatgaaaattctaacattaatcgtgcagctatgttctaagcatatcagaaactaagagctagagtggtagagtggtctagggttcgtttatttgttgaacttggttaatctatggaaacagcacctgatctacccactgaaaactcttaccgatgcacctacgccacttttgccataccttaaacttacatatgtcctaaaaaccaaaactgaaaagcctcaagacaaacaacgttcgctgggggtttcggtgaagatcatttccagaaatacacatatttacatagcatgatttcctaagcgcagactcagatcatttgagcttttctttgcaataggacgtttttaggaagaagaaaaaaaaggaacacacatattcgtagacagcagagcacatgcattcgggtttttggactcgtgtcgtgttgtttctgttgttctgacatagatattgtatctggttcttagaaactacatatatagttcagttgttcaggttgcgggagacaacaataatcgagggttagtctgtacagacaggcaggggaaaacacgggaaacttggcaaacattcctcatattcaatttaatttgtctcaaggcaagttcaggtacaattccacgttcttgctcattgtgctttccatatcaaagtgaaagtgaaagtgaaaggattcaatcaaagaacgaaatcaggctgtgctcaagatatgaatttacttttacccgttaagttttgttggcaaaggacgatgcaaaggactgtccttcaagcgattgctttcgcttgtggcgaagctacaacaatatacatagaatatatataggatatatagagagtggtatatttatatatgtaaatgtatataaatgcatgtaaaacagagatccggcagtaggcagtagtaagtagtacgtacaacatctatggactggttttcgtgttcaatcgtatgttcgaattgtgtgtgtttctcatttcgtgtgtgcatcggtttagtaaatttcgtttcgactttgattttgtggcttttgggttagtggattatggccgcagcttaaccaggaaccaatttttcgggttatgtggaccttaggctactcgtaaccgtgtgttcgtgactcgttttattagttttcaagctacttggcgcatttcgagtggctctctctgtctctctggcaaaaagaaaagctgcatcaaaaatttcgaagaactctacgcaggtttattcgtaaattgcaaaatccaaagaatatgtagcgtaattcataggcttataagttcaatttgacaagcgaattccaaaagttcatatattagtgttttttttttttcattgtatcgagctaagcataggagtttccagatggtacatttctgggtgacaacttacggaactgtggatctgatggtgtcctcgatgttgttgttggagtacaggccaatgggcgagttgaattgcttgtggaagacctaaaatcgggggatatatgtacacaaatgtaagtaaaacccattacaacttacacttaaattaaatacaatcaatttcgtaacaggattagaacaaagactacaggtcacgaattcgaaatgttaacattgaaaatatcaattttaaatgtagaaaactctagtttttgtaattttccattatgtgggtgtgactttaagaagtcccctgtacttacgcggccagtgtcggcttccgaaccgaccaccttgtgcagcatggtgtcggccacgcgctgcttcatgatactgtcatggtagtcgtgtcctgggtgggcgcgcacagccgggttggggtagtgcctcaagtaggactctgtcgtgggcgcatccttcttcactttggcgccgggcaggaccagcggagttgtacggtagggctggaaagcggatcggtgaagattaacgactttgtttacgccgaaatggggcacacatttggccgaccagccgttgcggcaaatgataatataaataaatcagacagagattaaaagagtttctagaaatcaccagatctttgcccactgtgctacgtatttctccttcgagcgtgtgtgtgcataatttttttcgctatatctaaattccattttatgtgcgcccgtttatatactttaaaaatatcccatagccaggggaaatatttttaggcgcttacgtaagcgtgttcaacgtccagcgatttgtgttttctatctgccgcggaccattttatttttaccaggccgtccacacgcgagtatgtaagtaattcaatataggcggactgctgtttgaaatgttgtaactatgcgcgcctaatcgataggcgatcgacaataggcagctctgggctagagctgccagatgaccagaccaggcttgatcagctgttgctcgtggcgaatggcaaactcaatttgcgcgcttttttaactgtgactgccagctgaaaattgtaacgcacgctgtggcttatttaactcgtatttaatagtaactaactgctgatcaataaactaagctaaagaatggctgccgtacgccgctccacgcgccttagtagcatcagcaaagcgaccgccgcctctccgctgccgccgtcgacgcagacgccgcgtcgctcggaagtttggaaacgcaggcagccgaaaaaagtgcttgccgatagcgacgaggaggaggaggtggtgacggcgatctatgacctgaccagccccgtttcagagaacaacgagaaccgcaacgtgctcaacaaaatggacaagatctccaggcgcaggacatcgcaagtgcaggtggctcaatcggagctgccaaagacgccacgcagcacaaagaaaacagtccaatcagctggcagttcacgggccaaacgtgaggaggaaaaccgtgaggccaccgctagattcttggagggcgaacaggattcggaggtggacccgcttcatggatcgccgccgaagcagaggaagttgcagccactgccacagcacctgatcagtccttcgcggctgctggacagactcagcatcgacgagcgccaggaggaagaggtggaggcgaccacacacaagactgaaacggctgagcagcagccgaaacatcaagccaaggacgaggcaaagcctcggccaaaacagcaggaggatccattagcgcaaaagcagcaggagaaacctccaacaaagcagccgaataaaaaccaaactaaagaaaaaagcaatatccaaaccaatgaggaaacccaacagaataacctgccatctccctcacgcaacaaataccaaaacgccagacgagtgctcaacagcgccgagacacaaaacttgccaggacgtgagtcccagctccaagagctacgtgaattcttcagcaatcacctggaaagccagacttccggcagcctctatgtctccggtcagccaggaacaggcaagaccgcctgcctatcgctactgctgagagatcccgacttctccaagcgtctgcaacgtgtgtacattaactgcaccagcatagcaagtgtaggagcagtttacaagaaactatgcaccgaactgcagctcaaagtcagcggtcgcacagagagagatcacttggaggccattcagcgtcacctaaagacagcaaagcgaatgcttctgctggtgctggacgagattgatcagctctgcaccagcaggcaggaggtgttgtacacgatcttcgagtggccagctcttcccggctccaggatactgctcgtgggcattgccaatagtttggatctcacagatcgtgcgctgatgcgactgaatgcaaggtgcgagctgaagcccagactgatgcacttcccgccctactccaagcagcagatcgtggagatattcaagtcgcgtctggctgaggcggaagtgctggacgtctttccacccgtgaccctgcagctgctggccgccaaggtgagtgcgatcagtggagatgtgcgaagggccctggacattggacgacgagtggtcgagatagcagagcagcagaagcgcgatggcgaaaaggagttcaatatgaaggccctgcagctggagggcaaggatgcggtggaggccaaggaaaagcaaggtaaaccttcgtttctttagtatataaagataaatttatagaatgtgttaaaaagaaatcctatcttgactatttcagacactctaaagcctgttcaggtcacccaagtggctgcagtgctgaacaaggtctacggtgcctcacagaatctggaggaggacatcgaggcatcatttccgctgcagcaaaagctaatgctgtgcaccctggtgctgatgctgcgcaacgagcgcaacaaagacatcagtatgggtcgcctgcacgaggtctacaggagagtgtgcgccaaacgcaacatcctggccctggaccaagcggagttcactgggactgtggatctggtcgagacccgaggcattctgcgaatcatgcgcaaaaaggagccgcgcctgcacaaggttctgctgcagtgggacgaggaggaggtgcatgcggcactgagcgacaagcagctgatcgcctcgatcctcagcgataccgcctgcctgagcaagtgacgatctggacgattacctctaggaaatgagtgtgcccgacaaaccgctggttaattgcgcatttttctcattttcattcaccttggggacgaacgtatatgtataggaatactttttgacgctaattttaaaattcgtggctggcgcaagcactgaaatattttgaaatatcatttgacggtcactttcgacattttctgctattttctgactattaattgaatcgattcttttagactttgtgtgtgtcataaatctaagtaaatgttgcgcccataatctatttctaatccgatccgttgaccaataagttatagagaatccccttcctgttagccctaagcaaataagaataaactagatagttccgcaatacataaaacgcaaaagtgaaaacgttttccactttcgctgcgccgcaagtttgaatcttgggtcgtgccaaaagttgtgaaaatcttagggaaagtctgttgccattgttttctgaggcgttttcagaacataccagtcaaattaacaccagtgcttctgaatttgtgtgggcttttgttggccatctcgacatgaaattaatttgttctataatcattttgtttatttatttgctggcttattgttgttcttcctgcgctctctgctctaaaaatatccccatttgagtggtatgaattacattgagcaccaccgacacaaccagagcgcaatgaaaaatatgtttcaaaaactctggttgcctttcgacgcgtattgacgaaaggcgaacaaatgtttgaataataagctatatgcagagaggccagctagatatatgcatgaatgtatctataggtatatggcgttctatattcctattcctcaaaaatacatatatttctgagggagcagtaaggcgaaaaacctcgaaaaacatacaggtctgttggcgctgccatttgcatttgaacttgaattccaagatcaaacggttgacggtaaaggtgaaatgtttcatctggattgggccacgttcttagaaatttgaaatatttaaaagtaattcaaaattaattaaatatcagcatgatttgctttactttctatctctaatggggttaaaccagtatcctttataaaaccaatagttaaatcttcatttaagattatgtgcatatatcaaaacacacttttcgcgttcctcaggcttctctttaaatatttttctatatgtggcttaattcgagttaattgttcactggctcgcttacttggtattgaatgcactcattgaggtctggctgctccttgtagtagactggggatccgtttttgaactgaacgtactccatttttgcaatgtgtgtgttttgtgtttgaatttaaactccttcaattcgaacaaaatagaaacgaaagatattatagccagatgcaattacgtaatggaagatcacgcagtgtttttaatttttgtttggtaaatttttttttttttttgaattttgtaatatattattggcaacttgcttcttcgtcacgtttaaatcaacgctgcagctggtgagatcggagatctttacactaggattcactacaaaaaggatgctcgagctcgagtcttattgttgtttatttttcaatattccgaacgcaactgattcgaaaattttcaaatgctggcgaattattgctattccgactgcgcggaattccaatttgtctatatagccaactcggtattggttggagagtgtctatctgcctgtctgtctgtgtgagccaccatatagaaaaccgagtgctgacggtcagaggccgttcgttcgacccacgcactcataccaatccactagaaaatcctatatattcgagagagagagcagattttcctaaatatacaaaatatgtttttgtgcaaatagcctgttcaccgagcgtaaacgcgggcaacaacaatacaccatcgtataaacttggacttggtgtgatctatatttttgttttttttttcctcggttcccgcccacgcgccaccttaaacaccgcccccatttcctccccttaccaaacggatgttgttgtttgtcctgccgcctcagtcgagaattattcacattattcacatataacaaatctcgcgtatatgttttaattgctgcttttgtggagcaatttcacatagcacttttttcgtatttcgaaaattaggcacaaatatttatcgcactcgaggttattgtttcgccccactgcagcaacataaatgtgaatataaaaatatttcgcaaatctgctgttaaattattgatttgctcagtttgctttcgccaaattgccaaattgcactgtcacttagcatttccaaatcgcagatttgtcaaccaattctgacagttccaaagataccgatcccagttcgtaaatctcaaaaccatattggcattggcatgctgagttttcttggctgtcataagcaattggcattggaacagggcattgggcatatcatttgatgttgattttgactgatccaaaaacacacgagcaggtgtaattggccttgaaaggcgttggaaaagtctcaagttcgatggagaaaccaaggaacgcataacttacacggaatcatgtgctaaatatg

SEQ ID NO: 13832 - DNA, 1175 bp, DROSOPHILA
attgaaaaataaacaacaataagactcgagctcgagcatcctttttgtagtgaatcctagtgtaaagatctccgatctcaccagctgcagcgttgatttaaacgtgacgaagaagagtttaaattcaaacacaaaacacacacattgcaaaaatggagtacgttcagttcaaaaacggatccccagtctactacaaggagcagccagacctcaatgagtgcattcaataccaaccctaccgtacaactccgctggtcctgcccggcgccaaagtgaagaaggatgcgcccacgacagagtcctacttgaggcactaccccaacccggctgtgcgcgcccacccaggacacgactaccatgacagtatcatgaagcagcgcgtggccgacaccatgctgcacaaggtggtcggttcggaagccgacactggccgcgtcttccacaagcaattcaactcgcccattggcctgtactccaacaacaacatcgaggacaccatcagatccacagttcccttcgccacaagcgaaagcaatcgcttgaaggacagtcctttgcatcgtcctttgccaacaaaacttaacggctataagaaaactgtccagtacgatcccaggaacagcgaaacctacagagccattcaagaagagggcggctacagcaactatggccaatcctcgccacaggaagtgaccattcctgtgcagactaaggtctatcagcccaatagattggttccaggaaagaaaccagtatcagcgccagtatcccggccgccgtacaatgtggtaaacacccacgatgagaacatacgccagagcggctccttcaatcgtctcatgtacagcgtgattggtgccaccgagtactagaaagtgcagctgcaacaccagcgacagcagcaacatcaacatcaacgcaacatcggcaacatctgctgcacttgttttatctcctaacatatttagcggatttttatgaaattctgtttaacttactcaataaattatatgaagaacgacaagaaattgtgaaccactaacaagcttgatgatataatggattggtaatcaattggcatcgaaataaatttacgatataaacaccacttaacgccgcctcaacctaattactgtctgcatatgcaatagaaaacgtatataaattaattaaat

SEQ ID NO: 13833 - protein, 239 aa, DROSOPHILA
MEYVQFKNGSPVYYKEQPDLNECIQYQPYRTTPLVLPGAKVKKDAPTTESYLRHYPNPAVRAHPGHDYHDSIMKQRVADTMLHKVVGSEADTGRVFHKQFNSPIGLYSNNNIEDTIRSTVPFATSESNRLKDSPLHRPLPTKLNGYKKTVQYDPRNSETYRAIQEEGGYSNYGQSSPQEVTIPVQTKVYQPNRLVPGKKPVSAPVSRPPYNVVNTHDENIRQSGSFNRLMYSVIGATEY

SEQ ID NO: 13834 - DNA, 8451 bp, DROSOPHILA
ggatgagcttgagaatcgagcgatattgtcggatgccttcacataaagttttaactgagttcgactgattcgagttgattgagagatttgcttgattttcgaacggttgcgcacgatcttacctttcctggaaccaatctattgggctgatagaccttagtctgcacaggaatggtcacttcctgtggcgaggattggccatagttgctgtagccgccctcttcttgaatggctctgtaggtttcgctgttcctgggatcgtactggacagttttcttatagctgctcgttggcagtggtcagtgattcgggttccgattgagattaagtttcagtaattcgggggtttgcattgagatcgttgaaagcgccgttattttggtcaattattcgttggattttttgttttggtgttacgcaagttttaaaagatttatttattttaatttgttttattgttgttggttaatcgagatttataaaaaatatgttggtttttttgtttttgatttttttttacatcggttgagtagcgtgagacagagtagtgagagaatagaaagagaaaacaggatgtgcacaaaatacgttagaattattttgtttttgttgtagttgttgttggttgttgctgttgttgttgggcaataggtgtgctttgttgtcttggaactgcacactcctcaaacggattgcgattaataggaaactcataaacaaattccttacaatctagttattattattattaagagtaatcaaacagaactgcataacaaggtgcgagattatattgagattatcatgtatgtatatcatcggatgagtcgaagccttgagatcgggcgggattagggtggttagttagtctcgttcggttaatactggatgggttgcgatagcgatggggatcaagaataggaactttcagtgctgtctttcaaacagttcgtaaatataattcagcaaacgtcttttagtttcggattagtcttttggggtggtgggtcggaaagaagtgtggacgggaaggacttttagcaggggtcttgggaaagggtatttggctcatagtctattagaagtgggttcagtttttggctactatttgattgatcatttgttttgttgatagagtatttgcagttgatgctggcgttgttgacgttgttgctctgccagttggtctttttgcttttgttgctccagaataatacgtttttgttccaggaaagatagatcgatgaaaattctaacattaatcgtgcagctatgttctaagcatatcagaaactaagagctagagtggtagagtggtctagggttcgtttatttgttgaacttggttaatctatggaaacagcacctgatctacccactgaaaactcttaccgatgcacctacgccacttttgccataccttaaacttacatatgtcctaaaaaccaaaactgaaaagcctcaagacaaacaacgttcgctgggggtttcggtgaagatcatttccagaaatacacatatttacatagcatgatttcctaagcgcagactcagatcatttgagcttttctttgcaataggacgtttttaggaagaagaaaaaaaaggaacacacatattcgtagacagcagagcacatgcattcgggtttttggactcgtgtcgtgttgtttctgttgttctgacatagatattgtatctggttcttagaaactacatatatagttcagttgttcaggttgcgggagacaacaataatcgagggttagtctgtacagacaggcaggggaaaacacgggaaacttggcaaacattcctcatattcaatttaatttgtctcaaggcaagttcaggtacaattccacgttcttgctcattgtgctttccatatcaaagtgaaagtgaaagtgaaaggattcaatcaaagaacgaaatcaggctgtgctcaagatatgaatttacttttacccgttaagttttgttggcaaaggacgatgcaaaggactgtccttcaagcgattgctttcgcttgtggcgaagctacaacaatatacatagaatatatataggatatatagagagtggtatatttatatatgtaaatgtatataaatgcatgtaaaacagagatccggcagtaggcagtagtaagtagtacgtacaacatctatggactggttttcgtgttcaatcgtatgttcgaattgtgtgtgtttctcatttcgtgtgtgcatcggtttagtaaatttcgtttcgactttgattttgtggcttttgggttagtggattatggccgcagcttaaccaggaaccaatttttcgggttatgtggaccttaggctactcgtaaccgtgtgttcgtgactcgttttattagttttcaagctacttggcgcatttcgagtggctctctctgtctctctggcaaaaagaaaagctgcatcaaaaatttcgaagaactctacgcaggtttattcgtaaattgcaaaatccaaagaatatgtagcgtaattcataggcttataagttcaatttgacaagcgaattccaaaagttcatatattagtgttttttttttttcattgtatcgagctaagcataggagtttccagatggtacatttctgggtgacaacttacggaactgtggatctgatggtgtcctcgatgttgttgttggagtacaggccaatgggcgagttgaattgcttgtggaagacctaaaatcgggggatatatgtacacaaatgtaagtaaaacccattacaacttacacttaaattaaatacaatcaatttcgtaacaggattagaacaaagactacaggtcacgaattcgaaatgttaacattgaaaatatcaattttaaatgtagaaaactctagtttttgtaattttccattatgtgggtgtgactttaagaagtcccctgtacttacgcggccagtgtcggcttccgaaccgaccaccttgtgcagcatggtgtcggccacgcgctgcttcatgatactgtcatggtagtcgtgtcctgggtgggcgcgcacagccgggttggggtagtgcctcaagtaggactctgtcgtgggcgcatccttcttcactttggcgccgggcaggaccagcggagttgtacggtagggctggaaagcggatcggtgaagattaacgactttgtttacgccgaaatggggcacacatttggccgaccagccgttgcggcaaatgataatataaataaatcagacagagattaaaagagtttctagaaatcaccagatctttgcccactgtgctacgtatttctccttcgagcgtgtgtgtgcataatttttttcgctatatctaaattccattttatgtgcgcccgtttatatactttaaaaatatcccatagccaggggaaatatttttaggcgcttacgtaagcgtgttcaacgtccagcgatttgtgttttctatctgccgcggaccattttatttttaccaggccgtccacacgcgagtatgtaagtaattcaatataggcggactgctgtttgaaatgttgtaactatgcgcgcctaatcgataggcgatcgacaataggcagctctgggctagagctgccagatgaccagaccaggcttgatcagctgttgctcgtggcgaatggcaaactcaatttgcgcgcttttttaactgtgactgccagctgaaaattgtaacgcacgctgtggcttatttaactcgtatttaatagtaactaactgctgatcaataaactaagctaaagaatggctgccgtacgccgctccacgcgccttagtagcatcagcaaagcgaccgccgcctctccgctgccgccgtcgacgcagacgccgcgtcgctcggaagtttggaaacgcaggcagccgaaaaaagtgcttgccgatagcgacgaggaggaggaggtggtgacggcgatctatgacctgaccagccccgtttcagagaacaacgagaaccgcaacgtgctcaacaaaatggacaagatctccaggcgcaggacatcgcaagtgcaggtggctcaatcggagctgccaaagacgccacgcagcacaaagaaaacagtccaatcagctggcagttcacgggccaaacgtgaggaggaaaaccgtgaggccaccgctagattcttggagggcgaacaggattcggaggtggacccgcttcatggatcgccgccgaagcagaggaagttgcagccactgccacagcacctgatcagtccttcgcggctgctggacagactcagcatcgacgagcgccaggaggaagaggtggaggcgaccacacacaagactgaaacggctgagcagcagccgaaacatcaagccaaggacgaggcaaagcctcggccaaaacagcaggaggatccattagcgcaaaagcagcaggagaaacctccaacaaagcagccgaataaaaaccaaactaaagaaaaaagcaatatccaaaccaatgaggaaacccaacagaataacctgccatctccctcacgcaacaaataccaaaacgccagacgagtgctcaacagcgccgagacacaaaacttgccaggacgtgagtcccagctccaagagctacgtgaattcttcagcaatcacctggaaagccagacttccggcagcctctatgtctccggtcagccaggaacaggcaagaccgcctgcctatcgctactgctgagagatcccgacttctccaagcgtctgcaacgtgtgtacattaactgcaccagcatagcaagtgtaggagcagtttacaagaaactatgcaccgaactgcagctcaaagtcagcggtcgcacagagagagatcacttggaggccattcagcgtcacctaaagacagcaaagcgaatgcttctgctggtgctggacgagattgatcagctctgcaccagcaggcaggaggtgttgtacacgatcttcgagtggccagctcttcccggctccaggatactgctcgtgggcattgccaatagtttggatctcacagatcgtgcgctgatgcgactgaatgcaaggtgcgagctgaagcccagactgatgcacttcccgccctactccaagcagcagatcgtggagatattcaagtcgcgtctggctgaggcggaagtgctggacgtctttccacccgtgaccctgcagctgctggccgccaaggtgagtgcgatcagtggagatgtgcgaagggccctggacattggacgacgagtggtcgagatagcagagcagcagaagcgcgatggcgaaaaggagttcaatatgaaggccctgcagctggagggcaaggatgcggtggaggccaaggaaaagcaaggtaaaccttcgtttctttagtatataaagataaatttatagaatgtgttaaaaagaaatcctatcttgactatttcagacactctaaagcctgttcaggtcacccaagtggctgcagtgctgaacaaggtctacggtgcctcacagaatctggaggaggacatcgaggcatcatttccgctgcagcaaaagctaatgctgtgcaccctggtgctgatgctgcgcaacgagcgcaacaaagacatcagtatgggtcgcctgcacgaggtctacaggagagtgtgcgccaaacgcaacatcctggccctggaccaagcggagttcactgggactgtggatctggtcgagacccgaggcattctgcgaatcatgcgcaaaaaggagccgcgcctgcacaaggttctgctgcagtgggacgaggaggaggtgcatgcggcactgagcgacaagcagctgatcgcctcgatcctcagcgataccgcctgcctgagcaagtgacgatctggacgattacctctaggaaatgagtgtgcccgacaaaccgctggttaattgcgcatttttctcattttcattcaccttggggacgaacgtatatgtataggaatactttttgacgctaattttaaaattcgtggctggcgcaagcactgaaatattttgaaatatcatttgacggtcactttcgacattttctgctattttctgactattaattgaatcgattcttttagactttgtgtgtgtcataaatctaagtaaatgttgcgcccataatctatttctaatccgatccgttgaccaataagttatagagaatccccttcctgttagccctaagcaaataagaataaactagatagttccgcaatacataaaacgcaaaagtgaaaacgttttccactttcgctgcgccgcaagtttgaatcttgggtcgtgccaaaagttgtgaaaatcttagggaaagtctgttgccattgttttctgaggcgttttcagaacataccagtcaaattaacaccagtgcttctgaatttgtgtgggcttttgttggccatctcgacatgaaattaatttgttctataatcattttgtttatttatttgctggcttattgttgttcttcctgcgctctctgctctaaaaatatccccatttgagtggtatgaattacattgagcaccaccgacacaaccagagcgcaatgaaaaatatgtttcaaaaactctggttgcctttcgacgcgtattgacgaaaggcgaacaaatgtttgaataataagctatatgcagagaggccagctagatatatgcatgaatgtatctataggtatatggcgttctatattcctattcctcaaaaatacatatatttctgagggagcagtaaggcgaaaaacctcgaaaaacatacaggtctgttggcgctgccatttgcatttgaacttgaattccaagatcaaacggttgacggtaaaggtgaaatgtttcatctggattgggccacgttcttagaaatttgaaatatttaaaagtaattcaaaattaattaaatatcagcatgatttgctttactttctatctctaatggggttaaaccagtatcctttataaaaccaatagttaaatcttcatttaagattatgtgcatatatcaaaacacacttttcgcgttcctcaggcttctctttaaatatttttctatatgtggcttaattcgagttaattgttcactggctcgcttacttggtattgaatgcactcattgaggtctggctgctccttgtagtagactggggatccgtttttgaactgaacgtactccatttttgcaatgtgtgtgttttgtgtttgaatttaaactccttcaattcgaacaaaatagaaacgaaagatattatagccagatgcaattacgtaatggaagatcacgcagtgtttttaatttttgtttggtaaatttttttttttttttgaattttgtaatatattattggcaacttgcttcttcgtcacgtttaaatcaacgctgcagctggtgagatcggagatctttacactaggattcactacaaaaaggatgctcgagctcgagtcttattgttgtttatttttcaatattccgaacgcaactgattcgaaaattttcaaatgctggcgaattattgctattccgactgcgcggaattccaatttgtctatatagccaactcggtattggttggagagtgtctatctgcctgtctgtctgtgtgagccaccatatagaaaaccgagtgctgacggtcagaggccgttcgttcgacccacgcactcataccaatccactagaaaatcctatatattcgagagagagagcagattttcctaaatatacaaaatatgtttttgtgcaaatagcctgttcaccgagcgtaaacgcgggcaacaacaatacaccatcgtataaacttggacttggtgtgatctatatttttgttttttttttcctcggttcccgcccacgcgccaccttaaacaccgcccccatttcctccccttaccaaacggatgttgttgtttgtcctgccgcctcagtcgagaattattcacattattcacatataacaaatctcgcgtatatgttttaattgctgcttttgtggagcaatttcacatagcacttttttcgtatttcgaaaattaggcacaaatatttatcgcactcgaggttattgtttcgccccactgcagcaacataaatgtgaatataaaaatatttcgcaaatctgctgttaaattattgatttgctcagtttgctttcgccaaattgccaaattgcactgtcacttagcatttccaaatcgcagatttgtcaaccaattctgacagttccaaagataccgatcccagttcgtaaatctcaaaaccatattggcattggcatgctgagttttcttggctgtcataagcaattggcattggaacagggcattgggcatatcatttgatgttgattttgactgatccaaaaacacacgagcaggtgtaattggccttgaaaggcgttggaaaagtctcaagttcgatggagaaaccaaggaacgcataacttacacggaatcatgtgct

SEQ ID NO: 13835 - DNA, 899 bp, DROSOPHILA
aataaacaacaataagactcgagctcgagcatcctttttgtagtgaatcctagtgtaaagatctccgatctcaccagctgcagcgttgatttaaacgtgacgaagaagcaagttgccaataatatattacaaaattcaaaaaaaaaaaaaaatttaccaaacaaaaattaaaaacactgcgtgatcttccattacgtaattgcatctggctataatatctttcgtttctattttgttcgaattgaaggagtttaaattcaaacacaaaacacacacattgcaaaaatggagtacgttcagttcaaaaacggatccccagtctactacaaggagcagccagacctcaatgagtgcattcaataccaaccctaccgtacaactccgctggtcctgcccggcgccaaagtgaagaaggatgcgcccacgacagagtcctacttgaggcactaccccaacccggctgtgcgcgcccacccaggacacgactaccatgacagtatcatgaagcagcgcgtggccgacaccatgctgcacaaggtggtcggttcggaagccgacactggccgcgtcttccacaagcaattcaactcgcccattggcctgtactccaacaacaacatcgaggacaccatcagatccacagttccaattttcatcgatctatctttcctggaacaaaaacgtattattctggagcaacaaaagcaaaaagaccaactggcagagcaacaacgtcaacaacgccagcatcaactgcaaatactctatcaacaaaacaaatgatcaatcaaatagtagccaaaaactgaacccacttctaatagactatgagccaaataccctttcccaagacccctgctaaaagtccttcccgtccacacttctttccgacccaccac

SEQ ID NO: 13836 - protein, 165 aa, DROSOPHILA
MEYVQFKNGSPVYYKEQPDLNECIQYQPYRTTPLVLPGAKVKKDAPTTESYLRHYPNPAVRAHPGHDYHDSIMKQRVADTMLHKVVGSEADTGRVFHKQFNSPIGLYSNNNIEDTIRSTVPIFIDLSFLEQKRIILEQQKQKDQLAEQQRQQRQHQLQILYQQNK

SEQ ID NO: 13837 - DNA, 3343 bp, DROSOPHILA
cttcttcgttggcggttaataccctttccttgattctgtcgtagacattggggttgatgttctcgatttccgtgggcattttgtattgttcttttcttgaaaaccctttatttacacgtttttttggcgaagagcaaagagaaacaataagctatgtctttcagtgtgtccgcagtttttagactataagatacaaaataacaccacgtctagtttatggtgtgcacacactttttgggcgccaacattatttgaattcgaaattgatctcattttcatagtttcatctaacagagcatttaattagttatacatttatgcgcatcttacgctattaaagttagttaatgaaatctttttaattaatgacagtagccttttttaaggttggaattatttgaatacaaattcaagaaaatcagggcaattactagatcaatcaaatcacaacgtacacttccaggaaaacatcgcacaattgatatgtttacctgtcatcttacgtaaagggcgtaattacagacgcctcgcgatccatatttatgtgctcttcaaattagctgcgggaatacttaacttaagttagccgagcttaacttttttgcgagccagtgctaaatggccagcagatgtggatgtggatgagtccgtacttggctgcgctgctgactaagccttgagcccatttcgccggccaaacccgcttttattttccatatttttattccattttgccgcttttacgagaagcagcgttgccgagaagccggcgcacttgacgccgatttcctcgggttataattagccagacttatcaatatcaacgtagaaaagcagatttacattgtgaacgggtttccgcgcacttggcgtgcatctattcgcaattagcaccgaattacaaactggttaacagccgctgccaacggagtggagaagcctgcggtcgcccatttgggtttataaaatgggtcgccacttggctgagatcagcagtttgggtcacatctccaagcggtcagcatgaagtcggttgtaagtcaagatctcagttctcttgaagattatccctgagttttccatacaagctattgtaatcggttaattaatgagggctataaattttatcttttgaatataaaatacgttttaatctatttgtgttgcacattttcttagattattctcttagccctggtggctttctgccacgcagcacctctggatgtcaaggagtctacctctgaggagctctctaggcccagtcccatcagccccgatgtgctcgttgatcccaagcccaccgccaaggtagtcttgctgaaggatgctcccgtcctgaatcgccagaggcgtaatgaacccaagaagcccgacagcgtggaggcccacgaacagctgcatcactcgcagccggccgttcctattcatgaccagaagccttctccggctgggccacaggaccacaagcgcaagagggaagctcaccacgaggagggtcaccatggtgacgatgcagtgccccagaaggaggaagtgaagcaagctcccgaggaccatgacgccaagaaggaaaagagagaggctcaccatgaggagggtcaccaagaccatgaggctcctcataaggaggaagtgaagcaggcccccgaagctcatgatgccaaaagggaaaagcgagaggctcaccacgaggaaggccaccatggtgatgatgcagctccacataaggaggaagtgaagcaggctcccgaaacacatgaggacaagaaggaaaagagggaagctcaccacgaggagggccacaaggatgaggcaggtgatcgtcctcaggtggaggatctttcgctgccccatgccctgcccgctgtggcccacaccgccgagctgcccaagaagcaggaaaagcgcgagactgtggagaaacccgacagcgtgaaggcccgtgagtcgctccagcacaatccccagcgatcccaggagctccacaaggccatcgaatctctggccggtggaaaggcgccggaacagcgtcaccagcgcgatattcccgtgcccacgcaaaccaaagccaccaccaccaccgatctcccatccaccaccaaatcggagctggaaagcaccactccgtccatccacaatctccacatcccccatcccattcccgtggccgagctcttcgagaagaacaagcacgcggataagtccacttccagttccgaggaaagcaaggagaaagctaaggcctaggcttcctatgttaagagtcgctaatgggaccatcacgagatttgtagtcagcgaaacgaactaaaataaacacaaatatttacatgcttatataaaaagactgggcgttaattatttaataaatatttatgtggatggctgtctgtaaaaaggcagttaatataataggcaaagtaaaaagtggtatctactgcatttcaggcattaattatgggtaaaacttccaagaattaattcaattgtaatataatttaatattacttcaagggaaatatatgaagctttaaatgtacttcatatttgttaataatacttctacacacgttggtaataataaatttaagaaccttgtaccgattttaaacgccttcaagcgcactaaattttatgcgttaaagtagcttcctggtaacaaatttaatttgtgttctagacaaaggcgtacacagagaattgttattatagtaaagctgtattgcagttttttttagaatttttccacgttataggcagcaatttaaatgcgagactccacggatttccccgtataaattcgagcaatttaacttcgcgcttcccgtaaaaaaaaacattgaatatttacgtaagcacctcttcgctaattattcactaaatatttatggcatccacgtagctaactgctattttattcactactctaatgtaagtaatcagtaatataaatataaacagccagacttaatgtaacaataaacaacgtattgtttgcctcggttttttccattctatctgtaatttttcgctataattataatgacaattataacaagtaggtgcttaaatgtaattacgaagctgaatttagatgtctttgtcttaatttgatagttattgcatattcaaaatgcattagaaatgcctaatttaaaaacaaaatgcaaatgaagttgcttttagaaagttaataaaattacctttatgtttttacatctgcaaagatcctctaacttctagtaacatctctattttaagcttagtaaaactaggtttcatctaattattccatatatgtttagtcatttagctacgtagttctcctcctccgactttc

SEQ ID NO: 13838 - DNA, 1199 bp, DROSOPHILA
ggtcacatctccaagcggtcagcatgaagtcggttattattctcttagccctggtggctttctgccacgcagcacctctggatgtcaaggagtctacctctgaggagctctctaggcccagtcccatcagccccgatgtgctcgttgatcccaagcccaccgccaaggtagtcttgctgaaggatgctcccgtcctgaatcgccagaggcgtaatgaacccaagaagcccgacagcgtggaggcccacgaacagctgcatcactcgcagccggccgttcctattcatgaccagaagccttctccggctgggccacaggaccacaagcgcaagagggaagctcaccacgaggagggtcaccatggtgacgatgcagtgccccagaaggaggaagtgaagcaagctcccgaggaccatgacgccaagaaggaaaagagagaggctcaccatgaggagggtcaccaagaccatgaggctcctcataaggaggaagtgaagcaggcccccgaagctcatgatgccaaaagggaaaagcgagaggctcaccacgaggaaggccaccatggtgatgatgcagctccacataaggaggaagtgaagcaggctcccgaaacacatgaggacaagaaggaaaagagggaagctcaccacgaggagggccacaaggatgaggcaggtgatcgtcctcaggtggaggatctttcgctgccccatgccctgcccgctgtggcccacaccgccgagctgcccaagaagcaggaaaagcgcgagactgtggagaaacccgacagcgtgaaggcccgtgagtcgctccagcacaatccccagcgatcccaggagctccacaaggccatcgaatctctggccggtggaaaggcgccggaacagcgtcaccagcgcgatattcccgtgcccacgcaaaccaaagccaccaccaccaccgatctcccatccaccaccaaatcggagctggaaagcaccactccgtccatccacaatctccacatcccccatcccattcccgtggccgagctcttcgagaagaacaagcacgcggataagtccacttccagttccgaggaaagcaaggagaaagctaaggcctaggcttcctatgttaagagtcgctaatgggaccatcacgagatttgtagtcagcgaaacgaactaaaataaacacaaatatttacatgcttatat

SEQ ID NO: 13839 - protein, 360 aa, DROSOPHILA
MKSVIILLALVAFCHAAPLDVKESTSEELSRPSPISPDVLVDPKPTAKVVLLKDAPVLNRQRRNEPKKPDSVEAHEQLHHSQPAVPIHDQKPSPAGPQDHKRKREAHHEEGHHGDDAVPQKEEVKQAPEDHDAKKEKREAHHEEGHQDHEAPHKEEVKQAPEAHDAKREKREAHHEEGHHGDDAAPHKEEVKQAPETHEDKKEKREAHHEEGHKDEAGDRPQVEDLSLPHALPAVAHTAELPKKQEKRETVEKPDSVKARESLQHNPQRSQELHKAIESLAGGKAPEQRHQRDIPVPTQTKATTTTDLPSTTKSELESTTPSIHNLHIPHPIPVAELFEKNKHADKSTSSSEESKEKAKA

SEQ ID NO: 13840 - DNA, 3413 bp, DROSOPHILA
tcgttgggatatacattagcatacttctctgagccgcttgcacttgcgatgatgcgcagtaaggtgtgaacttcacgtggatgaagctcatgcttaagctttatcgtttcacgcaggaggcaatcggatttcatgcggaattctttagcaaagtgctgcagtaaaaacagcgtaacatcaccattgggactgttttccctcagatagtgggccacgtagtcgaggaaagcaacacgatcttcagtctccagcttttggtaacaagctacgcaggctcgtccattctggacaatgaagtgctccaggaagaagtgtagatactcgaagttataggtgcactgggcttcgtttagagctcgccacagttgcagacaagttttaagtgccaccaagtcggtgataagaccatgaccactgatatatatgttgtacatgatcatgaggagcacattattcgaacttcccaagggagaagcgtaagcttgttcggcgatcttcaagccatgctgactccagataagtgcttgggtggtctcattgttaaccacactattggctagcacctgcagagatagattgtgtataagccgatgctccgtgcgcatcactggactgaaagccacagcatttaaaaagctggaaaactccgcactttcagccaaagtctcttggttttccctgccttttgtgagcaaaagtcgtaggttcttgagtaatgccgagatttcctcctcattttcggttatgctcaggcgcacgagcttgtgtaccagctctttagtttcgcttttctggggtaaatcatttatttaaataaatctcgcgagaataacaataatatttaccacatgctccattttcgatagacccacagctgtttgccgccaagtgtaatcgattggccagtgcagcgctagccaacactgtctcaattgggtcaacggagtgtggccacactgcgctccacaaaagaaaacaaaagaaaagggagaaaagcaatttcgttttgggaaattttctaagtcatgtagcaaacgaaacgctacagcgaaatcaagataaacaaagcaatgtcactgcgtgcgcttcggaaaagagaaacaggcactggctacggcaacaataacaaccatttagcagcaccagcaagaacttcacaagcaacgctctttaagaaggccagcacagcaataacgtcaccgaagaaatcgttgctcaaaactgggaactccgtctgcggattggacaaacggagtcagttccgggagcagaagctactcggtcgcaagtgccactcgagtcctgacctacgacaaatcggaaaataccaaaacaacagcctgttgcgcagcaaatcggagggggatgttagtttaatcctggccagtaactccggtgctccattgacggtggcaaacgccaagtcagaggtttgcctgcaaaggattagctctcacagttacgaacaatctccgagaacgccgataaacaaaagcgaaatgctcggcggtgcacgttcccatcgcgacctgacgcagtcgtcctatggcaaccaggcaggtggacattccgtggatttggaatccaggtctagaactcctcggcggatgagcgagtgcagcttgggctacagccaatccagctcccggcacactggctccaactctatgttcgccagccagatgactctctcctcgggatcggtggtgccgcccgtggaccccaacgctgtgctaagggtgcccattattggttacgaggttatggaggaacgtgcgcgtttcactgcctacaagctgcgagtcgagaatccggagaccaacgactattggcttgttatgcgacgctacaccgacttcgtgcggctcaatagcaagctaaagcaggcttttcccaaccttacgctcatgctgccccggaagaagcttttcggcgataacttcaatgccgtctttctcgacaatcgggtgcaaggtctgcagatcttcgtcaactcagtgatggccaaggaggagctgcgaaagtgcaaactggttcgggagttcttctgcctggacgagccgccttcgtactctgaatccatggaggagtgtcgtgtaggatgatttctttttcatgtatttatcaaatctatataagatttcatttacttctaggcaattttcgaagctcaggaggagacaattgagcatctgaagctgcagattcgaaataaaaacgatctcattctcagtttgcagcagaaactgcgcgaggagatgaacgagaaggagcagctgagagaagctatgaagtaggataacaatttcttttacaaatgcaaaaatctcattagccaatctctctctacagaaatatggagcttaattgctcgcactgctcctcagctagcgacagtttgggaataaagtagaccttcgccaatcggaggtgataaccaaaatccagttggacgtgcgtgtgcgtacaacattatgctgagcataactctacgcaactgcgccgcttggatgcaaatccaatacaataatacaaaccaagtgcatatcgaggggttggcccctacagtgctttagtattcatatctagacctagatgctagcaaagtgctgcccacgctggtactatatggaatacgatagtagatatttttgatattcgtttacgaggcacttacagttaagaatgaaatcactagactaagtgtatacgatatgttatgcaaactcacatacaaaataaatctaaggcacaatttattactcaatgaaaatggcatttatgagttgaaaattaatttagtgttcaagataaaaatatccaagccacaaagaaacgcttttcgaaatgcaattcgactgtgtttggaagacttacgaatattacgctttagtgttagtcgaagtgataattaaaacgattatggtattgaatctatttcttaaaggctggtcatcgcgggtggtcgggcataggctttcgggatgaatccatatttgcgggttttcggagcataagcccaaagccagccatcaacagtctgattggttaagtctgcgtaaatccaatctcctctccgcacagaaaggtacagatcgtctggagcttgcgctttgtaatcatacagcatcaccagctccgtgccatggtagcgtagatcatctgttcccaagcccaattgaggctgctgctgttgctggctctgctgaccttgttgaccctgctgcaaaatggtctccatggcatttaaagtggctttctgttgctgcaaaactcgtacactgtctgcaggataaataaagctggctggcacaaatccttcctggccatcactgcgcattatccaaaaccaatcgggatcctcgcgatttagcacggtaacaaattcaccccgttccacagacaaatcattc

SEQ ID NO: 13841 - DNA, 1294 bp, DROSOPHILA
ttcgttttgggaaattttctaagtcatgtagcaaacgaaacgctacagcgaaatcaagataaacaaagcaatgtcactgcgtgcgcttcggaaaagagaaacaggcactggctacggcaacaataacaaccatttagcagcaccagcaagaacttcacaagcaacgctctttaagaaggccagcacagcaataacgtcaccgaagaaatcgttgctcaaaactgggaactccgtctgcggattggacaaacggagtcagttccgggagcagaagctactcggtcgcaagtgccactcgagtcctgacctacgacaaatcggaaaataccaaaacaacagcctgttgcgcagcaaatcggagggggatgttagtttaatcctggccagtaactccggtgctccattgacggtggcaaacgccaagtcagaggtttgcctgcaaaggattagctctcacagttacgaacaatctccgagaacgccgataaacaaaagcgaaatgctcggcggtgcacgttcccatcgcgacctgacgcagtcgtcctatggcaaccaggcaggtggacattccgtggatttggaatccaggtctagaactcctcggcggatgagcgagtgcagcttgggctacagccaatccagctcccggcacactggctccaactctatgttcgccagccagatgactctctcctcgggatcggtggtgccgcccgtggaccccaacgctgtgctaagggtgcccattattggttacgaggttatggaggaacgtgcgcgtttcactgcctacaagctgcgagtcgagaatccggagaccaacgactattggcttgttatgcgacgctacaccgacttcgtgcggctcaatagcaagctaaagcaggcttttcccaaccttacgctcatgctgccccggaagaagcttttcggcgataacttcaatgccgtctttctcgacaatcgggtgcaaggtctgcagatcttcgtcaactcagtgatggccaaggaggagctgcgaaagtgcaaactggttcgggagttcttctgcctggacgagccgccttcgtactctgaatccatggaggagtgtcgtgcaattttcgaagctcaggaggagacaattgagcatctgaagctgcagattcgaaataaaaacgatctcattctcagtttgcagcagaaactgcgcgaggagatgaacgagaaggagcagctgagagaagctatgaaaaatatggagcttaattgctcgcactgctcctcagctagcgacagtttgggaataaagtag

SEQ ID NO: 13842 - protein, 407 aa, DROSOPHILA
MSLRALRKRETGTGYGNNNNHLAAPARTSQATLFKKASTAITSPKKSLLKTGNSVCGLDKRSQFREQKLLGRKCHSSPDLRQIGKYQNNSLLRSKSEGDVSLILASNSGAPLTVANAKSEVCLQRISSHSYEQSPRTPINKSEMLGGARSHRDLTQSSYGNQAGGHSVDLESRSRTPRRMSECSLGYSQSSSRHTGSNSMFASQMTLSSGSVVPPVDPNAVLRVPIIGYEVMEERARFTAYKLRVENPETNDYWLVMRRYTDFVRLNSKLKQAFPNLTLMLPRKKLFGDNFNAVFLDNRVQGLQIFVNSVMAKEELRKCKLVREFFCLDEPPSYSESMEECRAIFEAQEETIEHLKLQIRNKNDLILSLQQKLREEMNEKEQLREAMKNMELNCSHCSSASDSLGIK

SEQ ID NO: 13843 - DNA, 5410 bp, DROSOPHILA
tccactactttatgcgtatcgcaggtgccagttttcaggggctgtgccaatcccattgtaactcggacatggttggacatttcccgcttccacggcactgacggccttaatgacattggcggctacccagatgtgagtgatctgcaggagcaactgcagcaggagcacgccgtgaatgccatgtatcggctagtgtgtcaatatccaaaacaagttgactttctactttgcgggccactaactaattttgccagctgcattaatctatatggcgatgattttttggacaaaatcggtggaatatttataatgggtggaaatatatatggtcgcggaaatatcatgaagtgtgcagagttcaattttatgatggatccggaggcggcgcatacaacattggagcgtttgaaggtgccagctgttattcttccctgggaacccagcattgatgacgacttcaatctgtcacttgactggcggctggatgtcttgggctctgtagaccatcccctagtcgagcttttgtccagggtggagcgatccatgttggtgccacgtgacataaagcattggattaatcccgatgccgctcttgcagcagcctatatcttcccaaaggcgatgattgccgagcagttggattaccatgccacagtggagttggccggagtccacacccgtggccagatggtactggatcatctgcgaggtcgccgtgtggatgctatccatgggaaaaagagcaatgtgcggatcataacacatctcaatagagaaccatttcgcactattatgtcctggacgggattccttccgggcgtagatatcacagagctctgcgagcaggaacaacgtaataatctttaagatacaattatttgctttttaaatgaaatgaagaataactttaattgttcttatgatttgtcttggcacattggatcgatcttaagtttacgaatgtaataaaaacatattagaatactttgtgtgaccccttttagaagtccgtttctgggctctgtggcctcggactctcaggttgcggttgatggtttggatgaaggtctctggttatcggaagcacagcttggacctgcggttgggtgaccaccacatcgtcggtgtctacagtgtctagacccctgtccgcctcctgtttgggaggattgaaggacttcaggttgcccaactggctgcgaacgtccgactcggagagcagatgcaatggtacgttcgctgggacggccaaccgcttgggactggtgctaccatcatctggcttacgtctgtctggtggaaagaccacttgtgcataggtgaccccactctcactgggctccacaatgctctgtgctccacccgatgaagtagtcaccgaactgggattcctgaataccgctgtctctgtccgtggttctggagcggcatctctgcgttgaatgggcgatgaggtggtggtggtggttactggacttcctccacgtggagcactgggcgacgttgtcgcatcctcatgcggaattggtgcgtacagagagggtgtgtaattattgtccgtcaccttgcagttgtaaagattgagtcctttggcgaatatgtatacgagtatgtcgaaaagcacactggccaggatcaatgaggctgtgagaatatcgaggatgttgccatgcttcggcgtttctcgcagcagacagcgctcgtagttgggtgcccagtaaacgcaggttgtacctaatcaaaagaaagtttatgtagcttagactatatttaagttcaatttttaaattccactcacgggtgacaatgtcgtagctgagatgcactggaacataggcgaaaaggcccacgatcattagttcaaaggccagggccaatgacttatcctgtggcaggacagctcgcagtgtgatcaacgtctttcctatggctccgacgcccattagaaatgccaccgaaatgctcatgatctggaagatgatgatggcactctggcaattgtcggagctgcaagctccagcggttgccctcatctgaccagtggaattcaaggactgatccccgctgcagctgcagccctcgaacaactgaaagctattgatggtggtctttttggtgcaacccgcgtagcagggcgagaagtaggtgacggaactgttttccggacacacgggcatgaaggcagtgggtgtgcataggcactgactggagcaatagggctgttttagcttaccaccctccacaccagcaatggcgcccacatcgcactggacaaagatcaggccgatgaaaatcgctaccagatgtatactgagggctatgtttataccggtgattttacgagcagataacttggccttcgagatgaccaggccacttatcagcattcccaatgccataactggcggcttgaggaaataggaaacgaatgccgatctccactctgccgccaagccatcctgttcgttgtagggcaaaaagaatctgctctgcagatagctctcctcctggaggccatagttcacgactgcactctgcacgcacatgatgctcaacagattgaacatcagtaggcggttattgaatagcctcttcagagatggccaaaaatcggagtcatccatatatgttgagaactggctgccaaacctacgcatgctggactgctcaatgatccgttgcgccgcctggtgaatgacggtctttggcagtcgtttgggaaacagtcccaggagcacagcgcccacgaaaatgaagggtgccagtatcacccaaccgagccaccaacccacatgggtgagaccaacgccaagcactaggaaggatccagcctgctggccaaatacgcgcgcagccagagcagcacctatcaccgccggactatcttgggacagggagttgtcgtcgatgtagctaacccccagcgtgtagtaggccaatcctcccattcccaaggccagctgaagaacgaagagcatcgcaagggttaggctgctgctctgggcctcggtcagtgtgagcctttggaactgtgccaaggatgtggcgcacatattggcatccagcagagcatcctttgcctggttgccatcggcactgcaagagagttgtaagaaattattttttttagaaatcaaatgctaatgaagtattttttttttacaagttactcacaagttcataatggagggaatcacagccaccacacaggtgaccgcctgcagcatcagagttcccaccagccatttgatgggatgatagacgtccgcccagtaggcgaaagccaacgcaaagaccgcctggaataatccactggccaccagcagccaatctgtatgtttaaagaataaaacagtttgttagtaatacgctttcgtggaattcgccttacaaactctatataaccagtttaccaactgagatatgacgtatgattaagaacggactttcattgaggtaaaagccacttccgttcgaattcttttttcagttgatttgcaaaaacctaaaaaaaatgtattacgcggcaatttttactaccataatgtattccctccttatcaaaacaatgacgaatagatacctaaataccaatacaccaaacagtgtacaaaggtaaaactaaatattgtagttagaatattatttaattgattaccttgataaacatacatacataacataatacagctcagttttgttttaatattttgtaatttactttatacctcttaatttaaaaagatatttaagaaaactactggaaaatagagagcacccccagctcccagacactggcaatcgtcaagaatatcgcaaaactgataagataactgaaatcttcacatagaaccgggccaacacctcaattatatttccctggtcaggttagcattttcccatttttgcgataatgctgctcgcttactcacccacaatcagtggattccaaccgaactgaaaggaagcctgtttggccgacacgcggaagtaggattcgcaggcgccctgtagggttcccgagatggccagtaccaggatgaaggtgcgcagtcgggcatatttctggcatccgggaccgcgacaccatcccagacccttgatgccacaatcgacgctgtctgtttggtggtgggaagggggtagaaattctatatcaagtatacgtaaaggggaaatcagggatttgggtcacccaccatcgggtatattgttggcattgacagctatctgcgataaatcggagttgcgcgtattatgcgccatattccgtattcgattcgatttcggattcgtttatgttcactacaccacttcaattcaattcactagcttgttgtattctctattgattacattagtcagtggccgtggtacgttggcatcttagccgcgttaacacagcactaacgtctattcgaaatgaggaacgggagcaaactgaggagccgcacctgtcgcggaaccgtaactctcttttttttaacttcggtttgataagcgcattcttatcttatcatatttttggactttttagcttttttcttaattgcaactttattgcttatgtatcgtgagcaacatgttgaagcaacatgtgtccaagcagtgctagttgaataagatcgtaattgaaatttcactagtggaataaagaactaagaacaattcttaccaaaataaagtatgccaaaaagtataaggcatttcttgtttatttattgaacctttaaaagtgtattaagcaatttacaacataagcaagccagatctttgcttcaaatataagtaatcaaagctactgggaattcaagatgtatttcatcgcaagtcttttgttgatagttcctatcgccttcggctcagccccagtgactagttcaccaccggttttggtctggggcgtcgatacgtaagtttaaacaatcaaaaatataagttatttgccataaaggcgctttcttacagccctaaagccaccagtatttttcaacctgtaacaacggcgcagtttcgaaagatcatacgaaatctgcagaagaataatatgatagttatttacttggcctcggaggtagattacaactcacttatttgagagcattcttatagattaaatatccttttattaaagcttgcggcgaaggatataaactgtgacttgtgctttccctatctcaccaagatccagccgatgaactactacagccaggtggaggagcctctaaatgctgtggagcgggtggctgaaaagacaggagatattatctggcacattccgaagatctcagaaatgggcagcttggaggcggaaatggagttgccatgccaaaaaggggagattcacgcattcagctttaacgatcgcaatttgcttgctcacggtaggttaaatatttaattatgaaat

SEQ ID NO: 13844 - DNA, 2589 bp, DROSOPHILA
ttagtgctgtgttaacgcggctaagatgccaacgtaccacggccactgactaatgtaatcaatagagaatacaacaagctagtgaattgaattgaagtggtgtagtgaacataaacgaatccgaaatcgaatcgaatacggaatatggcgcataatacgcgcaactccgatttatcgcagatagctgtcaatgccaacaatatacccgatgacagcgtcgattgtggcatcaagggtctgggatggtgtcgcggtcccggatgccagaaatatgcccgactgcgcaccttcatcctggtactggccatctcgggaaccctacagggcgcctgcgaatcctacttccgcgtgtcggccaaacaggcttcctttcagttcggttggaatccactgattgtggattggctgctggtggccagtggattattccaggcggtctttgcgttggctttcgcctactgggcggacgtctatcatcccatcaaatggctggtgggaactctgatgctgcaggcggtcacctgtgtggtggctgtgattccctccattatgaactttgccgatggcaaccaggcaaaggatgctctgctggatgccaatatgtgcgccacatccttggcacagttccaaaggctcacactgaccgaggcccagagcagcagcctaacccttgcgatgctcttcgttcttcagctggccttgggaatgggaggattggcctactacacgctgggggttagctacatcgacgacaactccctgtcccaagatagtccggcggtgataggtgctgctctggctgcgcgcgtatttggccagcaggctggatccttcctagtgcttggcgttggtctcacccatgtgggttggtggctcggttgggtgatactggcacccttcattttcgtgggcgctgtgctcctgggactgtttcccaaacgactgccaaagaccgtcattcaccaggcggcgcaacggatcattgagcagtccagcatgcgtaggtttggcagccagttctcaacatatatggatgactccgatttttggccatctctgaagaggctattcaataaccgcctactgatgttcaatctgttgagcatcatgtgcgtgcagagtgcagtcgtgaactatggcctccaggaggagagctatctgcagagcagattctttttgccctacaacgaacaggatggcttggcggcagagtggagatcggcattcgtttcctatttcctcaagccgccagttatggcattgggaatgctgataagtggcctggtcatctcgaaggccaagttatctgctcgtaaaatcaccggtataaacatagccctcagtatacatctggtagcgattttcatcggcctgatctttgtccagtgcgatgtgggcgccattgctggtgtggagggtggtaagctaaaacagccctattgctccagtcagtgcctatgcacacccactgccttcatgcccgtgtgtccggaaaacagttccgtcacctacttctcgccctgctacgcgggttgcaccaaaaagaccaccatcaatagctttcagttgttcgagggctgcagctgcagcggggatcagtccttgaattccactggtcagatgagggcaaccgctggagcttgcagctccgacaattgccagagtgccatcatcatcttccagatcatgagcatttcggtggcatttctaatgggcgtcggagccataggaaagacgttgatcacactgcgagctgtcctgccacaggataagtcattggccctggcctttgaactaatgatcgtgggccttttcgcctatgttccagtgcatctcagctacgacattgtcacccgtacaacctgcgtttactgggcacccaactacgagcgctgtctgctgcgagaaacgccgaagcatggcaacatcctcgatattctcacagcctcattgatcctggccagtgtgcttttcgacatactcgtatacatattcgccaaaggactcaatctttacaactgcaaggtgacggacaataattacacaccctctctgtacgcaccaattccgcatgaggatgcgacaacgtcgcccagtgctccacgtggaggaagtccagtaaccaccaccaccacctcatcgcccattcaacgcagagatgccgctccagaaccacggacagagacagcggtattcaggaatcccagttcggtgactacttcatcgggtggagcacagagcattgtggagcccagtgagagtggggtcacctatgcacaagtggtctttccaccagacagacgtaagccagatgatggtagcaccagtcccaagcggttggccgtcccagcgaacgtaccattgcatctgctctccgagtcggacgttcgcagccagttgggcaacctgaagtccttcaatcctcccaaacaggaggcggacaggggtctagacactgtagacaccgacgatgtggtggtcacccaaccgcaggtccaagctgtgcttccgataaccagagaccttcatccaaaccatcaaccgcaacctgagagtccgaggccacagagcccagaaacggacttctaa

SEQ ID NO: 13845 - protein, 814 aa, DROSOPHILA
MAHNTRNSDLSQIAVNANNIPDDSVDCGIKGLGWCRGPGCQKYARLRTFILVLAISGTLQGACESYFRVSAKQASFQFGWNPLIVDWLLVASGLFQAVFALAFAYWADVYHPIKWLVGTLMLQAVTCVVAVIPSIMNFADGNQAKDALLDANMCATSLAQFQRLTLTEAQSSSLTLAMLFVLQLALGMGGLAYYTLGVSYIDDNSLSQDSPAVIGAALAARVFGQQAGSFLVLGVGLTHVGWWLGWVILAPFIFVGAVLLGLFPKRLPKTVIHQAAQRIIEQSSMRRFGSQFSTYMDDSDFWPSLKRLFNNRLLMFNLLSIMCVQSAVVNYGLQEESYLQSRFFLPYNEQDGLAAEWRSAFVSYFLKPPVMALGMLISGLVISKAKLSARKITGINIALSIHLVAIFIGLIFVQCDVGAIAGVEGGKLKQPYCSSQCLCTPTAFMPVCPENSSVTYFSPCYAGCTKKTTINSFQLFEGCSCSGDQSLNSTGQMRATAGACSSDNCQSAIIIFQIMSISVAFLMGVGAIGKTLITLRAVLPQDKSLALAFELMIVGLFAYVPVHLSYDIVTRTTCVYWAPNYERCLLRETPKHGNILDILTASLILASVLFDILVYIFAKGLNLYNCKVTDNNYTPSLYAPIPHEDATTSPSAPRGGSPVTTTTTSSPIQRRDAAPEPRTETAVFRNPSSVTTSSGGAQSIVEPSESGVTYAQVVFPPDRRKPDDGSTSPKRLAVPANVPLHLLSESDVRSQLGNLKSFNPPKQEADRGLDTVDTDDVVVTQPQVQAVLPITRDLHPNHQPQPESPRPQSPETDF

SEQ ID NO: 13846 - DNA, 3299 bp, DROSOPHILA
tctggcttatattgtaactgagggcctccacgctgtgatatacttgcaagttctccgcggtcccaaagtcataggagatgaaatcacccgatttccatatctgctgcaagtgtttgatttcccgcggagaaccgccttgcagtagatactcgtagttaaaggcttctaacagctggaaaaggatattaaagctagtgggtattcaaattcattaaataagtataaatgttttacctttttgttgttttgagcgctgcctaccaactgcttggcataatattcgcagagatctcgtttggcttggcatacttttcgaaagtagccaggtggaaagatctcgaacttgtatgccttctggcgtttctgcaagcaagaaaattgttatatttataaaatattaaatattcagactaaaatgcttattaatataaaaactttatttatttatatattcattttatttaagtagcattataccacaagttcaatttttagtttatcttctataaacaaatgtattacttttcttctataaacaagtgtatttcttttcacgaaaatgcattgccctttttataaaatttccactggaatagattccactcagctgattggttttactttccatagcatcaagatccaccaaaacatatttagagtcacaccagggggttatcaccgagtgtacctatttctctaaataatctcaaagtctctcctactctcagaagttccctaatctctctaatgtcaagcggtcaggctgttatcagcaacactgagaaaaacatatggtttcctcgagcactcaactttgtaaaaccaacatttaatcttgattgtttcatactattaccatatctaacctttattgaccaaaaatcctgatatacaaatcaaatacaaatttttgtacttcaaagctagttaaatttctttaggtgtatctcaaagatctgctcttggcagtgctctcgatccgggcttcagtcactgcgcgatgttcagactaagctatcgactgcccgctgccctcggcggtctgcgccacgcctcctccgccgccggcgagggtcagcgcaccgccctctacgatttccacgtgcagaaaggcggaaagatcgtgaacttcggaggctatgctctgccggttcagtattcggatcagagcattatagcctcccacctgcacacccgtcaggtgggctccattttcgacgtgtcgcacatgctgcaatcccggattttcggcaaggatgcggccgcctgtctggagtcggtttgcactgcggacattctgggcacgccggagggcagtggtagcctcaccgtcttcaccaacgaggcgggcggtatcctggacgatctcatcgtgaacaaagtcagcgaaaaggagctatatgtggtctccaatgcggcgatgaaagaacaggacatgggcataatgaagacagctgtggtatgttcgtattacattgcacttttgaaggataaatatatgtttcgaattttcaggataattttaagtcccagggaaaagacgtatccattgaattcctcacacccgccgatcaatctctagtagccgtccagggtcctcaagtggccaaggaactatcgaaactacttaccgggaaagcttctctcgatcaactctacttcatgagttccttcgtcaccacattggctggaatccccaatgtcaggatcacgagatgtggttacaccggtgaggacggtgtggagatatcggtggcatccagccaggcacagaagctcactgaatctcttcttgagagtggagtcctcaagcttgctggtctgggagccagagactccctgcgattggaggcgggtctctgcttgtatggcagtgatatcgattctaagacgacacccgtggaggcggctcttgcctggttggtaaccaaaagacgccgcacaacccgcgattttccaggagctgacgtgatccttggccagctgaaggagggcgtcagccggaggcgagtgggtctccagatgttgggcaccaagccaccgccagctcgttccggagtggccatctttagtcagggtcagcaggtgggtcaggtgactagtggctgcccaagtcccagtgctggacgcaacattgctatgggatatgtggcagagaatctaaaagcacccggcacaaaggtggagttcaaggttcgagacaagctctacgaggctgaagtcactaaaatgccatttgtaaaagctaactattataacagaccaaagaaataaatgtgcagcacacactgataatgattaagtgaattctaaatggaagtttaagctaaggttgacaagtctttcgccaacaccaagcccgctaactaaacaaagtaaatttccagcaattaccttgataaacttcatgaggcgccgcacctggaaggagtcgaatctcacctgacgatgcagtcgagccagtggtgccagtgcctgtatgagctgaatgcgctggttaaaacgtggatgcaccgcacaaagcaccaggaacgcattaaaggcctaagagcatattttgaaggatgagttagccagctgaaagtaagcagcgctcacctgggagtgtccaattagtaccacctgatggtgtatttgctcctcatcctggccaggacctcctctgctggccagttgctcgccgcctgtgaccttcgccatgtggtcaattatggctggcaaatcgtaggcgccatgctcgtggaagctgaagcgccagaattcgaccatcacgtcggtcaagtcgatgtgctgccgtccgtagggcgacactccgcgcagattcgccagccacacgtcgtattcgcggtggtgcagctggaaggctgtacaccgaaagaaaatatagggtttcatataaagatatatcaaagtgcaattcagtaaggccacaatgtacgaaagttgttgaaatacaattttaagttttagattccaccaaaacccactgacaatgcatttttttaagatttacctactgacttgtatttaggtgtacaaatgttaccggaagtgcccacctgcttacccaaactccgttcgggccccatgcacacccatcccagagaggaacccagcaatccatggaccaggagcaccggcttagctcccagtcgcggcagacgctgcaactgcagctggtagccatccgccgtggtcacattgtgcacttcgtggctgacattctgggcctccagccagtccatctaatggccatgcatagaatgcacagaaaaaagtgcaatatatattttaatttt

SEQ ID NO: 13847 - DNA, 1243 bp, DROSOPHILA
atgttcagactaagctatcgactgcccgctgccctcggcggtctgcgccacgcctcctccgccgccggcgagggtcagcgcaccgccctctacgatttccacgtgcagaaaggcggaaagatcgtgaacttcggaggctatgctctgccggttcagtattcggatcagagcattatagcctcccacctgcacacccgtcaggtgggctccattttcgacgtgtcgcacatgctgcaatcccggattttcggcaaggatgcggccgcctgtctggagtcggtttgcactgcggacattctgggcacgccggagggcagtggtagcctcaccgtcttcaccaacgaggcgggcggtatcctggacgatctcatcgtgaacaaagtcagcgaaaaggagctatatgtggtctccaatgcggcgatgaaagaacaggacatgggcataatgaagacagctgtggataattttaagtcccagggaaaagacgtatccattgaattcctcacacccgccgatcaatctctagtagccgtccagggtcctcaagtggccaaggaactatcgaaactacttaccgggaaagcttctctcgatcaactctacttcatgagttccttcgtcaccacattggctggaatccccaatgtcaggatcacgagatgtggttacaccggtgaggacggtgtggagatatcggtggcatccagccaggcacagaagctcactgaatctcttcttgagagtggagtcctcaagcttgctggtctgggagccagagactccctgcgattggaggcgggtctctgcttgtatggcagtgatatcgattctaagacgacacccgtggaggcggctcttgcctggttggtaaccaaaagacgccgcacaacccgcgattttccaggagctgacgtgatccttggccagctgaaggagggcgtcagccggaggcgagtgggtctccagatgttgggcaccaagccaccgccagctcgttccggagtggccatctttagtcagggtcagcaggtgggtcaggtgactagtggctgcccaagtcccagtgctggacgcaacattgctatgggatatgtggcagagaatctaaaagcacccggcacaaaggtggagttcaaggttcgagacaagctctacgaggctgaagtcactaaaatgccatttgtaaaagctaactattataacagaccaaagaaataaatgtgcagcacacactgataatgat

SEQ ID NO: 13848 - protein, 405 aa, DROSOPHILA
MFRLSYRLPAALGGLRHASSAAGEGQRTALYDFHVQKGGKIVNFGGYALPVQYSDQSIIASHLHTRQVGSIFDVSHMLQSRIFGKDAAACLESVCTADILGTPEGSGSLTVFTNEAGGILDDLIVNKVSEKELYVVSNAAMKEQDMGIMKTAVDNFKSQGKDVSIEFLTPADQSLVAVQGPQVAKELSKLLTGKASLDQLYFMSSFVTTLAGIPNVRITRCGYTGEDGVEISVASSQAQKLTESLLESGVLKLAGLGARDSLRLEAGLCLYGSDIDSKTTPVEAALAWLVTKRRRTTRDFPGADVILGQLKEGVSRRRVGLQMLGTKPPPARSGVAIFSQGQQVGQVTSGCPSPSAGRNIAMGYVAENLKAPGTKVEFKVRDKLYEAEVTKMPFVKANYYNRPKK

SEQ ID NO: 13849 - DNA, 3357 bp, DROSOPHILA
aatttcattcgaaataggcttatttaaattaaattaataacagaaatattgtaataaatcacttacagtttcgtaatttgttgacatttacatgttgtagattcttaattgtcagagtattggcatttcattatgtttcaaagcaccaacaacctgcaaataagcaacggaaatataatatcatgatcaattagctagcacactaccaaaaaccccaaacaaatcaattaaagtgcagtacacaaatagccaaatgacacacctcaaaccacggttttcggctcgatttgaccaaatttgcgcagtgttccaaaatgaaacctaaacatccgaaattaatgtcgatgctgatggcgatgttgatgctgatgctgatcacgcagcaaagtggcaagaaagatatcgctgctgcaccttggcgtctgcacacccttccacttgtaatatggtttcctgtaattacaaaattagactgttagatgcaaaatgacgagatatatattaaaaaaaaaacaagtagctaaacagtttctacgtctgatttggtaggtattatttggcagtcagctggaaacaatatatatatatgcatattgtgcacagagctttttgattgcttaccatatttaaaatactccgctgagggtatgaaaataagcagaattaatgagctaagagacgggccgcttaacaaaaaattcggcaaacaagttcgcttcggaagctggcgcgctgagatagctgactttatgatgatgttgtaatcttaaaactacgcgtgctgtgcaccagcgaaatcagtctgaactcggacttcaagcgcaggagcacgatgtcaaaagacgctggcctttggtcgattcgggtgattttgttgtgcatttgcatccaatggagcgatggacgcaattcgcagtgcttgcacgttcgtttatcccacggcggttggctaattggacgccatttgacaacacacaatggccggcatatgcgagcgtttatgggtgtgccatatgcagagccacctctcgacgatcttcgctttcgtccgcccgtgccgaaggccccttgggagggtgaacgattggcgatcaaggatgcacccatctgcctgcagcgtgatcccttccggcgcgacatgatactggagggttctgaggattgcctttatcttaacgtttacacgccggagaggccgagaaccaatggatctttgcctgtgatggtgtggttccatggcggcggctggcagtgtggctccggtattagtagcttttacggtcctgatttcctgctcgaccacgacatcgtcttggtttcggccaactttcgattgggaccattgggattccttagcacagaaacgctcgattgtcccggcaacaatggcttgaaggatcaactggaggttctgcactgggttcgtgcgaacattgcatcatttggtggtgatccgaacagtgttacggtctttggcgagagcgccggaggtgccagtgtcacctatcacatgctgtcggagaagtcgcgcggcctactgcatcgaggtatcgcccagtctggcacctatttcaatccctgggcacagcctgcacataagggagtggccgctggaagggcaaccaaattggcccaaatagtgggctgcggcaacgccggtgaatggccggaaaaactggagtgcctgaggaagaagccagcggaggatatagtggcctccctgtacgacatgttcgtaagtacttgtagtctgcaaaagatttgcacagggtaattaattaattcgcaaaattaaggagttttaactaacctgatagtacaattatgcaatttacattcaaagctagacgtagccttataaccaatttcaatgaaggctctccaaatcgccacttatgtaaattacttttgttacaattgatatacaaaacggagagtgtcaccagcaagacttttgttgaaaaaaggtagagctggtattgaccaaaaatgagtacaatgcagctgttattaaacaaatatggtgaagggaaggtcaagctttacctttagctttcttttgtattgcaggtctgggactttgatccgatgataccatttccgcccgtggtcgaaccggagcacgatggcgccttcctcacagtggcacctcgccaggcggccaagccacatggactgcaacttccactcatggtgggcgccaccgccgaggaaggtctcctgaagaccgccgccctgctcaatcttccccagctgttggccgagtttaagtctcagtttgagcaggtcctgcccgtcgtgctcaactacgatcatcatgacgattccgtgcggcaaacgattacgcagcgcatcgaaagcttctacttcaagtcgggccacgattacgacaaggccaaccaccagaacctgaccgacgtgagtggacggatcgccaatctagatgaattaagagttcattaatccaatcagcatctgtgtacaaactccttactccattttagctgatctcggatggatggtttgtggccggaatcgatgagtacttgcgcctccgcatgtcccaagaggacgtggcccccacctatgtatacctattcgatcacaagggagctgccagttttacggagattttcaagggcggccgaaacgagttctatggagcgtgccatgccgaggagctccagtacttgttccccattggccgggagttatttgtgagtgcggtgccgacgcaaaaggatctggaactccgcgaattaatgctccatctgtgggttagctttgcgaagaccgggtatatgccatttaaatataactcttttttttaatcgaaactaatgataatttctccacagcaatccaaatcccacgaatgttagctttcatctgccgaactggagtcccgcctctagttatccagtggaattcgctcgactgggcaccaaaatggaggactccgcatccatttttcgacttgaaaacgagcttatgcagcaccgggtcgacttttggcgggacctgcagccccatttgcccgccagtcacgcccacaacgagctgtagtcgtccatcaagtcgttgttcaaattcaattcacattttgtctcattcaattgttgtatttcaccacaaattataaattttactgtacttaaattttttgcgcatttgccgccaacttaacgggattttggagctgccagacgggcacaagcttttgcgctgccagacctgtggtattgagcagttaaccagtgttgggtattttggcactgatggctcagcgttgccgcatcgacgtaaaaagttaagtatgtgtaacaaaacaattgagaaaataatagagctttggca

SEQ ID NO: 13850 - DNA, 1584 bp, DROSOPHILA
atgggtgtgccatatgcagagccacctctcgacgatcttcgctttcgtccgcccgtgccgaaggccccttgggagggtgaacgattggcgatcaaggatgcacccatctgcctgcagcgtgatcccttccggcgcgacatgatactggagggttctgaggattgcctttatcttaacgtttacacgccggagaggccgagaaccaatggatctttgcctgtgatggtgtggttccatggcggcggctggcagtgtggctccggtattagtagcttttacggtcctgatttcctgctcgaccacgacatcgtcttggtttcggccaactttcgattgggaccattgggattccttagcacagaaacgctcgattgtcccggcaacaatggcttgaaggatcaactggaggttctgcactgggttcgtgcgaacattgcatcatttggtggtgatccgaacagtgttacggtctttggcgagagcgccggaggtgccagtgtcacctatcacatgctgtcggagaagtcgcgcggcctactgcatcgaggtatcgcccagtctggcacctatttcaatccctgggcacagcctgcacataagggagtggccgctggaagggcaaccaaattggcccaaatagtgggctgcggcaacgccggtgaatggccggaaaaactggagtgcctgaggaagaagccagcggaggatatagtggcctccctgtacgacatgttcgtctgggactttgatccgatgataccatttccgcccgtggtcgaaccggagcacgatggcgccttcctcacagtggcacctcgccaggcggccaagccacatggactgcaacttccactcatggtgggcgccaccgccgaggaaggtctcctgaagaccgccgccctgctcaatcttccccagctgttggccgagtttaagtctcagtttgagcaggtcctgcccgtcgtgctcaactacgatcatcatgacgattccgtgcggcaaacgattacgcagcgcatcgaaagcttctacttcaagtcgggccacgattacgacaaggccaaccaccagaacctgaccgacctgatctcggatggatggtttgtggccggaatcgatgagtacttgcgcctccgcatgtcccaagaggacgtggcccccacctatgtatacctattcgatcacaagggagctgccagttttacggagattttcaagggcggccgaaacgagttctatggagcgtgccatgccgaggagctccagtacttgttccccattggccgggagttatttgtgagtgcggtgccgacgcaaaaggatctggaactccgcgaattaatgctccatctgtgggttagctttgcgaagaccggcaatccaaatcccacgaatgttagctttcatctgccgaactggagtcccgcctctagttatccagtggaattcgctcgactgggcaccaaaatggaggactccgcatccatttttcgacttgaaaacgagcttatgcagcaccgggtcgacttttggcgggacctgcagccccatttgcccgccagtcacgcccacaacgagctgtag

SEQ ID NO: 13851 - protein, 527 aa, DROSOPHILA
MGVPYAEPPLDDLRFRPPVPKAPWEGERLAIKDAPICLQRDPFRRDMILEGSEDCLYLNVYTPERPRTNGSLPVMVWFHGGGWQCGSGISSFYGPDFLLDHDIVLVSANFRLGPLGFLSTETLDCPGNNGLKDQLEVLHWVRANIASFGGDPNSVTVFGESAGGASVTYHMLSEKSRGLLHRGIAQSGTYFNPWAQPAHKGVAAGRATKLAQIVGCGNAGEWPEKLECLRKKPAEDIVASLYDMFVWDFDPMIPFPPVVEPEHDGAFLTVAPRQAAKPHGLQLPLMVGATAEEGLLKTAALLNLPQLLAEFKSQFEQVLPVVLNYDHHDDSVRQTITQRIESFYFKSGHDYDKANHQNLTDLISDGWFVAGIDEYLRLRMSQEDVAPTYVYLFDHKGAASFTEIFKGGRNEFYGACHAEELQYLFPIGRELFVSAVPTQKDLELRELMLHLWVSFAKTGNPNPTNVSFHLPNWSPASSYPVEFARLGTKMEDSASIFRLENELMQHRVDFWRDLQPHLPASHAHNEL

SEQ ID NO: 13852 - DNA, 4720 bp, DROSOPHILA
caagtaggtgcttaaatgtaattacgaagctgaatttagatgtctttgtcttaatttgatagttattgcatattcaaaatgcattagaaatgcctaatttaaaaacaaaatgcaaatgaagttgcttttagaaagttaataaaattacctttatgtttttacatctgcaaagatcctctaacttctagtaacatctctattttaagcttagtaaaactaggtttcatctaattattccatatatgtttagtcatttagctacgtagttctcctcctccgactttccgaagtaatcgtcggatttgtagatctccacaggctgatattcctcctcgacgagattggatcgtggcagggagctgagtgtgctggtatcgctggcacttaacttggccttcagcggcttcaggagaagtcccttgaggctgtagtctgtgacatgcagctcctcctcggctatatccacagatctttccacttccgacaaattggcactaactacacccacacattgctccagaccatcgattctggccttcagttgctcgaaactgtctgtgaaacctagtatagagcagacgttgttggccatcatgccattggattccgcacgcacctaaaagtcaataaactattagtgaaaacactaactttaaagaaaacaactaaccgaagccaacaaagtctcaaattcatccaatctggccagcatatcctcgatattcgtgcacagtggatttatctccttctccaggtcggcgctctgcagtatctttgcatagtcccgtgatacattctcaatattcgattgcatatttcaggcgttggtttaattagctgaatatttgtaaatacaagcaacaattgttttcactttcgaccagtgtgaccataattgaggagggtaaaactcctatcagctaaagtgtgaccccaaagcatttgcccgctgtcccgctgctgctcattctggtcatactgttttctattgattttggaaattgttagcttgcagcatttgcttggatttgtagcacaatgagtggatatcgaggcattggcggtgggggcttcccctaccgcaagccagcaagttccggcaacaacatgaacgccgtaccgccgcccccgatgctgaatgcccgtggctattctggttcccgcggaggatttggaggagcaagccgtggcggtgtcaccgggagcactacatcaacgtccaagcacggctactccaccttggactccatcagccagtacaccaatgccaccaatctggttggcaaaaggaagcaccacacggacgatgactatttcgatgatgacgatgagccccgggaaaaggagatagaacaagcctatataccggcaccaggatccccgggagctccgccaacgtcggccaaaaagcaagaggattccgattcggatgaggatcccctcgagcagttcatggcgggcatcaaccagcaggtggagaaggagaagcgtcaacaagcacctaagccgccaactcaggcggtgagaggtgacatcgatgacgaggacgatgaggagagctactatcgctacatgaaggagaatcccaatgctggacttcgcgacgagggatccgatcaggaaatcgaatacgatgaggatggcaatcccatagccccaccgaagaaaaaggacattgatcctctgccgcccatctaccattccgaaatcgagtacgaacccttcgagaagaacttctacacgcagcatgacgacatagccgccctggatgatgagcaagtccgggaattaaggcgcacacttggcgtaaaggtcactggtccatcaccacccaaaccagtcacgtccttcggccatttcggctttgatgagcaactcatcaaggccgtgaggaaagcggagtatacacagcccacacccatccaggcacaagcagtgcccaccgccctgtccggcagagacatcattggcatagccaaaactggttccggtaagacagcagctttcatctggccgatgctaatgcatgtgatggatcagaaacagctgaagccaggcgacggacccataggacttatcctagcacctacacgcgagctttccctgcagatctacaacgaggccaagaagtttggcaaggtctacaacctgaacgtggtctgctgctacggcggaggctccaaatgggagcaaagtaaagctctggaacagggagcggaaattattgtggccacgccaggacgtatgatagatatggtcaagatgaaggccaccaatctgaggagggtcactttcctagtgcttgacgaggccgaccgtatgttccacatgggctttgagccccaggttcgctccatctgcaaccacgtgcgtccagatcgtcaatgcctaatgttttcggccacctttaagaagcgaattgaacgtctggccagagatgtgctttccgatcccgtgagaatagtgcagggagacctgaacgaggccaatcaggacattacacagtctgtgtacgtcttccccaatcccctgcagaaatggaattggctgctgtgccatctggtgaagttcctttccgaaggaagtgtcctgatctttgtgactaaaaaagtagatgctgaaacggtgtctaacaatcttttaattaaggagtacaattgtcttttactccacggcgatatggaccaagcggacagaaacaaggtcatcactcagtttaagagaaaagagtgcgatattctagtggccaccgacgtggcagccagaggattggatataccccatattaggaatgtggtaaactacgacacagccagggacattgaaacccacacgcacagaattggaagaacgggcagagccggtgaaaagggtaatgcatacactctagtcaccgataaggacaaggagttcgccggacatctggtgcgtaacttggagggagccgatcagctggtgcccgacgatctgatggagctggccatgaagagttcctggttccgcagctcacgcttcaagcagggcaaaggcaagagaccaacaaatacccacacaggattgggctatcgggagaaaggaaatggaggtggtggctatggttcggctggtggctcggagtccactgcgagtgtgtctgcccacagtccttccgacggaccctctagcaaagccttttcgagctcgggaccagccacagatcgctatacagcaatgagggaggcattccgatcccagtataacaatcagttccgtgcgtccagcgatcgcacttgggagaaaactctgccggagtcgggagttttcgctgcgccaatggcaccgccctcatcatcaacacagggtgcttccgcctcatcggccaacaacagcagcaaccaggatgccaaaagagccaagaagagtcgctggaattgaacgacgagcccaataaactgatgctgctatttggtttatttctcttcatattatttaatgtgtatttgcttttgttccatcgtttaaaattacaacttatgaactaaatttaaacatattatatataatcagatatataccatgttcattcataaagattacgttagttaaatactcgtatgtacaactctcttccttcgcagccagttccagcgaacgatcccacagatccaaataaaaatattcattaattgtaatcatggttatgtgtattttattttgaataaaatcacatttgcgcatcccaactgcctatcgatattgttaatcgttaatcgtgtcattttaattttaatttttccatttcattaagcgagagaagaaatcgaactggaatatcgaaatcttgaagctaaattgttcgtttaatcattatgaaatattgttttacaatgaaaccactacgaattttgtttctttttcgcttttggatatacgtgtttatattataattaaattacgtgtgtttttgataacattgagaagagatttgagattcatttaactaccacatcgaggcgatttcgcgtaaattttcgactttttcgatttattcgatttttttttcgatttgtttcgttttgttaagcgctgaacggggaataagccggggcaaagcttaaaaatttcgctatatttgaatatcatatcagatacgtacatgaatatatatatatattccgttatatatagttcgcgtatatactctattcaaagactcgtcggtgtgtgggtgttatacatatatatatgtatatatatatatatttgtatataaaaattggtccatgttaaccacatcgtacgaaacaaatcggaaaatcaggagaaaatccaaaaagaaaacgggggaaaattgtgtgggaaaataagacgcaaacgaaaattataacactttaattttagttttgaaatactttttgttttcttcatttattattatcattatttaaatgtattaattagcttttgtgtgtttttttttggggggaggggttctgttttttgttgttgccgcatatataacatacatatccaatatatacaatatattttagatctagcattaaatttgatttacacttttaatagtttgtttctctcttccactaattatgcagtttcgctttgtcacttaattgtacacatttactttctgttcgttatagttaatattatcttaatatttcctcagctggtctgttaaatttcgtttatcgtttaccaagctaaatcatttactttt

SEQ ID NO: 13853 - DNA, 2720 bp, DROSOPHILA
attgttagcttgcagcatttgcttggatttgtagcacaatgagtggatatcgaggcattggcggtgggggcttcccctaccgcaagccagcaagttccggcaacaacatgaacgccgtaccgccgcccccgatgctgaatgcccgtggctattctggttcccgcggaggatttggaggagcaagccgtggcggtgtcaccgggagcactacatcaacgtccaagcacggctactccaccttggactccatcagccagtacaccaatgccaccaatctggttggcaaaaggaagcaccacacggacgatgactatttcgatgatgacgatgagccccgggaaaaggagatagaacaagcctatataccggcaccaggatccccgggagctccgccaacgtcggccaaaaagcaagaggattccgattcggatgaggatcccctcgagcagttcatggcgggcatcaaccagcaggtggagaaggagaagcgtcaacaagcacctaagccgccaactcaggcggtgagaggtgacatcgatgacgaggacgatgaggagagctactatcgctacatgaaggagaatcccaatgctggacttcgcgacgagggatccgatcaggaaatcgaatacgatgaggatggcaatcccatagccccaccgaagaaaaaggacattgatcctctgccgcccatctaccattccgaaatcgagtacgaacccttcgagaagaacttctacacgcagcatgacgacatagccgccctggatgatgagcaagtccgggaattaaggcgcacacttggcgtaaaggtcactggtccatcaccacccaaaccagtcacgtccttcggccatttcggctttgatgagcaactcatcaaggccgtgaggaaagcggagtatacacagcccacacccatccaggcacaagcagtgcccaccgccctgtccggcagagacatcattggcatagccaaaactggttccggtaagacagcagctttcatctggccgatgctaatgcatgtgatggatcagaaacagctgaagccaggcgacggacccataggacttatcctagcacctacacgcgagctttccctgcagatctacaacgaggccaagaagtttggcaaggtctacaacctgaacgtggtctgctgctacggcggaggctccaaatgggagcaaagtaaagctctggaacagggagcggaaattattgtggccacgccaggacgtatgatagatatggtcaagatgaaggccaccaatctgaggagggtcactttcctagtgcttgacgaggccgaccgtatgttccacatgggctttgagccccaggttcgctccatctgcaaccacgtgcgtccagatcgtcaatgcctaatgttttcggccacctttaagaagcgaattgaacgtctggccagagatgtgctttccgatcccgtgagaatagtgcagggagacctgaacgaggccaatcaggacattacacagtctgtgtacgtcttccccaatcccctgcagaaatggaattggctgctgtgccatctggtgaagttcctttccgaaggaagtgtcctgatctttgtgactaaaaaagtagatgctgaaacggtgtctaacaatcttttaattaaggagtacaattgtcttttactccacggcgatatggaccaagcggacagaaacaaggtcatcactcagtttaagagaaaagagtgcgatattctagtggccaccgacgtggcagccagaggattggatataccccatattaggaatgtggtaaactacgacacagccagggacattgaaacccacacgcacagaattggaagaacgggcagagccggtgaaaagggtaatgcatacactctagtcaccgataaggacaaggagttcgccggacatctggtgcgtaacttggagggagccgatcagctggtgcccgacgatctgatggagctggccatgaagagttcctggttccgcagctcacgcttcaagcagggcaaaggcaagagaccaacaaatacccacacaggattgggctatcgggagaaaggaaatggaggtggtggctatggttcggctggtggctcggagtccactgcgagtgtgtctgcccacagtccttccgacggaccctctagcaaagccttttcgagctcgggaccagccacagatcgctatacagcaatgagggaggcattccgatcccagtataacaatcagttccgtgcgtccagcgatcgcacttgggagaaaactctgccggagtcgggagttttcgctgcgccaatggcaccgccctcatcatcaacacagggtgcttccgcctcatcggccaacaacagcagcaaccaggatgccaaaagagccaagaagagtcgctggaattgaacgacgagcccaataaactgatgctgctatttggtttatttctcttcatattatttaatgtgtatttgcttttgttccatcgtttaaaattacaacttatgaactaaatttaaacatattatatataatcagatatataccatgttcattcataaagattacgttagttaaatactcgtatgtacaactctcttccttcgcagccagttccagcgaacgatcccacagatccaaataaaaatattcattaattgtaatcatggttatgtgtattttattttgaataaaatcacatttgcgcatccc

SEQ ID NO: 13854 - protein, 791 aa, DROSOPHILA
MSGYRGIGGGGFPYRKPASSGNNMNAVPPPPMLNARGYSGSRGGFGGASRGGVTGSTTSTSKHGYSTLDSISQYTNATNLVGKRKHHTDDDYFDDDDEPREKEIEQAYIPAPGSPGAPPTSAKKQEDSDSDEDPLEQFMAGINQQVEKEKRQQAPKPPTQAVRGDIDDEDDEESYYRYMKENPNAGLRDEGSDQEIEYDEDGNPIAPPKKKDIDPLPPIYHSEIEYEPFEKNFYTQHDDIAALDDEQVRELRRTLGVKVTGPSPPKPVTSFGHFGFDEQLIKAVRKAEYTQPTPIQAQAVPTALSGRDIIGIAKTGSGKTAAFIWPMLMHVMDQKQLKPGDGPIGLILAPTRELSLQIYNEAKKFGKVYNLNVVCCYGGGSKWEQSKALEQGAEIIVATPGRMIDMVKMKATNLRRVTFLVLDEADRMFHMGFEPQVRSICNHVRPDRQCLMFSATFKKRIERLARDVLSDPVRIVQGDLNEANQDITQSVYVFPNPLQKWNWLLCHLVKFLSEGSVLIFVTKKVDAETVSNNLLIKEYNCLLLHGDMDQADRNKVITQFKRKECDILVATDVAARGLDIPHIRNVVNYDTARDIETHTHRIGRTGRAGEKGNAYTLVTDKDKEFAGHLVRNLEGADQLVPDDLMELAMKSSWFRSSRFKQGKGKRPTNTHTGLGYREKGNGGGGYGSAGGSESTASVSAHSPSDGPSSKAFSSSGPATDRYTAMREAFRSQYNNQFRASSDRTWEKTLPESGVFAAPMAPPSSSTQGASASSANNSSNQDAKRAKKSRWN

SEQ ID NO: 13855 - DNA, 6492 bp, DROSOPHILA
tttccagcatgaagtttgtggttgtctcatttgagactcgagcgagagaagcatatttttgttagaaacaaacacattttataaataaataccagctatgaaaactaattttttatataattttattgaaattttagtctttttttactgtaacgtgttcttggttggttttgcttgctcggctcattgttaacttattggctaacatcgcaaggtgccgactgttgtttctcctggctcgttataaaatatatgtgtgaaatgtttgttgctgtgttggttcgggtttcagatttcaaatttccgatcaccgatttccggttcctgtctgcatttagtctaatttgttcggttgtcgtctgcatgctaaaacgttgcactcggcggcttgcatcaaaaaataaaaggcatacgaatccatagtattagtaatgataacagttcctactttaggttagttcgtgagtttacatagttagatagttcgtcgttggttagtttggggcctcgaccgcaactcagtacatagcacgatgtgtaaagacgtccacttctcattcccttccactccattcctctatttgattctgtttattttagttcgctaatgcagttcacttcttcgttcttttgctttatttatcgtgtgtagtgtaggctagcacttagtaaatagttataaacatgctttgctttgttttcaacaaattccacgtactaaaaaaataatacatttacaactaataatttagattaaacatatacgtttgttctgttgcctgatgatgctgcgtatatagatcgtagttatgttttacatagctatatatcgtatatatacatatatgtatatatgtatatatattacgggtgtacggtgtgtcgtgtgtggttcataaactcatttaggctacatttggaatacaaaatacgcaacataaaacctttaaaactcttgctcctatcaataaattaccgaaatcaatcgcctagctttaacctagatcaccgactgcttctgttgctgctcctgctcctgctgcttgacaagattacgctgatagttgaccaagtccactttattgaactaaattaccgtcccgccgggcgccgccgcctgtccaggtgacaagtgctgagtggcgtgctgtcaaagaagggtatatcattaaaaatattgcccgcttcgagtctatagaatcaaggtgtcgcactcaccgtggcatgacctggccgcgcccaggtgtagatgaatccatcctggcacgccgtcaggaagcagtcctcgcgaaagatcagcgccgtcagccgctcgtgggcgatcttcttgcagaccagcggctccagcagtgggcactcatcgaaacgggggcaggcaggagttccgataagctgcatgggatcgaagctgctgacaccggagccagagcccgctgcagatcccgacgcatgggcggctgtggccaatgaggagtggtgcgaggaccggctcagtttcagtgatccgaaactatgcgccgtcgagctgctgccaatggccccggctgcattcgaatccagagtgctcgagtggccaaagttggaggagctgctgttgttactctggctgtggttgttgtgtccgccagtgtggttgtgttggttgtagctcttcagcatgctcattgccttgcggtgctgacggtgcgcggtggaatggcttccctcatagccagcgcccttcttttccgagctgctcaggaaactgaagttcgagagacgctgcgtgaggctgttgaaggcgctgaagccgctgcccgagttggaggacttgttcgagctgttggaagtcttgctgttgtatcccgatgtagtctgcgacggcctctgtccactcccgctgccgccgcctccgtcaatgctgtctgacttggtggcgctgatgcagttggggaatttgattgagttgccagtgccatggttgcggttgttctgcttcgttgaggccaccgctcccgctccagccaccgagcctgcgcccgcattcgatgaagttgaggcgggagtggctgcctcggtgtcgcagtcgtcgggcgaggattgcgaggatatcgtgcagttggcggttgagaacttgctggaactgctattgctgtgctcgccagcaccgttccctgtgcctccgcccgctgcttcccgtgttggactacagctgcccgattccgcttgctgtccagtcgcttgaccagacatggccactggtcggattacctttatgccgtcttctgcttccgcttcttcgtcgacaccaccgttgagataggccctttcactgttagcgggctgccttaacaccaatgggtggcgtagaacgtcctccgtgatgtcccataggcagatctgggtatcctgactgacggagccaagtctataactcattagcttttcggccgaagaagcgtccgagcgaaaggaggccgagtgtggtccgttgcggtcagcgtgaacgggtgtggagtttcggtcgaaaccctcgaagccaccgttggccgtggaatctccggagaagcgcgcctctcgcgaatgggagtactcgttcatttgattctcatcgtcgctgaagtcgccgccatcccagtttgtgtacgaggtggtatacgggtcaaacgctaccacagagacccaggaccgatggccctgtccgcgagccactacacgtcgctcgtggagcgaccacacagtcaccaggtcatcctcgccacccacgacaatgtacttgccgtcaggggaccagcacacgcagaggaagccgccaaagtaggagcgtgcgattccgagcagctccatggtgtcgtagtgaaagacgcgcaggaaaccgtcctgggaaaccaccgccaagtgagatccgcaaggcgagaagcagaactcattgacgcagcagttgtcggtgctgaagacccacttgaagagcgggttccttgtggtcttggacttgctggtgagtatcgtgtagccgtcgccaagcttgaagggctgatagctgggcgctgtggcggcgcagggtagttcctcgttgtacaggtacaggtgacctgaggcgtgggcggcgaggaacaggtgcggtgagttgggtagccactttaggcaggtcactttggtcttgtcgatcagtcgctgaaaaacacacataataatcagtttgctttgaagggctatatatatatatatctcaggtggaacactcacctcctcgttgaagagcttcctcacttcccgaggaccaacgtgcggggagaccagctggatttgacctgtggtgaagcccaccagaaggggcgctcccgtgggcgtggccgagcttatgttgaagtcgtggcagctgggattggtgcccttgtagaacttcttatcgatcggcttgctcatctccgtgccctgaaagtaagtcaacaagagtcactatcatctgtttatatttatcttagtcgttctgaattgcgttacgttttcctattgtaaacctaaagaggcaagaaactctttgaaataaaacgttcactgaatggaagccaagtttatataatatcttgtgaccaagatggaaatgtttataagctgtccaccctattgatatcataagctcgatgctttgtgcaacaagatgctattggatgagagcttgtataaacaaatcactgaaatataagtcatcatcatagaataattttcaagattaagaatatgaatgcagtgaaagtcaaatggcaaagcggaacaggctcaaataatttcgtttgagccaagtttggaatggaagaatacgttcagtgggttgaaataagattggaaattaacacattcggaaagcggagtggaaattaacagcttgttggcggaatcaggtgggaaaagctctatgcaagccttgccaagttctcgccagcagataactatggcaacaaagaagccagctaaagcaaatacataaggagaatcgcaagctgttgccgcacagaatgccaaagaattagaaacagctgctgggcaggggaaacagggcaaacacaagcgacgcgatgagcaattcggatggtcgaaagccgcaccaggattactctatcggaatgttcgttgactacagcaggtgcaaacaaaagttagggtaatccgcgcgcagggatgagctgaaaccgctcacaaccgactgccttcgagcgcaataaacattcataaaaacgccaaacaagcgaattgatcatcaagcgctcgaagtggagcaaattaagcacactggggggacactgcatgcaaatggcaaggtattttaggccctcgccaattggctggtgcaatccgcctggaatgcaattgccggcagcctctattctatctctggtgtgataagctcgctgcaccgccacctgcaccatttctcctccatcgcacgtgcttgcgcatggagactatctctggccgacaatgtttaccttcttggctccgcgaaaggagtaaacgtagagatctcgtccgaagttgaagcatatgcgatcgcctcctaggacctgattggtggccacgccattctggtcgacgacgccgccgttcatcatggagtgcatggatatgccgccgcccagacgcgcctccacagtgttgtttccggcactgttgctgttgtggttgctgtggctatagtcaccgccagcgcctccattcgatattgctgtgctggctccggctgctcccgtaggcgacgctcccggcgagctgccattcgttgtggtggtgttggctcctgctgttccgccgcccacaggtgtgcccacgcccacatccgagccgagcttgccctgcgccggactgggcagggtcaccatggagacgcgcacctgcggcgagctctggttgctgctgtagcccacccggttgggccgcgagtattccgagagggtcagcaggcggtaggtgccctcgcgggtgacgaactgcgtcttcaggtcgtccttcacactggcgtccagttggttggccatcgctggtgcggctcccgcttctgctcctctgctgctgctgcgccttcgccgatccaccgatccactcggcactcagcccatgtgaatgccaggtgccagtggtgctagtggtggctctgcgggcgctgcagttgctcctacccagccacgaaaatcgctggctgtcgccgctaattaagcgccgcggggttgggcttgcccttcacttgttttcttcttataattagatttaattccttcactacaccgagtttcgtggggctgtgcttgcactgttgttgtttctgccgttgcagctgcgttcgccaagttttccgagttttccggccactgcgctggttgcctgcatcacggcgtggtggcggcggggtaagggtgacggggatcgcggttatcgcatcggccgcacgcttgcttttattccgcacaaattacttaatttatttctaatttctgattgggcttagcgatgtgagaaaacgtcgatactttccgtcgatactgttcgatgttcgaagagctggatttacaacgctccaaagactggtcactcttaacgatttaaggccgaaatatataaattgcttttgttattactttcttaagacaagtgcacttaaagatttagcatcttatgtataaaatatttacgagcattatcattgaaacaaaatatttccagtgaaggcagccagactgtccaaaatagtttgcaatcaatgatgccaatatttttaataatgggcagcattaaaacgcttggcgcgtaatttgaatttcatgatattcataaattccatttttttttatgaaaaatatgaaaataataaagttctaactttaatgttaaagtttttagttatataacctaactttggttattttgtaagtccattttatgattcctttttcctttttgaacttttccagtattcattttttttggtttatcaatggacaaccaacaaaataaacaacattcgacagaaaccaatgacagtgacttgcgttattccagccactggtagtgtgtgtgtggtgttagccggaaatgcatttggcatgtcctgcgaaattggccagtgaagaagaagaagaatgaagctgctgttttgctgcccttccgccttttacttgctcccattttctcgttactttgcactgccaattgcattgaagttcccagctaaatctcgtttgggacacatgtcttttgtcttggcattgtcaccctaggaattccacccccccccccccccatcagcttagtccgaccaagtgggatgggcaaacaagcgacgacctcgagcagcgcatcgaactcgaatcaatcaagagcgattgataagaatggccacttgaggggccggactgcttgtataaaaaccatctgcaacagcaggaaaattaaccactttcactaaaaccatgcatccgcaaggtgagtatatgccctcgctattcgtcgcaattcgaagga

SEQ ID NO: 13856 - DNA, 3207 bp, DROSOPHILA
ttttctcacatcgctaagcccaatcagaaattagaaataaattaagtaatttgtgcggaataaaagcaagcgtgcggccgatgcgataaccgcgatccccgtcacccttaccccgccgccaccacgccgtgatgcaggcaaccagcgcagtggccggaaaactcggaaaacttggcgaacgcagctgcaacggcagaaacaacaacagtgcaagcacagccccacgaaactcggtgtagtgaaggaattaaatctaattataagaagaaaacaagtgaagggcaagcccaaccccgcggcgcttaattagcggcgacagccagcgattttcgtggctgggtaggagcaactgcagcgcccgcagagccaccactagcaccactggcacctggcattcacatgggctgagtgccgagtggatcggtggatcggcgaaggcgcagcagcagcagaggagcagaagcgggagccgcaccagcgatggccaaccaactggacgccagtgtgaaggacgacctgaagacgcagttcgtcacccgcgagggcacctaccgcctgctgaccctctcggaatactcgcggcccaaccgggtgggctacagcagcaaccagagctcgccgcaggtgcgcgtctccatggtgaccctgcccagtccggcgcagggcaagctcggctcggatgtgggcgtgggcacacctgtgggcggcggaacagcaggagccaacaccaccacaacgaatggcagctcgccgggagcgtcgcctacgggagcagccggagccagcacagcaatatcgaatggaggcgctggcggtgactatagccacagcaaccacaacagcaacagtgccggaaacaacactgtggaggcgcgtctgggcggcggcatatccatgcactccatgatgaacggcggcgtcgtcgaccagaatggcgtggccaccaatcaggtcctaggaggcgatcgcatatgcttcaacttcggacgagatctctacgtttactcctttcgcggagccaagaagggcacggagatgagcaagccgatcgataagaagttctacaagggcaccaatcccagctgccacgacttcaacataagctcggccacgcccacgggagcgccccttctggtgggcttcaccacaggtcaaatccagctggtctccccgcacgttggtcctcgggaagtgaggaagctcttcaacgaggagcgactgatcgacaagaccaaagtgacctgcctaaagtggctacccaactcaccgcacctgttcctcgccgcccacgcctcaggtcacctgtacctgtacaacgaggaactaccctgcgccgccacagcgcccagctatcagcccttcaagcttggcgacggctacacgatactcaccagcaagtccaagaccacaaggaacccgctcttcaagtgggtcttcagcaccgacaactgctgcgtcaatgagttctgcttctcgccttgcggatctcacttggcggtggtttcccaggacggtttcctgcgcgtctttcactacgacaccatggagctgctcggaatcgcacgctcctactttggcggcttcctctgcgtgtgctggtcccctgacggcaagtacattgtcgtgggtggcgaggatgacctggtgactgtgtggtcgctccacgagcgacgtgtagtggctcgcggacagggccatcggtcctgggtctctgtggtagcgtttgacccgtataccacctcgtacacaaactgggatggcggcgacttcagcgacgatgagaatcaaatgaacgagtactcccattcgcgagaggcgcgcttctccggagattccacggccaacggtggcttcgagggtttcgaccgaaactccacacccgttcacgctgaccgcaacggaccacactcggcctcctttcgctcggacgcttcttcggccgaaaagctaatgagttatagacttggctccgtcagtcaggatacccagatctgcctatgggacatcacggaggacgttctacgccacccattggtgttaaggcagcccgctaacagtgaaagggcctatctcaacggtggtgtcgacgaagaagcggaagcagaagacggcataaaggtaatccgaccagtggccatgtctggtcaagcgactggacagcaagcggaatcgggcagctgtagtccaacacgggaagcagcgggcggaggcacagggaacggtgctggcgagcacagcaatagcagttccagcaagttctcaaccgccaactgcacgatatcctcgcaatcctcgcccgacgactgcgacaccgaggcagccactcccgcctcaacttcatcgaatgcgggcgcaggctcggtggctggagcgggagcggtggcctcaacgaagcagaacaaccgcaaccatggcactggcaactcaatcaaattccccaactgcatcagcgccaccaagtcagacagcattgacggaggcggcggcagcgggagtggacagaggccgtcgcagactacatcgggatacaacagcaagacttccaacagctcgaacaagtcctccaactcgggcagcggcttcagcgccttcaacagcctcacgcagcgtctctcgaacttcagtttcctgagcagctcggaaaagaagggcgctggctatgagggaagccattccaccgcgcaccgtcagcaccgcaaggcaatgagcatgctgaagagctacaaccaacacaaccacactggcggacacaacaaccacagccagagtaacaacagcagctcctccaactttggccactcgagcactctggattcgaatgcagccggggccattggcagcagctcgacggcgcatagtttcggatcactgaaactgagccggtcctcgcaccactcctcattggccacagccgcccatgcgtcgggatctgcagcgggctctggctccggtgtcagcagcttcgatcccatgcagcttatcggaactcctgcctgcccccgtttcgatgagtgcccactgctggagccgctggtctgcaagaagatcgcccacgagcggctgacggcgctgatctttcgcgaggactgcttcctgacggcgtgccaggatggattcatctacacctgggcgcggccaggtcatgccacgcgtaatcttgtcaagcagcaggagcaggagcagcaacagaagcagtcggtgatctag

SEQ ID NO: 13857 - protein, 908 aa, DROSOPHILA
MANQLDASVKDDLKTQFVTREGTYRLLTLSEYSRPNRVGYSSNQSSPQVRVSMVTLPSPAQGKLGSDVGVGTPVGGGTAGANTTTTNGSSPGASPTGAAGASTAISNGGAGGDYSHSNHNSNSAGNNTVEARLGGGISMHSMMNGGVVDQNGVATNQVLGGDRICFNFGRDLYVYSFRGAKKGTEMSKPIDKKFYKGTNPSCHDFNISSATPTGAPLLVGFTTGQIQLVSPHVGPREVRKLFNEERLIDKTKVTCLKWLPNSPHLFLAAHASGHLYLYNEELPCAATAPSYQPFKLGDGYTILTSKSKTTRNPLFKWVFSTDNCCVNEFCFSPCGSHLAVVSQDGFLRVFHYDTMELLGIARSYFGGFLCVCWSPDGKYIVVGGEDDLVTVWSLHERRVVARGQGHRSWVSVVAFDPYTTSYTNWDGGDFSDDENQMNEYSHSREARFSGDSTANGGFEGFDRNSTPVHADRNGPHSASFRSDASSAEKLMSYRLGSVSQDTQICLWDITEDVLRHPLVLRQPANSERAYLNGGVDEEAEAEDGIKVIRPVAMSGQATGQQAESGSCSPTREAAGGGTGNGAGEHSNSSSSKFSTANCTISSQSSPDDCDTEAATPASTSSNAGAGSVAGAGAVASTKQNNRNHGTGNSIKFPNCISATKSDSIDGGGGSGSGQRPSQTTSGYNSKTSNSSNKSSNSGSGFSAFNSLTQRLSNFSFLSSSEKKGAGYEGSHSTAHRQHRKAMSMLKSYNQHNHTGGHNNHSQSNNSSSSNFGHSSTLDSNAAGAIGSSSTAHSFGSLKLSRSSHHSSLATAAHASGSAAGSGSGVSSFDPMQLIGTPACPRFDECPLLEPLVCKKIAHERLTALIFREDCFLTACQDGFIYTWARPGHATRNLVKQQEQEQQQKQSVI

SEQ ID NO: 13858 - DNA, 13989 bp, DROSOPHILA
caaggacctcctaaggacgcatataagaccgctatttggataattaatgcaaaggaatccgaattaaaaacttcagcgataaaagagtctgcgcaaagagagagcgcacagagcgaaagaaggggagaaaagaaaaagataaagagagcgagagcgagcgccgcttcggtgggctccaaaaatcacatcgtgcaggtcccatttggaaaaattgcgtctcgcgacacaacgtgcgtccaagtcagcggaaagtttttcgattcgcggcccggttattgaatttgtatatgcgtttgtgcgttgaaaaactccagtttctgtagttatttgtcattgtcgttgtcaatcgacaaccataagctaacccattaaccaattttatctagtgcgaccagtgttaaatatcgattttttcggctaatgcgcgtcgatgacctcgcacacaacaacaacagcaacaattgagagctaaagctgcaagtacacgcagagaaacaacaaaaacgaaataaaagcactcaaaagctgtgtctaagtttttaaagtaagccaaacaacacaaacgttttacataattgccccagtgccaaaagcggcagccacaacaaaaacaacgaagaagaaaacaacggcgttgcaagggggaaaactctcgattgaaagaagaagcagaggaggcagaacaagaaggcggagaagactacccgaaaagagcggcagccgaaaaccgcaaagacacatgctcagataccgtctcgtgtccactcacttcctcaagcagccgtagtgtgcgagcgagcgagacagccacacccgtagaggggggaccgagaacgagcacgagagcgagagagtgtgggtgtaactgcgaatgcacttgcaactgcaattgagagagagagagtgacagcgagagcgagcgatcgcaggatacgattgtgctataaaagtgcgacaggtgcgctctacctgcccattcaccgttagtcgtcgtcggtaactcatttagttgtcgagagttcctctttacatcccagaaagaggcaggatcaaggagcgtactaaagaaaaggggaggaaactcaaactcgccagcgagaaagagagagagagagagggaattcacatccgatccggcactaaaatccattcacaacgtattcgctaggagtgctacgccatttgggtctgagctatagtctagatagcgaaaatgtgcagagatcgcgatatgagtttgtcgtagatcagcgcaaccgtcgttacaaggtcaagaaaaaaattaagctcaagagcgagtaggaaggtgagcgggcaagagcccaaggggcaccgaaacaaagagcacgattgcgtgagattgcgaaatcctggaccaccagcaaccacaataaccagatctagctaccataccaaagttaacaataatagcgaaaggccacaacagcaaaataatagttaatttatctataaggacaccgtcatcgcttccattaacgagtgcgcgtgtgaatcaacggcaatgtgactatcctgcgactctgcatcccaacggttctagccggttcgaaacagtatcttaagcttcgagccaagtgatttcgcgcacccatcggtcttcaattcgatttggtcagtctcagtcatctttttccaccaccagtcgaacggaaaacgacgtgcaactggcgaacgtacggggaaaaaccagcaagattgaagactttgggagaaatctttggaagtccgttaaggcttgcattgtaagtactgcattcacatttgagtaatactaacatagattcataagtggaagtataaaaggtattatccctaagttatttggtattatagcaatagatgtgatcttgcgtatatcgaaccattaacaatagcagaaaatacaattgtgcaggaaacacttattaatagttaataaacacattctagatttctgatcaacactgcgcggcactatgtggtacacaattacccacgaatatttgcaaatgctacgctgtgtttaaagcgaattagttccgtccgtgaaagttacacaatatttgtaaataaacgagcggaaaattgtttctaaaagtatcgaatatggtaaataagcccattatatttccgatgggacgtcttaatttcccgtattttcacacctgtccgccacaattgccgtttattgctgtacatgtatttacataaacgattgccaactaattgcgaggtgtatcagatatggtacatacgtaaataatactttgtttatttctgccaccgccgcggcttataaagaaattaacacatttggccagggcaatggaaaaagttagcgaacgtaataggatccattgcatattttcagacgcctgctgcaaagttgaacaaacgctggcgatttcggggaaaagccactttgataaacatattggtatccattttatcgccatcaatttgtacagtttatttttttgccctatgacaaaggaaagtgttatcttgttagttttgctaccgatttttccattacatttccatttaatcgatccactttgtgttctgttttctgtttctgcgtgcgctttgtttatagtttttttttttttttttacatacagatactgagtttgagtcatgccacaaacagtgggccctacagctaagcggaaagttttccctgccgaaaaagatgtgtcccccacccatttgctttatttgttatcaagcggttttgtcgttttgttaatataatatagcccattttagcgcttttccttttggccccctcggttttgttgccaccaagcttagggattcgtgacgtgcaacgaaaattggtttaccgagtatgttgacccaaaaaattaccatctttattgacagtctacgtttgaatttgtttttcatatatatgactatagttgaacataagccaattaagctgtagtcaatggtggaagtatgcaccacatttgggaagccactgtgtcccgacgacgaaattcaattagcgcgtaaactaaacagattagcaaacagtttttttgcgtttttagccaaattgtgcggtttcatctatttttaggcattgttcgaaaagttcaatgtgtaagcaatcaagcgtgcggttatttttggcattgtttaaatttctatttggcattcggcctggtccactgatcgccatatataaaattatcgcctgggatctctgtgtttgtccagacaaaaacgccactttcatcagggaagtagaagaagggggctggcaatatctcggtattatacgtatggcagagaacaaagtatggatttattatgagagtatggatttattacatattgcaatcgctttattccgttgcaagctaataaaacagcacgtttaactgacttttttaatacaatttatagcgtaagggcacctttttgcaaaaagctttggtaaacaagtttataaatagacagctaaaaacaaatgccttaaatatttacattccaagatacttaatttagaaactaaactagactcacaacgttttttttttttgagcaaacagcaagctgaaagccttagttaacatgtgaaaatcacttaactgtttaagttgtacacttagcaaagctgcagtactttgtttccacagtttgccacatgatcttgtcgttctccactcttcagatcattcattaaaaaaccacgagtcaccgtgcggcgattgaataagacaatcggcatccattagatgcatccgccagggtcgtgtgcctcgattgtggatctcgtgaccaactgtgccgggtggtggcggtcatgtggctggagtgtgtctgggatcagtccgccatgtgacaccattggatagggagcaaattcattcatttggctaagtaagaagattggcctgcgtcgtgttccatccgaaattaaatgttaaaattaaattgaaatcaatgcgaataatttaaatgactggggaaacctgttcacgttgaacgcagctcgtaaattatgacaaccagcttcgcattcccctttcttctgccccttttgttgggttgattttatttatatactcgttggcaaagttcacgaaactggaaaaagaaatttctgattgctgtcgatttttttttatgaactgcagatgccttcatcaattgaaattgattgattctaacgaaagcgggcgaaaataaagacgcgcataaagagagcagaaagcggaatttgtaaattaattgatggaaccaaacgaaacataaacaacaacaacagcagcagcagaaaatgatcaagtgactgccaataaagtgattacgtcacgcggggaaaacgaaggatatgaactttgaacccatgcacacttttttgtcattagctcgattttgttctgaaatttctttccaacattccaacatcttttccagcttattcgtaatttgttaccccttcgcttcggttttcctgctaactttttgtcaatctttgctgtttgctgtttcagccgcgcttcattaaattttagcgagcttcgcatttgcattttggtttcgggcctggtattattccattggcattggcccataacttgttgggtagtctcaagttttctaccccacttcgttccttcttggccagcgttctcgtttgaagttgcgcaatcttcgaaattgcagccgaaaaactcgaaaaaacacgtgacagacattaaccgatttcgtaggttggggtggggtttgtcgaaatagtgacttgtttagtcgatatagcccgtgattgatgccatttgttgcggaaagttacgtttgccagtgtttttcaaaaatagaactttggcaaaaatagaaactcgtttgcctagtttcgaatctaaaaggccacatattatgatcatgtctggccacttgaaatggctgcttgaaattccagtggcagtacataaattaaattcgctatcagtttatgtgaatcggcttgcccttatctaatcggtgtgattaattgtcgttcaattataaacacacatttgtatccattcggggcgtgtacgtgctgtcaactgtgtgcaacggatatctttttttcaagactccgtcagcttggcattccattttccactttcgatgggacttttccggccttgtcttcgcttaatggaattttatggacaatgattgcactgggtgcaaactgaaagtgactcattcggaagccaactaaaagtagctagataaataaataagatctgtgattgctttatttcaataacaacctcaaatccaagaaaaagttcattaacgattatataactcccaagacatcacagtttcggaaacctaagaacctagaattgtaattaaatgcataattcaattgcctaataccattaaatggatggacaagctataaaaactgatatagactagcgttttgttgacgattcggttgccgaattcccgagccactcgaattgatgaaatgtcaacaccgcataccactaaggtatgtattatcaagagagcccccgttcatatcataagcacaattacgctaacactgtttacccactcgatcccaatgtggaggagacctaaaacctctcaatggtcgggtgactaggagagtaatatgtgcggcccggggacgacctgcagtcaccggttaaattccggtttcagccggcgctgggcagtctgaagctgttgttattttcgaagatgtttttgcctggttaccaggtaaatccgacttatcagccggtgaaaatggcttttcaatatttgtactcgagtaatcattggacactctcgacggccagatatattcgcacggtcttgttaaaatgcccaaatctcgcatctcacacgattcgcatagccacaaattgcgcatacgccgcgtgggccaattttagcaacgcagtgtgaggcgacgctgacgcgtttcaccgcttgagccgcgaggctgcggtacatttggctgccgccactgccaaacagaggcagagccgagtaacaaagccccccataaatccaaatgctattgtacccatgactttgttttcgtgccgtttcgggcggtaaacatattgatttcggcgcgtggctctttcaaaaaaaaagtgggctacgcgaccttcggggcggcggcattagggccggaggattaggttaatttatgggcttcctggcggaactctttgaaaacaattgaacagcgtttaaatcgaactttggttaaaaaagtatctttagggttgtttctttggttaatcaatgtgtaattagtttaggtgattgaagaaaagatatatttacggcacaattatttcaatcattgataaataaaaagactttgtttccttgtttttcactttccttcgcatttatcttttcaatggtttttctaaacacatatttggcttatttagactatcaggcggtctattgaattattattgccgagttgatttggttcccaaaccacttagactctaatcgtctgccgtccataaatacttcatgacgaaggactcttatcgagaatgtctggttaggtgttgaaaatctggcaatagcacctgcttactggcaatctttatctaaatacaacaaatacaacgaaagcgaaattcgaataaatgccaattcatttgtgggctcgtgtcagctgtggattggtggtttattacgaatggttatccatttcgaccttttgacggaacttttgagtcatgcacctgtgcggttgctactctgtaaacaattactgagccgttttattgcataaacaattccggagaagagaaatcataatgacagagatattatttccagttccgatgagtaaattgtacgattctctgctagccatttagcaaacagaagcttgtaatgcatatatatatagataacatttatgatcccatattctacattctgatttccattcatttttatcgtgattgaaacttaatgccaatgtactttaattctagaaacaacaaacgcgacacctgttcgattgaagtccaaatgcattatccattataaggtgtcaggcgacaggctttcacttgtccctatctattcgactccgaaaatccccaaaactaattcccctttccgtcgcagctttttaagcagtctaattaatttgataaagaccgaagacccttatttaatgggccagccaattggaaatgatttgcacgcgccactcttttatatcaagattggttatcatttgtttttatttttaaaaatattaaaatatataaagttataaataggtatttggcattaatacgactgccaattggtggctgtaaagtgtatcacgcatacgccgtgttgcttttaacattttacatgattcaaaaactgtgggtggatgcttaatataaatgtttgcagcactataacggcagtctcataggatttatttgaaatggagtgtgtatttcaaatacttattattacttgctttctgagtgtataatattgcaaatatatataatatttcgaaatgttctgtctctcgatggcgactgaactcgatcacgttcgccattgacgtcactgttgggcgcgtggatcttaattagtgcgtctcgtttgggatcgggcagttgaccgaagatgctccgatatttggttaacctagaggatagtgactcaggcaattccagctcgcacgcctcgcagctgttttaatttatgtatgtatgtatatgtatgtgtacacacgtcgtgacattgcacttgaattttgtctctcgcatttcgcaatttcactcgcatttgtgcccctgcatatttctgtgattatttcccgctccagctacctgtctttggcctcggatccatcgaatctgtgcgatcaatcgatcgattttggattcgcgtgttacggagggcgtaaacaagtgcataaattaattcaagccattaaggcggtcatatagtctagatgtgcggctaattagcgggccagatttatttttaaccctccggcgaacctttcgcaccccgcctatgcacataaacgcacccaccacccccacatcacccctcgtgataaggatggtaaaggtttacccgataaaagccacagtggctaaaaatgtctcctgttggtcttgttagcattcgcgagtgttgtttaccaaagctttcgcaccttttgccacccctctcattgaaaccaaccccctaccccccttgccagctatttcccgatcgatcggatcgtctcgtatcgtatgggatcggggaactatatcactgcgcgggcgcactctctcgctatatcttggccgctctcgcgggattttcgcatataattcgcgaggtcggagcggtatgggcttaatagtgattcggtgcgcccaaagaaagcaacgttgagaacgttacctccttcaatatttttttttgctcggctgtgtccgagccaaaagcaaaagatactttgagaaaactctagagagctggcaaaaattattatcgcggaaaatcgcgaatattgtgtaaaaactgaatagcaaccaacaacatgtgaattattgataaaaaagtggaaacacttgagaaaaaaaggcggacagaaaataaagagcaaaaacgtgaaaaggaaatttcaattagtgtttattgaaatttattaagcgagatttaaggcgttgacatttttattatagcttttattcgctcaacaaaagtctattcaaatcaaacgcttgtgatcaaaactcaacgtgaaattaattgtgataataaatctagttagactgattaaagtagagattagacaaccaagatgacgcccaggcttattacatatattttggtaaattttacattttattaaattatactcatatcatattatcaataattatgaaattaggcgcttatcaattctctatccaacatttcatcactttattatataaatcaattcgcagaactttgatttataaaaatgaaataaagtgcataattattaaacgtataaggaaaactcttaagaatcattaaaaaaattaattgtgtgtgtagagtaatagatacctattttaattgtcttacaattttttagagaaaaaaaacattgatatataaaattaaataaactgaagatttaaatgtagtttaatgaaatcgtttactgattttgacgatggttcatgacgaggcagaaaaaaatgtgttgaaaagaatattactcatacgacacggtgtgccggtcacttattaacccacttaattgtgccaggggacgacatttctcgggctgtttaattatttataatttaagtttgagttcgtcacggaactctgatggatttttcacattgtctcactgtgtttcttcgattctctctctctcttccttttctctctctgtagtgcggcatgcgccatcccacaactgggctgaacgaagacgacctgagtcgtctcactggttcatcatcgtcgacggcttcgtgcggcagcgcagcatcctcatcatcgtcctcatcctcgtcgtcctcgaatcccgctgaccgacatgaggtggtctgcagtccggaaaagccaacgccgacgggcacggacaagagccaactgagcagcggctttaactccacttacctgccggaaatcatacatccggctccggaatggcagaagtcatcgcgcaagcgcaaggaacgcctggacagcacctcggcctttggccaggatcgaaagttacagcgcagcaacagcgaggagctgctcacagaaccagctgccattgtgtcttccacagcccaggcagcagccgaacttctggaggcccagtgtgaggttataagacgggtttcttcggaggatttcaaacgcacggccagttacgccaactatcggcaggagttcgaaagggagcaggaggagtgctcggagctgggtgagaacaatgcctcgttggccaacctgccgacaggagaagcagccaaagagcgtcctcgtctggagacaagccccgctcgccaggcaccaaaggaggctagcgatgactccgagtgcgagcacgaaaggcgacgcagcagtgagcgtttctgcaaatcccgccagccgccggtgcgcaagtctggcgtggccaagaaagtcggcggaggcagtggctccaaatatctgccatctcgacgggatgagcaaagcgcctacaagtacgacttgtcggctttgaagtacgaacgcagaggtttcattagcagcaggaaacagcagcagaatcaaacacaagcaatgcagtctgctgccgatcacaacgacaacaacttgatagacttccatcagcagcagaaggagctgcagtcgaagcggagtgccagtatttcccccacacccaccacgagctcctcggcgggcagcgatgacagcacgcccacttccaatgcacccgcgcccatcaaggccaaaccccagaggcagcagcagagcctggatctcacctccgcgcaggagtccctgccgtgggagcgtggagatgaaccggcacccattctgagcagaagatacgcccactcccgaccacatatcggtggcaatctcgatgcggccgccaaattggccaaggtcatgccatatccccagcagctgcccaaacaggcatccaccgtgcagctgcactcggacatcaccgacatggactgctgcctggagcccatggatgccgtgcgagcgttcagttcgctggagaatatgcgaacccgcgacgttatgcaacaagtgttgcccgccatgatgggtgcatttcaaacgcccgaggatcgagtgaaggccatcaacagacgcgttactgtgctcaagaagaaactggttcagctggaggaatccctggagcagcgactgggctatcggccatctcaggcggagcgattgaacgacaagtacatgaagaatgccctggcggagttgagcaagctgcgcaaggaacggcacgagctcaagactgatcccatcgcagctctgggtctgaaggtgggcagcggcggtggcgccggcatcggtggccaggaggtcgccaagaagctggagcgcatgaaagccacactcgctgaaatcgagcaggtaatagagatttcctttagcggctcttcgtcgctttgcaaaatcacgagacacgaaaatattttatgacaattagcgagtggaactgacgtcagaaacatttccatgtatttatatacaatagccagatatcaaatatatttattgtacgcagattgcctcgacagccgccgtctgcgggtgacatgtttagcaatttggcaacaactttgatcttgccccattgtcgaaaggcactcggaacacatttttcgaaaacaaaatcttgttttggctagaatatgaaaatacattttgcggttcgccgacattttattccctgtcagagagcttttaaggggaaaataggataagtaagtgtaaatagatctattaaattcgatggtaaaagggttttgccataacattttcagttctgtaagggaaaatttcatttgaaggaacttatataatgagaatattcaattattttcttgccgttgctatggtttcagtaggacagaccgaaatcgcgcattccaaattaggttgtttctttcgcattataatgagtatctatttatacacatataccatatgcattcagacaagcctcctcattctctatattgacaaattaatgatatatttgtcatagagcgcggcagacaaacattttcgcccataaggaatccgctcgaaattgaatttctgccaagaaaacaaagtgtgtgattggctttggtgtggaaatgggcaaatgcccaaagagcagccatccaagtgcttggccatatatacatacatatattattgttatactgtaatgtcggcattgcatatgtataatttgtttacaatacggatatattccgcacttgtttctatttttatttggcactctatttggcattcttctttttgaatgtctgccattgtcgcttggtcatcgccagtctgccataaacaaatcaaaagtggttaatacctcgtgccactcactgattaattgtcttgtttaccaatgtgggtggtctttatcagttaactacaggcttctgttccactgattagcagctttttatcgttttgtatcgaatcgcagttgtcatattaaataaatttaattaaatctgattgtaaaagataatttactaattggctatgtatctgttaccttgcagaatttgaacgagaaacgcgtgaatggtcatcgttctgagcagctagaggatctgaatgccgaccaactggtgcaggagaagagcgccgtgcagcatggactgctgtactttgagagcctctatggccatcccattaccaaggaggagcgcgatgctgcccggccgctctacgatcgctaccggcagctgaagcgtctggtgtcgcgcaccgtgatgtttggagcgggcacagggatacccgagttgcccacaatcctggagcacgaggccatggtgtttgaggccacttccacaccgctgcagtattcgtcgaacaacagcacagagaccaccaactcgcccagcgactcgaatgccccgaatactctgacccagaatgcctcatccgacgagtcgacgaccaccaccacgttgacgggtccggcaacgggaaattcggccacaagccaggagaaccaggccgccagcgagaatatcgccgcactgagtgtggaccaactctgggagcagctagatcgagcacgcgatgagaaatccctgctaaaatccaccattcgggagtacgagtcgctgttcgaggagcagaatggacgcaagatgctcaagcaggatcgtcgctcactggagacggaaacctatgcccagtacaaggagaagaaggccaaggtcagactactgcaggccctgatcaagaagcatattgggcattaagctacggctacagatatccttcttccattcatccacgcatgcaaaactatttatttcatacccaaccaaacaaatacagacctagatctatacaaattacatgtattgtagtttttagacttatatttaccatatattctataatgatacattttatgaatattgttgattccttattgttttttgaaaacacatctattgagtaattgtaataaaagaaaattaaatttgatgagacaaaacgaaaaaggagtgattgagaaagcaaacgctagacatttgattcagacccattctcctctccacattattcgcacggaattgatatctatgtgtaacccaagaatctgcaatgtatatgttcgcactcttcccatttgtgttcttgtaaatcgtcattgatgttaaaaaatgacttggcctgatttgtcccacttctgaaacggggagcacacattattcgattagctatagtttcgaacgatctatgcgtggaggaacacgttgcaaccgcaaatcaaatagataaactttataaatgttgtctagtagaattgaacattttatatcgatatgcaaaccactaactagcaacctattaaccgaaatacccgaattatagttgtgctttcttccattaaatgtttcagtgtgcaaatggcacgcaaccacgcacgaaaaatcgaaaacatctgaatatttgatagcgttggaagcggaagttaagtttagacgatcataaagttaggttcgtacactggccgaaaaagtcgggcaaatgatttttgtgcaacaagcaattgggtttttttgaacgtgtatactcggccctaaccaacgcatacaatatatgattatacatacatatatatatttacaatgataaagaatgtaaggcgcaagccaagcaaacacatatgtaacgtgtatttgaaccacgtacttatatatttacatgtttacatatacgaacatccaaagcaaaggtatatacacgtat

SEQ ID NO: 13859 - DNA, 3166 bp, DROSOPHILA
ctcatttagttgtcgagagttcctctttacatcccagaaagaggcaggatcaaggagcgtactaaagaaaaggggaggaaactcaaactcgccagcgagaaagagagagagagagagggaattcacatccgatccggcactaaaatccattcacaacgtattcgctaggagtgctacgccatttgggtctgagctatagtctagatagcgaaaatgtgcagagatcgcgatatgagtttgtcgtagatcagcgcaaccgtcgttacaaggtcaagaaaaaaattaagctcaagagcgagtaggaaggtgagcgggcaagagcccaaggggcaccgaaacaaagagcacgattgcgtgagattgcgaaatcctggaccaccagcaaccacaataaccagatctagctaccataccaaagttaacaataatagcgaaaggccacaacagcaaaataatagttaatttatctataaggacaccgtcatcgcttccattaacgagtgcgcgtgtgaatcaacggcaatgtgactatcctgcgactctgcatcccaacggttctagccggttcgaaacagtatcttaagcttcgagccaagtgatttcgcgcacccatcggtcttcaattcgatttggtcagtctcagtcatctttttccaccaccagtcgaacggaaaacgacgtgcaactggcgaacgtacggggaaaaaccagcaagattgaagactttgggagaaatctttggaagtccgttaaggcttgcatttgcggcatgcgccatcccacaactgggctgaacgaagacgacctgagtcgtctcactggttcatcatcgtcgacggcttcgtgcggcagcgcagcatcctcatcatcgtcctcatcctcgtcgtcctcgaatcccgctgaccgacatgaggtggtctgcagtccggaaaagccaacgccgacgggcacggacaagagccaactgagcagcggctttaactccacttacctgccggaaatcatacatccggctccggaatggcagaagtcatcgcgcaagcgcaaggaacgcctggacagcacctcggcctttggccaggatcgaaagttacagcgcagcaacagcgaggagctgctcacagaaccagctgccattgtgtcttccacagcccaggcagcagccgaacttctggaggcccagtgtgaggttataagacgggtttcttcggaggatttcaaacgcacggccagttacgccaactatcggcaggagttcgaaagggagcaggaggagtgctcggagctgggtgagaacaatgcctcgttggccaacctgccgacaggagaagcagccaaagagcgtcctcgtctggagacaagccccgctcgccaggcaccaaaggaggctagcgatgactccgagtgcgagcacgaaaggcgacgcagcagtgagcgtttctgcaaatcccgccagccgccggtgcgcaagtctggcgtggccaagaaagtcggcggaggcagtggctccaaatatctgccatctcgacgggatgagcaaagcgcctacaagtacgacttgtcggctttgaagtacgaacgcagaggtttcattagcagcaggaaacagcagcagaatcaaacacaagcaatgcagtctgctgccgatcacaacgacaacaacttgatagacttccatcagcagcagaaggagctgcagtcgaagcggagtgccagtatttcccccacacccaccacgagctcctcggcgggcagcgatgacagcacgcccacttccaatgcacccgcgcccatcaaggccaaaccccagaggcagcagcagagcctggatctcacctccgcgcaggagtccctgccgtgggagcgtggagatgaaccggcacccattctgagcagaagatacgcccactcccgaccacatatcggtggcaatctcgatgcggccgccaaattggccaaggtcatgccatatccccagcagctgcccaaacaggcatccaccgtgcagctgcactcggacatcaccgacatggactgctgcctggagcccatggatgccgtgcgagcgttcagttcgctggagaatatgcgaacccgcgacgttatgcaacaagtgttgcccgccatgatgggtgcatttcaaacgcccgaggatcgagtgaaggccatcaacagacgcgttactgtgctcaagaagaaactggttcagctggaggaatccctggagcagcgactgggctatcggccatctcaggcggagcgattgaacgacaagtacatgaagaatgccctggcggagttgagcaagctgcgcaaggaacggcacgagctcaagactgatcccatcgcagctctgggtctgaaggtgggcagcggcggtggcgccggcatcggtggccaggaggtcgccaagaagctggagcgcatgaaagccacactcgctgaaatcgagcagaatttgaacgagaaacgcgtgaatggtcatcgttctgagcagctagaggatctgaatgccgaccaactggtgcaggagaagagcgccgtgcagcatggactgctgtactttgagagcctctatggccatcccattaccaaggaggagcgcgatgctgcccggccgctctacgatcgctaccggcagctgaagcgtctggtgtcgcgcaccgtgatgtttggagcgggcacagggatacccgagttgcccacaatcctggagcacgaggccatggtgtttgaggccacttccacaccgctgcagtattcgtcgaacaacagcacagagaccaccaactcgcccagcgactcgaatgccccgaatactctgacccagaatgcctcatccgacgagtcgacgaccaccaccacgttgacgggtccggcaacgggaaattcggccacaagccaggagaaccaggccgccagcgagaatatcgccgcactgagtgtggaccaactctgggagcagctagatcgagcacgcgatgagaaatccctgctaaaatccaccattcgggagtacgagtcgctgttcgaggagcagaatggacgcaagatgctcaagcaggatcgtcgctcactggagacggaaacctatgcccagtacaaggagaagaaggccaaggtcagactactgcaggccctgatcaagaagcatattgggcattaa

SEQ ID NO: 13860 - protein, 798 aa, DROSOPHILA
MRHPTTGLNEDDLSRLTGSSSSTASCGSAASSSSSSSSSSSNPADRHEVVCSPEKPTPTGTDKSQLSSGFNSTYLPEIIHPAPEWQKSSRKRKERLDSTSAFGQDRKLQRSNSEELLTEPAAIVSSTAQAAAELLEAQCEVIRRVSSEDFKRTASYANYRQEFEREQEECSELGENNASLANLPTGEAAKERPRLETSPARQAPKEASDDSECEHERRRSSERFCKSRQPPVRKSGVAKKVGGGSGSKYLPSRRDEQSAYKYDLSALKYERRGFISSRKQQQNQTQAMQSAADHNDNNLIDFHQQQKELQSKRSASISPTPTTSSSAGSDDSTPTSNAPAPIKAKPQRQQQSLDLTSAQESLPWERGDEPAPILSRRYAHSRPHIGGNLDAAAKLAKVMPYPQQLPKQASTVQLHSDITDMDCCLEPMDAVRAFSSLENMRTRDVMQQVLPAMMGAFQTPEDRVKAINRRVTVLKKKLVQLEESLEQRLGYRPSQAERLNDKYMKNALAELSKLRKERHELKTDPIAALGLKVGSGGGAGIGGQEVAKKLERMKATLAEIEQNLNEKRVNGHRSEQLEDLNADQLVQEKSAVQHGLLYFESLYGHPITKEERDAARPLYDRYRQLKRLVSRTVMFGAGTGIPELPTILEHEAMVFEATSTPLQYSSNNSTETTNSPSDSNAPNTLTQNASSDESTTTTTLTGPATGNSATSQENQAASENIAALSVDQLWEQLDRARDEKSLLKSTIREYESLFEEQNGRKMLKQDRRSLETETYAQYKEKKAKVRLLQALIKKHIGH

SEQ ID NO: 13861 - DNA, 5146 bp, DROSOPHILA
ctgtatgatgcaggcagtgtacttcatcagcggcagtctgcagaaggaggagttcttccactacggtctggctgctcccatctacacgcactttacgtcgcccattcgtcgttactccgacattatggtacatcgcctgctggccgcctcaatcggcgcggatagcacctatgcccagctattggaccgaaagtcaaatgaggagctgtgtcataatcttaactaccgccacaaaatggctcagtacgctggtcgcgcatcagtggccctcaacacgcatctctttttccgcggcaaggaggaggatgaggaagggtgagtcgaagaaaccactagtgggcaacattcttttcaattattacccatccctagatatgtgctatttgtgcgcaagaatgctctgcaagtgctaatccccaagtatggcctggaaggcactttgtatctaaagtcggacaaggatggcaaggacggtgtggagcgcgtcaagagcgagattgtcttcaccttcaacgaagaggatcatacacagcgttgcggtgacgtggtgttccactcctttgatccagtcacggttcgtcttagcctggattccagcaatgtgcagcacgagaagctgatcttccggctggtcaagccgtacatcaagggcttcagcgtggaaacgaccaccgaaggaactgatagccaagcggtttctgcggcacctccatcgaaaaagacaaagaaggataagaaaaagaagtaattctttggatctttgcttatgtggaactagactacgctgaagatgtgtaactacaatcatttcgtataaataaaatgtaaggtttttaaattccgctccgtttcgtaaaccttttccaccgttccggctctgccgatctcggagagtttcgaaagcatacctttgatcgggtgttttgtttaaggttttggtttccaacttgcgttctacattctccagacccattgcaaagtttcgactacagtgcgacggttgtgctgagctcgtttgatccaaaaaattcaaaaagaatatatataataaatacatatatacattaacttgacttgaatatatacaagaacggaagttatacaaagttacaatggaacccggtcctagtgcagtgaactacgaaggcagtaagtcgaaaaaggtttcgaaattcatatgaaaaggctaaaaaatttaatcaatgagtaatcgcgtgatttttgcggaacatatatttatatcggtacacatattttaatacgcatattgaaaacatcagttaaaataaacaacttttagaacatcaaataaagtgcttggaaaactaatatgccaactttcgttgtgatctaaatgaattctatagattttcgaattttccaaaaactatctaagtggagtccaactttttacaatattcttggattcttgcagtgcgatgtagatagatagataatttatgcacaagagttcaaggtgataaatattgtgttttaaaccactgctcgccaattaaaataatgaactttcgatgcgactttgaagtgattaattagtgtttagttgtgcgcccaaactgtcggcactaaatattaatgaattcgattagcttattcaacaaggaggcttttaggtccaatatccatcgccaatcacgtgtggattatgctcggcgtctgggtgagccgcacacccgacgcatatgtgcagtacatgggtgccaggttgggtatatagaaatcagttgagtgaccgcgacatttggaaaatttaaaattcaatgtgcctggtgtgtgtaaggtggtatggagtggaaggtttgtaatttagtttgatagcctaattaaaagcagcgattaacccaatagaggaaacaatgaacccgcccatctaatggtcacctgctgctataccttttccgcaggtgaatctgtatgcggcatgccggtggaggctcacgatcctctctacttgaaggcctatcgccagagtgttcagaatccggctgcattttgggaggagcagggtaacctgctcgactgggatcggccatgggagaaggtactggacaacagtaatccgccattcaccaagtggtatgtgggtggctacctgaatgcctgctacaattccattgatcgccacatactggccggccgcggctccaatgtggccctaatccatgacagccccttgactggcacactgcgtcgggttacctatcaggagctgtatgaccagatcgttctgctggcaggcggcctggccaaattgggcgtggtcaaaggtgatcgcgtcgtgatctacatgcccctcatcccggagaccatcattgccatgctggcaattgtgcgtctgggtgcgattcactccgtggtcttcggtggcttcgctgcccgcgaactctgctcgcgcatcgaacatgtggaaccaaaactggtgatcgcctccaatgtgggcgtggagccgggcaaagtggtgccctacctggacatccttcattcagctattagcatgtcgcgatggcgaccaccgcagcgtaacataatctttcggcgtgataatgtttcgccagataccaccaaactggatcctctgacggatgtgctctggtcggatattcttaagatggcggagggcgagcggcccatagcctgtgttcccatcgaggccaacgatcctttgtatatcctctatacctctggaacgacggataagcccaagggagtacttcgcaccatcggaggtcacttggttgctctggtgtacacgctgagaactctctatggcatcaatcctggccacacctggtgggcggcctcagatatgggctgggtggtgggtcactcgtacatctgctacggtccactctgcctcggagccaccagtgttatgtacgagggtaaaccggaccgtactcctgacccgggtcagtactttaggtgagtggttatgccccaccttgtttcttacacatattaattgtacctatattcaggatcatcgaccaataccaggtgcgctcgatcttctcggtacctacctccttccgtgttatccgtcgtgctgatccggacatcagctatgggcgacagtactccatgaagtcgctgcgtgccatcttcattgccggcgagcactgcgactacgagaccaagtcctggatcgagaagaccttcaaggtgcccgtgctcaaccactggtggcagacggagactggttccgcggtcaccgccacatgcctgggcttccagcagaacctcagtccgcccacttactccactggcttgccactcatgggctacgacggtgagtgatgctccagttagcttggctgagtgaggatttaagtcctgggacatctctcttgcagtcaagatcctgaaagcggacggcagcgaggcgcagacctcggagctgggcaggattgctcttaagctaccactgccacccggaaacatggccactctttacaaaaacgaagagctcttccgcacgctttactttcaaaagtttccggtaagtcaccaaaagcaattcccacaacttgttaaatatcatttagttactatagtatagtgtatggcttatatctgaaatcttaaagatactttattttatcttacacttagggttactatgatacaatggatgcgggctacaaggacgaacgtggctatatctttgtgacagctcgcgacgatgatgtaatcaatgtggctggccatcgcttgtccacctctagcctggaagacgccgtgcttcggcatccggacgtcgtggacgtggccgttttcggggtgcccgaggccaccaagggacaggtaccactgtgcctgtacattccggtggagaactgcaagaagaccgatgccaagctgtcgacggagatcatcaagctgatccgcgacgtcgtaggccccatagccgccttccggctggtcacgtccgtcaacaacctgccacgcactcgatccggtaagacgatgcgcaaggcgatggcggactttgcccgcaatgagcgcgttgtcctgccggcgactatcgatgatgccagcgtgttcatcgagatccggagggctctgaaccagttgggctatgccatgaccgcaccggatccgattgtggccaagttactcgactgatgggttgcaaggaccctcaaccttaaccttagcttgtacgatacgattcccaagaagtaaataaaatgtaagccagtttggctgggggttttcctccgcttatctgcgtaggccgcaaagtggcgaaaataatttaaatgttaatcgatggcctacatggtgacccattcgcgcccattcgcccattatccactttccaattcctccctggcgcactgacgcactattcgcgtacaactgacacccaatcagtttattcaaattttgtgcaaatttcgcgacacattgttgggccagcaaagtgtggatttttttcgaataaccaacaccccacatttcgcagttcgcatatggcactggcattgcattatttgggcaggatttgtccacatcaaagatggacagcaaatgtcaggcagccaaccataacccaattagtgggcttaacgttggtgggcatcgtggagtgcattatccataagtaatcaaatccaattctatcttattatattagcaaagtccattttgtgtgggtatttctagaggcaaacaatgacatatagtcataaggcaaacacaattatacaaatagtttaataaagcgtacatatgcatttcatttcttttgttgaaaaataaaactctattatatttttaatttctaatttttaaatgacactcgtaactatgactatgctttttatggtaaattctctatcttctcactgcattagtcacgctgactataacaaaaggaaggcaaattagatttccttcttgcttaattcgaattttcccggtccaagcccagtttatatgtgcatcgtggtcatcccactccaagatactcatctcctgacgtcacagtcgaaattcttatcggggaactaacttggcatgcgaaacacgcacaaattcaaattaattgcaacgcttcgcctgcaaatcccagtctcataaaccgaagattactatgcttacgcatccgtggagcaaaatg

SEQ ID NO: 13862 - DNA, 2137 bp, DROSOPHILA
ttgtgctgagctcgtttgatccaaaaaattcaaaaagaatatatataataaatacatatatacattaacttgacttgaatatatacaagaacggaagttatacaaagttacaatggaacccggtcctagtgcagtgaactacgaaggcagtgaatctgtatgcggcatgccggtggaggctcacgatcctctctacttgaaggcctatcgccagagtgttcagaatccggctgcattttgggaggagcagggtaacctgctcgactgggatcggccatgggagaaggtactggacaacagtaatccgccattcaccaagtggtatgtgggtggctacctgaatgcctgctacaattccattgatcgccacatactggccggccgcggctccaatgtggccctaatccatgacagccccttgactggcacactgcgtcgggttacctatcaggagctgtatgaccagatcgttctgctggcaggcggcctggccaaattgggcgtggtcaaaggtgatcgcgtcgtgatctacatgcccctcatcccggagaccatcattgccatgctggcaattgtgcgtctgggtgcgattcactccgtggtcttcggtggcttcgctgcccgcgaactctgctcgcgcatcgaacatgtggaaccaaaactggtgatcgcctccaatgtgggcgtggagccgggcaaagtggtgccctacctggacatccttcattcagctattagcatgtcgcgatggcgaccaccgcagcgtaacataatctttcggcgtgataatgtttcgccagataccaccaaactggatcctctgacggatgtgctctggtcggatattcttaagatggcggagggcgagcggcccatagcctgtgttcccatcgaggccaacgatcctttgtatatcctctatacctctggaacgacggataagcccaagggagtacttcgcaccatcggaggtcacttggttgctctggtgtacacgctgagaactctctatggcatcaatcctggccacacctggtgggcggcctcagatatgggctgggtggtgggtcactcgtacatctgctacggtccactctgcctcggagccaccagtgttatgtacgagggtaaaccggaccgtactcctgacccgggtcagtactttaggatcatcgaccaataccaggtgcgctcgatcttctcggtacctacctccttccgtgttatccgtcgtgctgatccggacatcagctatgggcgacagtactccatgaagtcgctgcgtgccatcttcattgccggcgagcactgcgactacgagaccaagtcctggatcgagaagaccttcaaggtgcccgtgctcaaccactggtggcagacggagactggttccgcggtcaccgccacatgcctgggcttccagcagaacctcagtccgcccacttactccactggcttgccactcatgggctacgacgtcaagatcctgaaagcggacggcagcgaggcgcagacctcggagctgggcaggattgctcttaagctaccactgccacccggaaacatggccactctttacaaaaacgaagagctcttccgcacgctttactttcaaaagtttccgggttactatgatacaatggatgcgggctacaaggacgaacgtggctatatctttgtgacagctcgcgacgatgatgtaatcaatgtggctggccatcgcttgtccacctctagcctggaagacgccgtgcttcggcatccggacgtcgtggacgtggccgttttcggggtgcccgaggccaccaagggacaggtaccactgtgcctgtacattccggtggagaactgcaagaagaccgatgccaagctgtcgacggagatcatcaagctgatccgcgacgtcgtaggccccatagccgccttccggctggtcacgtccgtcaacaacctgccacgcactcgatccggtaagacgatgcgcaaggcgatggcggactttgcccgcaatgagcgcgttgtcctgccggcgactatcgatgatgccagcgtgttcatcgagatccggagggctctgaaccagttgggctatgccatgaccgcaccggatccgattgtggccaagttactcgactga

SEQ ID NO: 13863 - protein, 674 aa, DROSOPHILA
MEPGPSAVNYEGSESVCGMPVEAHDPLYLKAYRQSVQNPAAFWEEQGNLLDWDRPWEKVLDNSNPPFTKWYVGGYLNACYNSIDRHILAGRGSNVALIHDSPLTGTLRRVTYQELYDQIVLLAGGLAKLGVVKGDRVVIYMPLIPETIIAMLAIVRLGAIHSVVFGGFAARELCSRIEHVEPKLVIASNVGVEPGKVVPYLDILHSAISMSRWRPPQRNIIFRRDNVSPDTTKLDPLTDVLWSDILKMAEGERPIACVPIEANDPLYILYTSGTTDKPKGVLRTIGGHLVALVYTLRTLYGINPGHTWWAASDMGWVVGHSYICYGPLCLGATSVMYEGKPDRTPDPGQYFRIIDQYQVRSIFSVPTSFRVIRRADPDISYGRQYSMKSLRAIFIAGEHCDYETKSWIEKTFKVPVLNHWWQTETGSAVTATCLGFQQNLSPPTYSTGLPLMGYDVKILKADGSEAQTSELGRIALKLPLPPGNMATLYKNEELFRTLYFQKFPGYYDTMDAGYKDERGYIFVTARDDDVINVAGHRLSTSSLEDAVLRHPDVVDVAVFGVPEATKGQVPLCLYIPVENCKKTDAKLSTEIIKLIRDVVGPIAAFRLVTSVNNLPRTRSGKTMRKAMADFARNERVVLPATIDDASVFIEIRRALNQLGYAMTAPDPIVAKLLD

SEQ ID NO: 13864 - DNA, 3934 bp, DROSOPHILA
caaaaaaaaaaaaaaaaccaaaaacaaacaaaaacacaaatcgggggaatcgggaatatatatgcggactggctatctgaaggaccgattatatatccacggtggctgcgcagcgctagctatcgacattgactgcaacgagagagggtttaccatatagctaacatatatcatccgcttccgatcggctagaattgtctttagctttgaatttgcgtttcttgttgttctttttattttatggaattcgtggcactgacgtgtgcacctctctatagatgtgtgcgtgtgtgtgcggctgtgtgtgtgcgagtggggctgtgtgtgtgttttgtttgctgtttttccagcgcttgtgtcgattttcgcctggtttctgagttacaagccactaagcactagattgcaacgtaagagctttcttatgtgcacgctgacagatgtatatttaccaattctaattaatgccagcgtaaaaacaattcgataccagggctgcgcaacaactgaatagggtcacaaagccctggtaagttatcgaatgacagatggctcgatagcacttgcgctcgtaatcaatcaatcgattacaaactaattcaaaaattttgcattaatttcaaattgattttatttattttcatacaacaaattatactagtttgtgtatataacttgttatacaaccgtttaatatgtctgatgcttaattttagacatgattggttaatttttggttttggctaataatattattgcatacaatggatacattagtaaataaggactacttaaaaacaggtcagggattcgacacttaataataaaaactaccacgacaacatcgttaatatgcgagttatgcaaaactgataataaggaaccattagactagatgcaacacttaagtacaaaagaaataaccctagcctccagtgtttgtttttttcttcatgctgcaggaacaaggaacgaggtatgtatggttcggaagagatttctatgattttaggacctccataaccgctgcgtgtccgccgcgctccgcataatccatggcggtcaggccgagcatgtccttctcgttcggattctcgaaatagggcaggacgtattgcaccacctccggaaatccgtgcagtgctgccacgtgcaaggccgtcctgcccgaaggatccgactgggcaagatcggcaccggcgtattgataggacttcaatctgatcatcgatcccctagcagcggccgcgcacaattgctcgcccaccgctcgcgaagagcccgtcaaatgagcaccacagttgatgagcaactggatgatctcgtggctatcggtggcgacagcctccagaagtggagtgcggtcataccgatcacgcacgtgcacggacaccccgttctgcagtaggtacttaacgatctccacgtttcccagctgacaagccaagtgtagggccgttcgctggtcatgatttgtgcccgacaagtcggcgccataggctttcaagttgttgatcttcttgggatcaccttcggccacagcggcgttgatcatggccggaaagagcgtttcgcccagctgatccagttcttggggcgaggacaagtgcagagaccgtgccactgcgtccaccaagtcgtagtcctccattttgggagcctttaaggaggtcagttcgcccctcaggcttgactgcatcatctatgaaatgcacacattgtggattatccatatttatgtatgtattgaattatagtcgaaacttacctgcttcttcatatcgagtgaccactcctccttgccgatgacataggccagcttggccagcgccgcctcgggcgtcatatcgaaaccgggaattacaccgacatcgcagagcaccttgcccgtatcgtagatctccgccactgtgccattgggacactgtgtacaattgatgatgataacgcctcgttcaccagccgcacgcagttcatcgatgagatcttttcggttcgatggtatgtttccagatccgaaggattgcaggacaacgccgcgaatcggtggcgccaggaaagcccggaatgtggagtgcgaaatgctcggaaagattcgcagcaagccgacgttctcgtcgagattcaagtgtacgcaaaacctttcaatagtgcatggccggaatatcaggcggtagtcgacgttcacatcaatgccgatcctggccagtggtggaacattcggtgagtcgaacgcgtctaaggcattcgaactgaccttcaccgtccgattgccgcgcatcaacttatggccaaagaagatgcaaacctccggaatgatgtagttaccggctatgatcaaggctgacgtaaaattgtccttgccatcggttcgcgtctcaaagatgggtatttgggagcccgtgatgatcaccgtcttgcccaaattttccaacatgaaagacaatgcagatgcggtgtaggaaagcgtgtcggtgccatggagcaccacaaagccatcgaagaactcgtacgattgctagacaataatttggaaaggattaatattacctttcatatatatatatatgtatgtacctgaatatcgctggcgattcgcgcccaatcgttcatcgtcatattgctgctgtccagcagcggtgtatattccgagatctggtagataacccggcgatctacgccctgcacaatgggcagcaccagtggagccatcgatgcagatgctccaaagcggcgcagcgcgtactcctcatcgtggatgtttggatatttgcggatgctgcgcaccagggcattgggaatgggagctaacactgcgataattatagaatattaatattgatagtcacaaactccgtgacaaattagtttcctaatcaagatgatgatttatggtcacgcttcgtgtgtcaaatgtttactaaaatacctaattagaccactcaataaatagcaagcaaatagtcaatatttaaatagaagcatcaacaatctgttgactgccaattgatttgttttgtttacattcataccaacaatttcaactttcatacatattattcgaataaaatgttttcaagtgcattgctcttatcatatctggccattttctaagactccccttgttagtaaaagtgggatcttatctacatggacagattcgggcaatcccaatgaatcctcgtattcgtgacattctgggctgcttaccattccgctcgttgcgcaccatgccgatggtgccgccagtgtagatgaccttcacccgggcctctttgacatcctgggccatgagttttccatcacttttattcctgcggatcgtgggactcggcagagtgggcgatgccggcggcatgcttttgtccagcgaggccagcctctcgtgaccattggtcttcaggacgggaatatccataatatagagtaaagagtatagaggatgatggactgcggagcgccggttgcgaagctgtgtgccttatcactggctgctcagatggtgtcgttccgacgcgtaaacagcaaatccattaacagcccgtgccgttgatgattatttggccaactcgttatcgtgctaatccggatcggatccgaagtagtgaaataataattcgcggggggacgccgagatagcacgtggtattgggactctatcgcagaggaaattgaaacgaaaagcccaaatcacggcggcgcaatcacttatatatagataaccgcaccagactttggcccacgacgtacatgactaatctaatgaaattcaaatgaaattccagctgattgcaatattttggtcataaataaacacccaatcagctgtgcgactatcagatagttcgcagtgccataatatcaattccaattagactttattcagtctaaccctataacaaaattctttttatttttctagcctctctaaaac

SEQ ID NO: 13865 - DNA, 1896 bp, DROSOPHILA
atggatattcccgtcctgaagaccaatggtcacgagaggctggcctcgctggacaaaagcatgccgccggcatcgcccactctgccgagtcccacgatccgcaggaataaaagtgatggaaaactcatggcccaggatgtcaaagaggcccgggtgaaggtcatctacactggcggcaccatcggcatggtgcgcaacgagcggaatgtgttagctcccattcccaatgccctggtgcgcagcatccgcaaatatccaaacatccacgatgaggagtacgcgctgcgccgctttggagcatctgcatcgatggctccactggtgctgcccattgtgcagggcgtagatcgccgggttatctaccagatctcggaatatacaccgctgctggacagcagcaatatgacgatgaacgattgggcgcgaatcgccagcgatattcagcaatcgtacgagttcttcgatggctttgtggtgctccatggcaccgacacgctttcctacaccgcatctgcattgtctttcatgttggaaaatttgggcaagacggtgatcatcacgggctcccaaatacccatctttgagacgcgaaccgatggcaaggacaattttacgtcagccttgatcatagccggtaactacatcattccggaggtttgcatcttctttggccataagttgatgcgcggcaatcggacggtgaaggtcagttcgaatgccttagacgcgttcgactcaccgaatgttccaccactggccaggatcggcattgatgtgaacgtcgactaccgcctgatattccggccatgcactattgaaaggttttgcgtacacttgaatctcgacgagaacgtcggcttgctgcgaatctttccgagcatttcgcactccacattccgggctttcctggcgccaccgattcgcggcgttgtcctgcaatccttcggatctggaaacataccatcgaaccgaaaagatctcatcgatgaactgcgtgcggctggtgaacgaggcgttatcatcatcaattgtacacagtgtcccaatggcacagtggcggagatctacgatacgggcaaggtgctctgcgatgtcggtgtaattcccggtttcgatatgacgcccgaggcggcgctggccaagctggcctatgtcatcggcaaggaggagtggtcactcgatatgaagaagcagatgatgcagtcaagcctgaggggcgaactgacctccttaaaggctcccaaaatggaggactacgacttggtggacgcagtggcacggtctctgcacttgtcctcgccccaagaactggatcagctgggcgaaacgctctttccggccatgatcaacgccgctgtggccgaaggtgatcccaagaagatcaacaacttgaaagcctatggcgccgacttgtcgggcacaaatcatgaccagcgaacggccctacacttggcttgtcagctgggaaacgtggagatcgttaagtacctactgcagaacggggtgtccgtgcacgtgcgtgatcggtatgaccgcactccacttctggaggctgtcgccaccgatagccacgagatcatccagttgctcatcaactgtggtgctcatttgacgggctcttcgcgagcggtgggcgagcaattgtgcgcggccgctgctaggggatcgatgatcagattgaagtcctatcaatacgccggtgccgatcttgcccagtcggatccttcgggcaggacggccttgcacgtggcagcactgcacggatttccggaggtggtgcaatacgtcctgccctatttcgagaatccgaacgagaaggacatgctcggcctgaccgccatggattatgcggagcgcggcggacacgcagcggttatggaggtcctaaaatcatag

SEQ ID NO: 13866 - protein, 631 aa, DROSOPHILA
MDIPVLKTNGHERLASLDKSMPPASPTLPSPTIRRNKSDGKLMAQDVKEARVKVIYTGGTIGMVRNERNVLAPIPNALVRSIRKYPNIHDEEYALRRFGASASMAPLVLPIVQGVDRRVIYQISEYTPLLDSSNMTMNDWARIASDIQQSYEFFDGFVVLHGTDTLSYTASALSFMLENLGKTVIITGSQIPIFETRTDGKDNFTSALIIAGNYIIPEVCIFFGHKLMRGNRTVKVSSNALDAFDSPNVPPLARIGIDVNVDYRLIFRPCTIERFCVHLNLDENVGLLRIFPSISHSTFRAFLAPPIRGVVLQSFGSGNIPSNRKDLIDELRAAGERGVIIINCTQCPNGTVAEIYDTGKVLCDVGVIPGFDMTPEAALAKLAYVIGKEEWSLDMKKQMMQSSLRGELTSLKAPKMEDYDLVDAVARSLHLSSPQELDQLGETLFPAMINAAVAEGDPKKINNLKAYGADLSGTNHDQRTALHLACQLGNVEIVKYLLQNGVSVHVRDRYDRTPLLEAVATDSHEIIQLLINCGAHLTGSSRAVGEQLCAAAARGSMIRLKSYQYAGADLAQSDPSGRTALHVAALHGFPEVVQYVLPYFENPNEKDMLGLTAMDYAERGGHAAVMEVLKS

SEQ ID NO: 13867 - DNA, 8143 bp, DROSOPHILA
aaatagaaaaaattaaaaattttaaaggtaatattatttttcctcttttgatgcatattttcaaaaacttgtctaaagatttcctttgaaattgaaaactgtagaaagcagttaaaatatttttaggtcttactgtcgaatgtgtcaccgtcttaccgttttatctttcctcggtaacgagtctacaatacccttttactctacaagtaagtaagaatgtatcgttagctagttgcaaagcgtacctcaagcgcattggttggtgcagcgttttgattcgagtctctgcagagtctgctcgcattttcttcgtcttttttggcatgcgacggttctagggagttccggctacctttaagctgtgcgtgcacacttttcacacactagtgtatgtttttattaacatttgagaactacaaagacgtgtagtgctccgctcccagaattttagcacttcacggcgtgtcgatagtaagttagataacgcttatcattgcttaccatacaactttgtagtgtgttttcaaaattctgtgttattcgcatatatgtacatagcttgtgttattcaagaacgccaagagcttgtgatctaatactcagaaaggtcgctaaaaccatcaaaatatgaataaatatgaataacaatatcgattaatcattgggttaattgcgacttgtctttcgtggttatatcaaattatattaaatggggcggagccgaacgttctgttggcactaagagattataatcatggatggccttgttatgctttacgattacaaatattgcaacctatttaataatgcattttttttattgcagatgagatgaaaacgcaatgattaaatcaaatttgcatttgccaattaaatacgacagcggaagtgccgatagtgccaattagcattattgccacgacgccgatctatggtcacaatttgttccttgtcagctgcactaagttgtaacattgcttatagatttcctatctatgaaatggagcatttagatcttgccggctatcttggccacacgcctcaaagttggaataccctgggaacctttcaggatcaaggtgagtgttgcgatattgagagtgaaatattaaaatttatgaagattaaaagaagtgaaagcgatgtgttgagttattacaaaaaaataaactaactacaacgttttttactgccaaaatcacattatctttaacaaaaattaattcatactttagctaaatttctttttaacatttgataataaaaaagtttaactgcaaattgtaattattgatccaaatcagtagtactgcaataccgaaattaagaattactttaaaaattcccaatcccgcttttgtggtcaattgttaataggagtgaactagaatttatgcccgatttttaaataagaaactgtttagaaattgcggcgctaaccaaaagtcgtagaaaaaaaattaaaaaaaaaaccctaaaaaacaattttaaaaagatatactactatactacctgctactatttatatactactaaaatatactacgacgaaaaatgtcaatttgttaatgaaatgaggtgttgaagttgagtaattgaagcattattctggaaaggttaaacaagatattataaaaacgattatatatgacaaccagtgttacgcttctaataatttagtctttgttttaacttcttgcagatgctgtttacctatctagctcgcgacaaatgttggaaccaattttggaggagactagcgaggatgaggaacgtgcccgaagtagcttgattgtaagcctagatcgccgctccaccctctggagctctacggagtctgaaactggatcagtcttacgcatagaaacgattaagggtaagctaatagagcgttggttctgtcattctgaacaatcgactatactagcactttaaaagcagatatcgatgctgtttctgagagggactttgtctgcccacccaagcgaccaaggcgcagccatgacttaaattctggccagatttcagaggattgcgtgcaacttcgccgccctatgccttacgatcccgagtaccacaatagctttgaacgctttctggctttggaggcatgtgctcgcgatagcttcggaagccagggccaacgcagcagtataggcagtaggcgagggggcaccttcgaggacttttattcggacagggactcctcccactcgctatcgcgcagctcctccttggtacagttcgagtccttggaacgccagctcacgctccaggagcagcatcagagtatgaacagtctgggcaacagttcgccctcgctcacctgcgagtctggtgcttcaacgcgggccaggaccagggacagcagtccagagagtaggaagggatcagccccgacgctgtccctgctaaagcgttatgaatccagcgactgtagtcatctgcaccagacatactatgagctgaacaatctcaattttgaatataagcagcagcaggaacttctctccagaagcctgcgagaggcggagctaaaatctgacctagagagctcctctagctccagctcgtccagcgatagcagtggtcacagccttctaagctcttgccttgttcccggagatgcagtagcaaccgaaagggggaaacaggacgggacgaattctcgtcgaattccccccaactcagctgagaacctgtccgaggactccggctactgcgagccaagaaccctaaagcgggaaaagtccaaatccataccaaagaatttcgagaaactttgcgaagaggaggaggagctgctgttactggaggagggcgctccgcattctcgcgacttcaaagacgagcatgatttgtgtcagaccgaaatagagcagactgcggatacggctgcattagcatgctctccgtcgtctataaatagttccccggagagggccagctccgaatcggaatcggcatcgccgctgccatcgccgaccggatcggcatcaacgtcgtctgccgcctcgttcacttggctacacaacagtttgccagatatccgcgagccacgaggtccactctctgtggaaattaacaattcaaagcccaagacaaacggcagcgttctggccaccaccagacaaaatagtggcagcacccggagcagcagctccgccgatagctgtgacggtatatcgctcctcggccccacccattcactcaacgagctccaggtgcttgaacggaggcgacgaccacgtcatattcgccccagccagagaaactgtcacagcaacagttccagtgaggaactggaggagctggacaacttatttgttgcctgccacaccccgccaaggatccgacgcagttgcagctggaacgaacgagctagaaaagtagtgggtgtggcaagtgccggatatttgaacgctagttaccaaaacctaactctattgaactacacggataactggctgccggcagagattcttcagaagaaccacaagaggagcccagcagaagaaatgtcgaaacaaagcagtaatacctgcggaaattacgagcacatgatatgtaagggaaactttttgctggatgagatcagcaaggtttatgacaaaaatgtgtctatactgacggataagccggtgctggataccaagctccctgcgccagtggaatgtgatttaaatgaacctattgaatgttcgaaggtgcagcacgtgcagctaaacataaagccaccgccgcgccagaaacgtttgactcaacagccgccagccgccatgacctttaatggccttgttaaaacatttgaccaggatcccactaacttgcgaacctcgtacacccaaagcctagagcagtgccaccttgacgagcaagaaacggcaaagcctgcttcgtacccgccgtcagccatctcacaacggttcctgcccaagcggcgattccagtcccagacgtcggcggctaagcagcgaagtctggtaagcagcacgccaaatctcgcggccagcgacgacgggcagccggaatccgagtacgatatctacgtgagcagtgcacacgcctcaatgcaccagttgccgcagacaacaacgctcccgaagccgctggggattctgcttccagccggatcgcgccattcttttggcaaggaggtaagcttctgcccagtggtaagcaagtactgttggcaggagcagtcctccgaggagcccaccgaggaccagttccactccagcgagggcgagcaggggccgcccagcgatgacgaactgatggaccccacattggtgcacaacaccagagagaacgaaaacatcgctgcgctcttcgagcccgagccagagcaggcgcatcgtctaagagagccggcgatcgcacaaaaggtatctattaatgtacatacatatgtacatataaataggcgttggtttctagatgtatgtacgtagtacatactcgaatgtacatgcatatttacataatatacgtaggtacatgacggcgaacgtatttatgtgtgtatgtatatgtatacaactatgtataccaataggcattgttcggaaaagagcattccagccctcttaattaaatgttgaaaaaaattgtttgtgcttgcttgaagaatgaaatgaagaaatctttctgccttaaaaaacatttgaccaaatatggactaaaatatagtgatgttgtctaaataagacttttaaaatttcattaaaacaatgtgaagttgaactctctgtttcacattatatttttatttccatatattaggaaaagcttcaaatgtaatacctttttttcaatttaaattacaaatgatagctgttttgtagtcttataaatttctttcaaacacgatgagagatggctaaaaataaaagccccaatcaaggctgttacacattttacattaagcaagaaaagacaatccgaagtttatacacccttgcagtaattaaacatttaagaaaacctcgtattatttaaaaacattgaaacaatttttctaaggtgttttcataaagcagctatatgatgcatcatcaaatgaaaaccgataaaatatcgtgtaagaagtcgggtgtttattgagttagagcgttttgtgatttaaaacaactactaaagctatcagatacccgttactcagctagattgaaaacaggaaattctacaatttgtttttgggcaaatcggtaaaatagataggcaagaataaaaaaatgtcctagttttgggcggtttgtgggcgttagagtgggcgtgggaacacatgggtcaacaaacctgcgctttgtactctttgcctctagaatcggtgtgcttaatctcaaaaaatctttttctagcaaaaaaagttttccatttttgaaccacatttatgaaaaattgttggatttttttttcataatttaattagttgttctatcgatttgccataaaaaaattttttgccacgcccactctaacaccctaaagccgccaaatcgctcacgcccgcacttttgaacatttttttttaccaataaaattttccgttcgcatttacactagctgagtaatgggtatctgatagccgaggaactcgactattctattctattttttctattacaagcgaagcaaaacatgttcattctgcaaatcgcaagtatgtacatacatatgtaaataagaagttatgttttttgggttgtgtaccccattgaaatttgattctctttcttcacggcatttataatttaacaaaatctctttttccagtttaccggtttccataccaatgcgctcttgtccgcctccacacacgcagagaaaaacttatcatgtgaagagagcgccaatgtcaaaaacaaagcaaacttagccacacccgattgccgcgatcaaagaaccgaagctaagaccaccctggaacctgagcccgctttaagcagcacagtcagtctaaaaccttgtgccgttgcgaactcgtcttgtcgagaagaaactccgagcgatgctattaatgaacctgcatctgcgactgcacgaccacttagcttgccgattcttagcgagccgcctaccaaccgcgcgcaccgcatcctatactcatcccaacaactaaggcgatacgaaccgaaggcgtcaccgattaacaagatgccgccggccaacgaacttagcccgcaagccgcggctgttgcgagaacggacgagaaacatccaacctccagaagcctcttctccaggttcacccacgggctgagattttcgttgcgtcgcaaaaagaagcagcagcaacaagagccttcgcaggtcaaagagtcgccaaaggagttaaggcagagccccgaggagagccaaccggtcgactttgtgcacatccctttaaagccgccaagaagttcgcaatgtggccgactggacgatactatcgtgtcagagacaagcagtggccacgtgcacagctggcagcaacaggaacagctgggcaagacctcaactctgcaaaaggtgactggcaagccgccactgcccaagatgccaccacgcagtggcatcctaacgcatgcgcctcaggaaacgaccggtgaaactgtcaattgccatcgcaccgaggcgttgccgagcgtcgaacgagaacactgcaatcagttaaccggacagttggtggctaaggttcaagcacagagaatgcgggacaccgggctcagctcgcagatagtagtcgccgaagagacacatacggttaatcgactggccggacacggcgacgcgactaggcccactgtggttaccgccgttccggtttccgttgctcctgtcgcagaggtcgacaagatgggtttgatcgagaccaatctggacactcatgaaacggttatatcgggaaagacacggtctcttatggatataacttgcaacccacttagcatgccacacaagcgatacatcgtaaagcgtctaaatgtaaacagcgttgcgtatgacgtagatgaattggacgcagaggttaaaccctcgcctggtggaatggcatccgtacgcaggccgcacaagagtatggaatttctgctggacaaggagaaccagaaaaatattctggtaagtttcgatttttcgtggctgcaatttttgacataatattttactggttaatttgtatacatacttgtatacctttttaaagttacttgtatctttctgtgaaaaattattttcaattctttcgaaaaatacccttactattattattatatatataataatttaaataataatattgtaacattaattaatataataatattaatatgtaatattattaaatagagaactctagcattctcttgtacgatttgttttgcctcgttgcgttgggcaatgtgtgtcgcccaaatgacattgtatttaattcgtattgaggcaaatgcttaaatacatatcatttggtttgttgagctaaaatatatatattcaaccggattaaagtttgcttacattattttttaaatactgaaaaataagactgaatttacgttagaaaacgttcatagtttcaagtttgctaagggatgtatgatattgatattttatagctgtaatacacttttgagaaatagttgtcatactatttatacccgttactaaaacgtggaaagtaaaaagtggattcgctgactatttttctatgaaatacatatgtatgttctttgattaggtcgttctgtccgtatactttaatcgtacagaacttgggaactataacgatgatattgagcttctattggcaaaccggctaaaattgtcaaatgaatcccaaacaaatcagcttttattcttataggatatttatgaatgaatttaattcatatgatcgaatcaagcagacacaaatacgtgttttttttaatatcagtcagctattagcagcgttgctaagtttcggacaggatagtattggaaaaaactaccccaaagtctatttttgcgcatcttgctgccctattgcgagagtttttgtttttgtttaggtagatttaaaccgttaaggcttatttaaaactaaacggagcaaaaacatttttaaagtaaactaaatcgtctaagtatttaatttctgtgcgcaaatgattgatgatat

SEQ ID NO: 13868 - DNA, 4065 bp, DROSOPHILA
atggagcatttagatcttgccggctatcttggccacacgcctcaaagttggaataccctgggaacctttcaggatcaagatgctgtttacctatctagctcgcgacaaatgttggaaccaattttggaggagactagcgaggatgaggaacgtgcccgaagtagcttgattgtaagcctagatcgccgctccaccctctggagctctacggagtctgaaactggatcagtcttacgcatagaaacgattaaggatatcgatgctgtttctgagagggactttgtctgcccacccaagcgaccaaggcgcagccatgacttaaattctggccagatttcagaggattgcgtgcaacttcgccgccctatgccttacgatcccgagtaccacaatagctttgaacgctttctggctttggaggcatgtgctcgcgatagcttcggaagccagggccaacgcagcagtataggcagtaggcgagggggcaccttcgaggacttttattcggacagggactcctcccactcgctatcgcgcagctcctccttggtacagttcgagtccttggaacgccagctcacgctccaggagcagcatcagagtatgaacagtctgggcaacagttcgccctcgctcacctgcgagtctggtgcttcaacgcgggccaggaccagggacagcagtccagagagtaggaagggatcagccccgacgctgtccctgctaaagcgttatgaatccagcgactgtagtcatctgcaccagacatactatgagctgaacaatctcaattttgaatataagcagcagcaggaacttctctccagaagcctgcgagaggcggagctaaaatctgacctagagagctcctctagctccagctcgtccagcgatagcagtggtcacagccttctaagctcttgccttgttcccggagatgcagtagcaaccgaaagggggaaacaggacgggacgaattctcgtcgaattccccccaactcagctgagaacctgtccgaggactccggctactgcgagccaagaaccctaaagcgggaaaagtccaaatccataccaaagaatttcgagaaactttgcgaagaggaggaggagctgctgttactggaggagggcgctccgcattctcgcgacttcaaagacgagcatgatttgtgtcagaccgaaatagagcagactgcggatacggctgcattagcatgctctccgtcgtctataaatagttccccggagagggccagctccgaatcggaatcggcatcgccgctgccatcgccgaccggatcggcatcaacgtcgtctgccgcctcgttcacttggctacacaacagtttgccagatatccgcgagccacgaggtccactctctgtggaaattaacaattcaaagcccaagacaaacggcagcgttctggccaccaccagacaaaatagtggcagcacccggagcagcagctccgccgatagctgtgacggtatatcgctcctcggccccacccattcactcaacgagctccaggtgcttgaacggaggcgacgaccacgtcatattcgccccagccagagaaactgtcacagcaacagttccagtgaggaactggaggagctggacaacttatttgttgcctgccacaccccgccaaggatccgacgcagttgcagctggaacgaacgagctagaaaagtagtgggtgtggcaagtgccggatatttgaacgctagttaccaaaacctaactctattgaactacacggataactggctgccggcagagattcttcagaagaaccacaagaggagcccagcagaagaaatgtcgaaacaaagcagtaatacctgcggaaattacgagcacatgatatgtaagggaaactttttgctggatgagatcagcaaggtttatgacaaaaatgtgtctatactgacggataagccggtgctggataccaagctccctgcgccagtggaatgtgatttaaatgaacctattgaatgttcgaaggtgcagcacgtgcagctaaacataaagccaccgccgcgccagaaacgtttgactcaacagccgccagccgccatgacctttaatggccttgttaaaacatttgaccaggatcccactaacttgcgaacctcgtacacccaaagcctagagcagtgccaccttgacgagcaagaaacggcaaagcctgcttcgtacccgccgtcagccatctcacaacggttcctgcccaagcggcgattccagtcccagacgtcggcggctaagcagcgaagtctggtaagcagcacgccaaatctcgcggccagcgacgacgggcagccggaatccgagtacgatatctacgtgagcagtgcacacgcctcaatgcaccagttgccgcagacaacaacgctcccgaagccgctggggattctgcttccagccggatcgcgccattcttttggcaaggaggtaagcttctgcccagtggtaagcaagtactgttggcaggagcagtcctccgaggagcccaccgaggaccagttccactccagcgagggcgagcaggggccgcccagcgatgacgaactgatggaccccacattggtgcacaacaccagagagaacgaaaacatcgctgcgctcttcgagcccgagccagagcaggcgcatcgtctaagagagccggcgatcgcacaaaagtttaccggtttccataccaatgcgctcttgtccgcctccacacacgcagagaaaaacttatcatgtgaagagagcgccaatgtcaaaaacaaagcaaacttagccacacccgattgccgcgatcaaagaaccgaagctaagaccaccctggaacctgagcccgctttaagcagcacagtcagtctaaaaccttgtgccgttgcgaactcgtcttgtcgagaagaaactccgagcgatgctattaatgaacctgcatctgcgactgcacgaccacttagcttgccgattcttagcgagccgcctaccaaccgcgcgcaccgcatcctatactcatcccaacaactaaggcgatacgaaccgaaggcgtcaccgattaacaagatgccgccggccaacgaacttagcccgcaagccgcggctgttgcgagaacggacgagaaacatccaacctccagaagcctcttctccaggttcacccacgggctgagattttcgttgcgtcgcaaaaagaagcagcagcaacaagagccttcgcaggtcaaagagtcgccaaaggagttaaggcagagccccgaggagagccaaccggtcgactttgtgcacatccctttaaagccgccaagaagttcgcaatgtggccgactggacgatactatcgtgtcagagacaagcagtggccacgtgcacagctggcagcaacaggaacagctgggcaagacctcaactctgcaaaaggtgactggcaagccgccactgcccaagatgccaccacgcagtggcatcctaacgcatgcgcctcaggaaacgaccggtgaaactgtcaattgccatcgcaccgaggcgttgccgagcgtcgaacgagaacactgcaatcagttaaccggacagttggtggctaaggttcaagcacagagaatgcgggacaccgggctcagctcgcagatagtagtcgccgaagagacacatacggttaatcgactggccggacacggcgacgcgactaggcccactgtggttaccgccgttccggtttccgttgctcctgtcgcagaggtcgacaagatgggtttgatcgagaccaatctggacactcatgaaacggttatatcgggaaagacacggtctcttatggatataacttgcaacccacttagcatgccacacaagcgatacatcgtaaagcgtctaaatgtaaacagcgttgcgtatgacgtagatgaattggacgcagaggttaaaccctcgcctggtggaatggcatccgtacgcaggccgcacaagagtatggaatttctgctggacaaggagaaccagaaaaatattctggtaagtttcgatttttcgtggctgcaatttttgacataa

SEQ ID NO: 13869 - protein, 1354 aa, DROSOPHILA
MEHLDLAGYLGHTPQSWNTLGTFQDQDAVYLSSSRQMLEPILEETSEDEERARSSLIVSLDRRSTLWSSTESETGSVLRIETIKDIDAVSERDFVCPPKRPRRSHDLNSGQISEDCVQLRRPMPYDPEYHNSFERFLALEACARDSFGSQGQRSSIGSRRGGTFEDFYSDRDSSHSLSRSSSLVQFESLERQLTLQEQHQSMNSLGNSSPSLTCESGASTRARTRDSSPESRKGSAPTLSLLKRYESSDCSHLHQTYYELNNLNFEYKQQQELLSRSLREAELKSDLESSSSSSSSSDSSGHSLLSSCLVPGDAVATERGKQDGTNSRRIPPNSAENLSEDSGYCEPRTLKREKSKSIPKNFEKLCEEEEELLLLEEGAPHSRDFKDEHDLCQTEIEQTADTAALACSPSSINSSPERASSESESASPLPSPTGSASTSSAASFTWLHNSLPDIREPRGPLSVEINNSKPKTNGSVLATTRQNSGSTRSSSSADSCDGISLLGPTHSLNELQVLERRRRPRHIRPSQRNCHSNSSSEELEELDNLFVACHTPPRIRRSCSWNERARKVVGVASAGYLNASYQNLTLLNYTDNWLPAEILQKNHKRSPAEEMSKQSSNTCGNYEHMICKGNFLLDEISKVYDKNVSILTDKPVLDTKLPAPVECDLNEPIECSKVQHVQLNIKPPPRQKRLTQQPPAAMTFNGLVKTFDQDPTNLRTSYTQSLEQCHLDEQETAKPASYPPSAISQRFLPKRRFQSQTSAAKQRSLVSSTPNLAASDDGQPESEYDIYVSSAHASMHQLPQTTTLPKPLGILLPAGSRHSFGKEVSFCPVVSKYCWQEQSSEEPTEDQFHSSEGEQGPPSDDELMDPTLVHNTRENENIAALFEPEPEQAHRLREPAIAQKFTGFHTNALLSASTHAEKNLSCEESANVKNKANLATPDCRDQRTEAKTTLEPEPALSSTVSLKPCAVANSSCREETPSDAINEPASATARPLSLPILSEPPTNRAHRILYSSQQLRRYEPKASPINKMPPANELSPQAAAVARTDEKHPTSRSLFSRFTHGLRFSLRRKKKQQQQEPSQVKESPKELRQSPEESQPVDFVHIPLKPPRSSQCGRLDDTIVSETSSGHVHSWQQQEQLGKTSTLQKVTGKPPLPKMPPRSGILTHAPQETTGETVNCHRTEALPSVEREHCNQLTGQLVAKVQAQRMRDTGLSSQIVVAEETHTVNRLAGHGDATRPTVVTAVPVSVAPVAEVDKMGLIETNLDTHETVISGKTRSLMDITCNPLSMPHKRYIVKRLNVNSVAYDVDELDAEVKPSPGGMASVRRPHKSMEFLLDKENQKNILVSFDFSWLQFLT

SEQ ID NO: 13870 - DNA, 5021 bp, DROSOPHILA
ttacaaggtaagtaaagtgagaaatgtgaaagtgacaaacatgttgaaaattaatttaaaagacgaaaataatgtttttaaaaagagtacgttattgaatgaagtgctaaagacaattatcttaacaaatagcgaaattgaacaagataaaaattagatttaggtttgaatgaataatttaatttacaataagccagtaagacctctaaagcgaattggttttcaaatatcaacagccttaccacgctagccaaataagcattccaatctttctcttttctgcgatgcagattaaccttataaatgttcccattttactcctgaaatctttcctttcattttcctgaccgtgaaccacgaaacaaaggcagtatgaaaggccagctagtcaccaaaaagatggaaatctgataaaacttcacaatcgcatagctaaaacgaatgacttaggaaacaaacttggcaattgtcgtcgaataaaattataagaatttgcattaaatgcgaatgttatgtaaataataaacatatgaattacaaaccaaagacaccatgaaaaggcaatggcattgagctgggggaacgaaaccgaaaccatttccaaccgaaaactcataatcaaaatcagtgcagcgttgcgtgtgccatggattttcattttcatagacgtcgccaggcggcaaatgcggcaaaagcagcaaaagcagcaacagcagcaattgcatcaacaatgaagccaacacaacagcaaaaacagcagcaacattatacagatattagccaaagtcgttcacgttttgactgcgaagttgagcaaagtcaaggcaacaggcggtgggctgagcaattcttaggccagtttttactgttgctgctgcagttgctgttacggctgctactgctgctgttgctgcttcagcaggcgtctgctgcattttccttggctgcgcatttcgcgcttttgcagcccatttgcagtgcacagcgcgaatctgcaagacgtggtgcggattgctcgcgaaaaaatcaaaattgctaatttcaatgcaaaggattacgatgaaatcgctaggcaaacacaaatggatatcaattagagaaacgtgcaatcggagtgcaagttgtcaatttaaacgggaaagcgctgtggaatctggttaaaaatatacgaaatatgtgaaaggcgatgaaagaggaaagccaaatatcctcacggaaaataactcattaataagtgacttgaaaataaaaatctctaaattatttcataaacaaatcagtcgaatggaattaaattaatgaaaaatttggtgtaaaattgggtgaaattaaattttttttttaaattgtgaaagataataagttaactttatatgcatgagctaataacaacctgaattatgagctcaaaattttagtaaatattattaccagttaaagtattgataatgtaacttttttatgtgaaaataatcgaaactgcattgaaattttggctttaattagcattttaaataagtgaaacaacaagtcataagacgttaaagtccaaataaaaaatgaaacaaatcgtcgtgctttgcatattctcactctttgccaaaggtaaaatacctgaatttatttcacataaaatgtgttgatcaagctgaaaaaaaatccagttcttgtttttccgttcaaaaaatcttgatcatttacacattttaaagtgtttttatgaaaaggcagagaatttaagaatcgtgaaatgcaattgcagatgcacaaacattgctcctaagccaaatggattggaagaatctgcgcaacagtggagccttggacctaaatgtcttgcgctgctttttgcgcgacaaaaactattgtcccagtccacatatcgatcaccgtctgtatgcaccgtaagttcgattggattcgaagatattatgagtactcccaaagtaatattcctttttgagcaaaatcaagttttatcggtgaatcacacttttaaattggtattaagtccataaagtgctgatcaaaatgcttgcaaatatatattttttaagtgctaaagatgtgttttcatctttaaaaatcagtcgtgccacatgtttaggttcgatttgtttataaatttaaatgccaaaagcaggaaaattaatgttattaatttagtcgctggcgggggagaaagttcctcaggtgttaggcaactggaatttcagactcggttagtgtgtcaactgccgaaacacttgtcgcactgcacttgtgcaaccataaggatattaagcggcaaagagcaagagaaaaaataagagtacaattaatgggcgggcaactcgtttctcgaaaccagccactgacccactaaggatgggatgcttttgccaaaggaggccggctttttccacatcgagcgccgatcttggccagcgatgacatcaatttcaatggccaatgccaataaaatgctttgtaaatggctcctcgatatttgcccaacttgtctgggcaagattaccgccagctctggaggcgagacaaagtcgcaactggcgaagtccatttttggagagcagacgggtaattgcggtggtaacaaatttaacaactggggggattacatgatggccagcttttacgagcctgctgattgatggttgtataacagcgggaaatgaccgggctgacacctccgttctgggaaatccgcgaaggaatacaaattgctttttctgcaactatttagtctcgttaagaatttctggaaaccgtttggcttgtaattggtgatgtattttaactcatagttgtaaagtctataatttgatccactttaaatgaatttttcattattactagcttgatattcaattgaaaatctttcaagattaactaaagttaagagttagcatgcccagatctgtgcttgctgcacgagagatttctacggttttatacacacatggaatttccatagttctatttaaatgtatgcacaaaaaagaaaacagagatatctgcaaaatactattccattattatatagtggctttttacaatattttcagcaatggaccgcgtcgtggaactcctttaaatgttaagaacccaataacgctttataaaggtggatttagcaagcaccgcgagactgtcttcataatacacggattcaatggaactgccatagatattcacctgcaattccttcgagatggtgagtgcatctatctgttaaattattatattctacaatattaagctataatttatataactttaactctctctttttagcttacctatcccgcgatttcaatgtcattacagtggactggcgacctttgacccgctatccatgctacctccactcgcttataaacaccaggttaactgcgcaatgcaccgcccagatctacgccttcctcacccactacggagctgtccgggaacggatcacttgcgtgggtcactccctgggcgcccacatctgcggcatgatcagcaaccacctgacgcggaaacagtatcgcatcattggattggatcccgcccggcctttaattgagcgcatgaagagcaacaagtttcggttgtcgatcgatgatgccaacgtcattcaggtgctccacaccaatgccggtttcctgggccaggaggataactccgggcatctaaactactgtgtcaacggtggacgcatccagccgttctgcaaaggaaatccaatcagtaaggctaaattaaagtagtttaataccctctttctcggaaaaagaaatcatatataaataaatgtgctctctatcaaacaggaaaatcgcgatgttcgcacttcttgagcatctgctacttggccactgccacatttaaacacaataagttcatgggagtaccgtgtcccaatggctgcctgaatcttagtggatccaagaggctgccagtgagcggcaaagtgaatcccttcgagttcgcctcgctgataagggagtaccacataggcaacgatgcccccgatgagtaagtttattaaaaaccatatatataatttataaccaatttcatatttgatttagcgcccgaggctgcatttgcattgatgtgccgtatgccaagcactgcccctttacggatgcgtaggagctggtcttcagtagtttgtaattctatgataaagctgtcgataataaattcaagtaatattatttttttggtctttgggtattttagtaaatatgaaggaaaaatgagaaataattacttaccttctactacacgtagtaggagtttattattaaaatgttgcaaattccaaatttagttttcgaaaatttaaaaatcaaattcgatatactaagagtttggttcaccgtaatataccaaaatttatatcgaatatatgatatcgatgtttgcaatcgtcattgcagtcgctacagctgtttggtgttttaccatctctatggacattgtgtatataaaacatttgttattgctcataacagaatttctccatttactacaacctgaagatatatagttatttatatcgttagtttatttaaagtaagtaagatacttataccgtgtaaaatgtaaaacaattgaaaaatatcataacccattgtaaatcgcatattatagtttgcccaacaaggaattcccaggaaatatattgtaattcttgagataaatatataatcatgggttgcgatggaggaactattcccaggcgcgatgagctggtgcgcgtgaagcaaaagccagagcaggtaagtctattcgattggagcacctcctagccagaccgaaatatcatttctcgaaccctacagaaagacaaagatgcggagagggagttccgttggcgccactgcaccttgacccagcaaagcctccaggagccgatcgccatgtgcggcatgggtaggctctattccaagcagagcgtcattgagcgactgctggagaaggaaccgatgccagagacagctgcgcacgtgaagagcatgaaggacattcgc

SEQ ID NO: 13871 - DNA, 1540 bp, DROSOPHILA
cgtggtgcggattgctcgcgaaaaaatcaaaattgctaatttcaatgcaaaggattacgatgaaatcgctaggcaaacacaaatggatatcaattagagaaacgtgcaatcggagtgcaagttgtcaatttaaacgggaaagcgctgtggaatctggttaaaaatatacgaaatatgtgaaaggcgatgaaagaggaaagccaaatatcctcacggaaaataactcattaataagtgacttgaaaataaaaatctctaaattatttcataaacaaatcagtcgaatggaattaaattaatgaaaaatttggtgtaaaattgggtgaaattaaattttttttttaaattgtgaaagataataagttaactttatatgcatgagctaataacaacctgaattatgagctcaaaattttagtaaatattattaccagttaaagtattgataatgtaacttttttatgtgaaaataatcgaaactgcattgaaattttggctttaattagcattttaaataagtgaaacaacaagtcataagacgttaaagtccaaataaaaaatgaaacaaatcgtcgtgctttgcatattctcactctttgccaaagatgcacaaacattgctcctaagccaaatggattggaagaatctgcgcaacagtggagccttggacctaaatgtcttgcgctgctttttgcgcgacaaaaactattgtcccagtccacatatcgatcaccgtctgtatgcacccaatggaccgcgtcgtggaactcctttaaatgttaagaacccaataacgctttataaaggtggatttagcaagcaccgcgagactgtcttcataatacacggattcaatggaactgccatagatattcacctgcaattccttcgagatgcttacctatcccgcgatttcaatgtcattacagtggactggcgacctttgacccgctatccatgctacctccactcgcttataaacaccaggttaactgcgcaatgcaccgcccagatctacgccttcctcacccactacggagctgtccgggaacggatcacttgcgtgggtcactccctgggcgcccacatctgcggcatgatcagcaaccacctgacgcggaaacagtatcgcatcattggattggatcccgcccggcctttaattgagcgcatgaagagcaacaagtttcggttgtcgatcgatgatgccaacgtcattcaggtgctccacaccaatgccggtttcctgggccaggaggataactccgggcatctaaactactgtgtcaacggtggacgcatccagccgttctgcaaaggaaatccaatcagaaaatcgcgatgttcgcacttcttgagcatctgctacttggccactgccacatttaaacacaataagttcatgggagtaccgtgtcccaatggctgcctgaatcttagtggatccaagaggctgccagtgagcggcaaagtgaatcccttcgagttcgcctcgctgataagggagtaccacataggcaacgatgcccccgatgagtaa

SEQ ID NO: 13872 - protein, 302 aa, DROSOPHILA
MDWKNLRNSGALDLNVLRCFLRDKNYCPSPHIDHRLYAPNGPRRGTPLNVKNPITLYKGGFSKHRETVFIIHGFNGTAIDIHLQFLRDAYLSRDFNVITVDWRPLTRYPCYLHSLINTRLTAQCTAQIYAFLTHYGAVRERITCVGHSLGAHICGMISNHLTRKQYRIIGLDPARPLIERMKSNKFRLSIDDANVIQVLHTNAGFLGQEDNSGHLNYCVNGGRIQPFCKGNPIRKSRCSHFLSICYLATATFKHNKFMGVPCPNGCLNLSGSKRLPVSGKVNPFEFASLIREYHIGNDAPDE

SEQ ID NO: 13873 - DNA, 12398 bp, DROSOPHILA
ataattggaatgatattcgaaatcattggggatatgctgtttggcagtaagtgggaggacatgggagaagtggagctggataagtagtaaaaaaaaagcggacattatagtcaatttatcaataaataaagaggaaatcacttcatattattgcaggtgatacctcatcagatgatgattacgatgagtcgagcacctagattattattattttaataatccgcgaacctaatagaagttatcaaatggattaatccaaataaaccatacaaagtataattaacctttgaaataatgctataaatacaaaacgaaaattgtgaaactaccaaagtacaaccaacaatatggactgttgtgagctgccggaaatatttttgagcttcctcaacgaccttttcttctcagacataagtaatgaatttgtaatgctatcaaaacagggctttttaatcatattactattttattttcattttttgtttgtaaagctgatgcggagtacttgggcgattattacgacaactacaattgaaatagaccagcgatcgtgagcaaataaaaaatttgatatgagcatttacctttaaaagcttttcaatacacaaatgtgtactcgtatatttgtcccatttctgacccagatcatgcaatcatttctgattcgaattaagtccgaattggttgagcgtttttggtcatggctcattaaaggggtctgggtcaaaaccgatctcgagcggtaatgtcattgtacttcgttacaaaacgctgacaacaccggatcgaaaatgttttgggatctgcttggtggaattttcgagtttcttttcgggctcttgtttcctagtaagtttcgtagtgactcaatattaacttcaatggccatgtatttacctattatttacctatttttgccaccaggttctggtagtggggatgagccagactccgaggaggtcgaaaccacttgatggcctacatataagttaatatatttatatttcatgtttttgctttattatatctacgtaaaatgtgtatgtttaacataaattgcttcaacagttactacctcttcatagtattcattgtgttgcaattgaggatatgtacagtgcgcactcgttacacgcatttcaacatgtttataatctaaaaaagcttgaattgctttttcagctccattttcttccatttcggcagctcgtcaaattcataaaaggacatattaaacactgacacaaaatcatcgtgtgttaggtgaacctgcggttggaaaacagcgttttaaaaaaaggagatattcgcattctatgtttagttgaacccacctccctcttgagcggattaatatctggtggcagcatatccatttcctggatgagcacggttaatggatactttttgtgaccatcaaagtccttctgtctgttgttcaggattagagccgatccttcgcttgcgaagcaacaattgctggtcactttatttcccagatccttgcgcattttctcgtaggaatggaagttctaaagttatacaaaataagttggttaacatttgaaatcttggagcccttttgttatggattaccttgccgtaatcgttttgccaggactcgaagaatcccttgaaaacatttggctcctgaaactgcctgaccacggccaacgctgtcgctgatctgcgtccgaatggagcattttggacataactttgggcaatcgctgtgtagcgttcctggtttggggcctgcgatcccagccagacgtaggtgaggctcccagtgtccagaatataggtgcaatccgaactgagatcctgctgatcgaatccgagaatctcctcgtatctcagcgaactctgttgccaccataccagaaatagttgtacaggaggtctcggtttactcggaacactggtgtttaggtaacaattattgctgagagtgggtgaaatgttaccaccattggagctaccattgcacatgctgccggcgccactgctgctactggtgctgctggaacatgagttcccatttccgttgatcactagagtttggttgaagtacatggccaccgattgccagaactccttactttccttgccttcgaggaccagagagttttcccccatcagagctcccactgctttggccatctcgcgggcatctcccgtgctactttgcccgcaccacacccaaacatgattcgttttgatcacatagcaatctttggagctgatcgatgacagatgtgtctcctccacagccttggcattgtagctagcatcgccataaactttcagcagaaaggtgtccagcaaggcattggagttaccattgtaaggcatctcggtacgctgaccgcgcctgataataagttttccctcgaagatctgaaggaagtgcggtggttcatcgaactcatagagctgtacaaacattccaggctccttgagcccatcaaaactggccttggcgaacttgtccgcccgggaaatggactctacagaggcctccgaaccattccactggtagatgattgttttaatgccaacggaggccaaatctgcgggaacaacggtggcgcactgaagatgaagtgaatttattggattgtacacagaacttaagcttattatcttacctgcacgctgtacttgaccacgaaactggcattggtggtgaacacaaccgtttttgagatgggcacctcttgcacctgatctccgaagacacgatagattactctttcacccctgccatcatcaacgagctgtgtatctgcagccattttagggcgttcgcatagggaatgggcatctagctttccaaactttgtggacactggcttatgtcccctggtgttctcctgccaaacatttaaccagttggcaaagagacgcttaaactccacgggctcgtgaccctcgaggacacgcaccaccaacgtattatccggatatttcttctttttaacaaaagctctcccatttcccatggcagaaagggcatctgcctgcggtgcctggcctcctacccacaaccaaatactctggccgtagttgtccagtaaatagactccatgggcatcgcttagatcatcttttgctggcatgcccacatccaattgatccaggtgcagccttccccgttgattgcacttatagatgcggaacttattgctattgtagtcggcgtattcgctgaccaactgactggcctgacagaccatgcgtttctttagcggaagcatggtgttccacagctccttgtgctcctgggacatggcctgctcatatccatcatcgactatagtgattggcgatccactgcagtgcttttggacccagtcgagggcacttcgtcgttcaattcctgaactggagcgccctatccagacgtaggtaagattatccgtttgcaggaccattacgtaatccgagttaaagtgcgaccaatcgatggtggccacctcaatggatcgcaaccatttgcgggcgtacaattgaaaaagtcgtggcctctggggcgcgcttattagtgctcccgatcgaacactgaaacgaaatctgtattatttcccttcccagcgagagagaacagagaactttaactcactcgtaacccttcttgaaatacgaaaggaatctcgcactctccagattctgggtctctcggtaaatagaggatatgtttcccagatacgagtccagctcctggattttatgaacaacattggatcgattctgctcgctaacattcttgcccagccagtagtggatatatcgctcaagactcacattcggcttctgttcgcgtgtctgtaaacatgagcattagttaaaaccttgctgaaacacaagccaaaccaactacttacgatggtttcgtgattggcataatgccccgacaaacttgctgcatagataatgtaggcgcagctatcgtagaaggtgccataatgtgatctttgtaccgcctccaggcgatcctcgtctatcttccaaatcgcaaaggtaatcgcatgtttagccaccttccgaaatgtggcatccacctttaagtccggaatggtgttgggacggatctccttaaatatgtaaatatgtaaataagatttttagatcgttcaattgaatttaatgctatttaatggtatattatgatgttacgtattctatttaatatgttatgaagggaacacagtcgtatgatgatttaatttactaatttagtccgaaaatagagttcaaaattacatgggaaaaagacactccttttcttggctacttttctcgattttcctgagattatgcacttcaacttaaaggcacgcaactcgaaccaatcgaataagtcaggtttattaaacgaaatttcatgtgcaattaccattcagtgctcccgttttcactgcaagttggtgacaatgtcacaatcaggttgcatgaacagcacttgccacgacattgaacacctttcaaacgatcgccaattgttgctgtcatgagacacttgagacacaacgccaaggataaagaaattgctcaaaactagcaaaagaaaaatgaaaaccagaaaccccaaacccgaacccgtctgcagaagtgctctgcatccgattggaggaggcgcaagtgatagtgaaaaccaaaagtgaacaggggcgggccgtgaaccacatccaaccacatcacgttggtggtgcagccagtttttgttggccgccgtcgaacattaggtttttatttatttatggaacgcagcaaagtggaaagtggttgcatatacgcatacaataggcacagacgcactgcatcttcatcttcatcttcatttcaatcgtgatctcggctagcggtttggggtcaataggcaggctgcctctttggctaattaatgttttgacatcggagtctggtgtgccgcgtttcatttgtgattacatggtggcgtgctcagtgaccaaagacgagttcatgcttcgcctggcagcgtttgctactcccaccaaatgacatttcatggaaatcacaatagttaatgactgccttttactgggtctgctcataaataagcaatgcataaaatgcgctgcacacaccacataacataaaagcattttaattgtcgcctgcgcgaatggtgaaataactcggattactttaactgggcgcttgggttaaccaggttttccagctctctggctccatcatgattgattgatcttcgctgccgacagctaaactacatttgtcatgctctctcacaaaaagtcaattttctctgtcaagcgcttagcaaattataacatttttttttaaactttgttttcagcagagactttcacagccgccaattatcagcattaatctaagcgaaagctgatcgccgaaatgttctgaatagaatgttaaaaataatttcagatacccatctatcttaagacagctattgtgttaaatttttactttccttgcggtaaggctattaacttgatggatgatgctcaaaagtttaattgctggccatcgatggttttaaacatttgaagaatttggaccacacttacttttactgcacaaggtatgaaaatttagaagttcatttggaaatcgaacccttttttttttacttaaggaagaagtattgagtattacaaggaattatacattaattttaaatttgccgcaagtgatttgcccaattgatttaatcaaataaaagactgtcaatttccttgcgaaaatctttattaatttcccccctaataatggtgtcaacaaatctcttacaagacctgggcaaacaccatcgtcaggcgctaaaattgattgtaattgataaacaaataattgccagctcgtaattaacagctgaaacttgctaaataaacttgtataggctggccaagatactggtaaatataggagagctgatgggagagattcgagacgcgaaatatgcataatgaaaagcctgtagttaccgtttcttttggtgacagcgatagctccatgtgcgcggatgtatctgtatctgaaagatacagcacagctgccttgaactagttttgatttgtctccccctccccacaaaaccgatggcaattccgatggaagccggcagcagcgcagctcaaagtgaaatccttgcgagttttcgttttgccagcgcttttgaaaagcgaatgtcgctgccgcacactcacttcaaaaacacacacgcagcagcgttttgagagcgatcggttcgctcaaaaaatcacgatacataaaattcgaaaaaaattttgaatgggggtgttgatatcccaaaaaacgtagccaaaatagaggcgaaactgaaagttaagccaaatgctagcctggattcgattcaattcgattcgttttcgttttaacagacactcgcgattcgcgttcttttttttccacagcagattttcccgagtctcttgcgaagcgtctttgccagcagaaagccaactgcagactggccgcctcgaaatgccgcgctccaagtttatggccaggccagctttggtgtatcgctgtacaacagcttcgagccaaatgagcaagtgggaagcaccaccagcgactgactgtgtgactcagaaatgaatgaaaattatcagttagattgtcggttttcctctccacaacctttcagtttccaaccgaactggctgagaaaagcagaaagcgcagcgcactttgttgcggtttcttggccgtttccttaacttggcctggctcatgctcttggtcttgggccaacgaaactctgagctctgagttctgggctaaaggctaaggggaacaggctggcaaacggggtctaaacaaattcttacggggtgtttgctaattccttctattagctctctgcggattaacaattgcttgtgtgagcgagttttgctggctccatcagctaatggcaggagtttgatatcaaagggtttcagaaatgtgttgaaaaatcataagtgaaattgctagttcattcatttatgtttgcatttttgcataaagcttgaactttattcaaaaatatgtgaactatagcattaaagttcgttaaggaatatgtaagtatgcattaaatgcgtaaaaaacctttttagaactagtaacattcgatgctccattaatagagcattgattcttctaccaggtgaactccacttcatcgttttgtatccagaaactgactccacactttctgctgcaccgacattctccgcaggcaatcaagcacaaacagtggagctcggctggcggggaagtacttatgtccacatcggtgttgtacattccatcgatttgcatctctcgggtttcctacggcttttgtcaaccgagctgacgcgctcgactggcttgagtcctcacttttatgatttatgtttggagattggcagacggtcatttgatggccataattaacacgactggagggcgattttggggatcgaggatggggtgtaccaactgcgccggagaaatgtggttaaattatttcgggggaacaatttggcagcgatttgtttagcaattcagagccgagtttcgactcaattaagtcgaaaatgtcttgtgtatgactcggtaatgagtcgaaatggttttccagtgtgttccaaagcgtgaatgacactaatgggtctggcccagagaaccgtgtatctgtgtatctttgtagctttgtatcttcgtatctgcgtatccacatatccacgtatccgcatcttggcaagacaatgcgatgcctttcaaaaccaaccaaaaaacacaactctctttgctagccatgtttcatgtttccatgatgttttttccccaactctggccaactcaaaactctgacaagttcaatcaaccgttgaggttgaggcgtgaactggggaaatggcgagaaacataactaaaaaatgaaagcaattgtatatgaaaatgtaaattgtaaatgcaaagcatttttttttgtatacagctgaaaatgtgcgacttttagcatgatgaaaaattgcaatttacgatttatgataattacacacgtcaacccgcaacaagacgaacgaccaggccaattgacttttccttttaagccgaaaaaaaggcagcaaaccatttgattgttgtttgcctctctcattgttgcgagaaacacattaagaccattttgtggccacacgcgacatttacgtaaagtctggaaaagcgtctgaaaagcgccacaataatgcaacatcgacttgtggcattttcattttccgcaactgccaacgggaaacggccagccggcaaagtaccgcttttgaatcttattttttttttattttttctctcattgttttccaatgttttcctctagcggtgattgtgccaatggatctttgctcttttccagccttttcattagccaattctgaagatggccaaggaatggcaagcatgctgctgtcagtggccactcgatcttcgggctaaaagcagaccacattaattgccagccgctccagatccagattctggtctagattcaggtcccagacagactcctctcaatggggggaatctccactggcagtttgaggcatgatcgatgtattgttaagtggaggtgggttggaaatattatgccatatatcactgacgaaaaacgatttttacatgacattttaaatatatacccgacacttgataaagacataaaaaacgtataacttaacataactcacacataacgggatggctagcaactgaacaattaaaagttgtatctatacaagttacagcatttattttctgtattttaatagatacttatagttaagcttaaaggaaataacttatattaaccatatttctttataatttctttataattacagatttcaaacaagataaatagaatatacatatatttttaaaattatttttaggccaaattagcttacgttgcgcgatagacaagtaaatcaagatgtttagcaaagaaatacctaattaaagtaaagctatgttaaggatttatatttccaggaaaagaagatcgttgcaacaacgctctttttaattggacttcttgccacctgtagccttttatgaggccaaacacgtcggcagatcggatggcaaaatccgaatatcaataacaataacaggtgttttgactggctggcagtgcttttgatttagcattaataaatggttaattagctgcgataggcgggaacaaagctggagaccacaaatcataatagttttgaaaggcgttcgatctttggattgaaatcgaattggattttccacagccgcattcgagttatgctgcgcttttcacgaagtagctaccgcaaatgttgttttccagttttttttgtcgtttttgtttccccgctttttgtttgccactcgaaaccgcaatttggtattgtaggcttcccacgccaaaaaaataaaataaaaaaaaagttaagtgtgggtgaattaagcacgaagagttcaaaaataatttcttcattcaaatcgtaggaagtgaaaagttggacaacaattgcgctggaagctgagcattttgggagtcataagcaaataaatccagcctaacggttacttaactgttacttaacatgcaattaaccctcagttaaaaactgaataatgcaaatataaccagattcggttcgggttcagctgcgctgagataatatatttaacaaaaaaaaaaaaaaataacacaaagatacagaaacacaaacacagcagatgtgctgcaataactttctaactaaggggtcattcgtcttaattatcacacgacgactgggaaaagcgtttgcatggaaattcattaggcaggcccttaaaagatagccgggctataatcataatctgtagcactgaaccaaccactgtccatcggccaagaccaagattcaaaacaaaattagtggggaaaaagccataaaaaacataaagaaagctgcggacgggttgggccaccagttgcgtagaaattcttcccacctttatgggtttgtttggctttatatgtagatgctgcttcttcggtttcgtgctaatgcgtcgttgttctcccaagatctcgtttctgttctgacatttgatcaccggaagctatcttcaagcatcgccagaagcccgcttaattacgcataatctcttttggggtcaccacatctcggggtctccagctgggcgccacgaatgaatccattttcgttgtgcatttcattagtcttggtccgaatccatttgaaattggtttaccatttcccgtataacattttctttgtttggagtgcgacgtttagacacgtattttgtgtgccgcttgtctttcgaagatatggtaaattggtatccaatatccatcgtctcgaattgaacggaaagtgaagatacacgaagtgtgctcttaattatctgtttgtcccagctcacttttattcttggaacagtagtgaatctgcaattaattgattcgaagatgcaaggtcgggagtgctgagctcttatcagagacattaccttgatagacttgataacacctgtggcatgttgatgcaataattaatatgaatttaatgcgtaagaagatgtcgaatgatttaaggataaattcattttagcacgatcaagttatcaatttggcttaaagttcacttccttatcctcgtgcaccctttgagttaccactgtacttcaagttagcactaaatatcctttgtatgtacatatgtatgtagatttgattacctaactttaatcgatttcagcttcagctgcatatgcatctcgccagcgcagatttctgccgcaaagcgcttaattaattatttcgcgccataaaatgtggcaacacctatttaattaatttgcactcacctgcttgatgaaattaaacggcggcatttttgtggtccaatttgcggctgcgctacaatgcaaattagagtattcgcttgtttcttttttgtgtagaaatggaatggggcaggtgcaattgttgttgcaactccaaaagcaaacaatctaattaactttttcgcacttcgcggactatttgttgtgtttatggctgtcacctttttggcattcgctttgtttggccgcctttttttgcaattcgctttcgcgcgcttcttcgcacagtttaccgttagtgggaaaaagagagcgccacacaagtgataacgcgtcttttggcactgcaactttatttgcgcactttccaaacaaattaacccgaattaacgtcaagcggaagtcaaacaaaaggatatagtcgtgcgatccgctcgctgatcggtggcattaacgtctaacttaacccgtgaaaagtcgactggcgactgaacgtgaaaaacttcaattgaagcgctccgatcgcagttacatacatgcatacatacgtacttaagtgtaacatacagacatacacatgtacatgtacttgctatgtatgtatgcttctctgccgacgtcggtgaatgtgaccctttcgagttccactttgaccatggccaacatttgaaagggtatgctcgaccattgggtcggcttaattataaatatgtacgtaggtaacaattataagtgtttgtacaccaacggaatgagaaagagttggataattacagttgccaggcattagttgcaaattccagatgtggaaagtgcatgtctgcaaaataataaatactgactaacaggtttgaattggtaggaatttcaatcatcaacggaaatgttatacaaattttaacttacatgtgtgcataacacattctttaaaaacaataagaatacttacatagtaaatatacatacgtgcaaagggatgaacataggaacatagatatttaaaaaagtgatgtacgaatgtgcatcagatcattggtaagtaccccatttcgtatgagttcaataattgattaaaccaattacaggatatcaacagttggttagcattctccacatccatgtggacaagtttcgcgcttcgctgctcgcttgtgtcagaatgccggctactactatcgccgtcacatggccatagtatttggctattccaaaaccatcgccccaccatcatagtcgtacccataaacagcgaggcttcccagaactccccgatggcttttgttattctagtcttttattgtcgtggcactcgcaatcccggagaggtgtcgttaacaatgcagagatgtacatacgtacatatgcacatgacgtcacacttggcctggggcaccctggaagtcagtctgatcggtctcctcctctgcctgctgcaggagctgaagacactggcgcaccttcagcctggcatgggctatatcgcgctgcat

SEQ ID NO: 13874 - DNA, 3261 bp, DROSOPHILA
agtcgccagtcgacttttcacgggttaagttagacgttaatgccaccgatcagcgagcggatcgcacgactatatccttttgtttgacttccgcttgacgttaattcgggttaatttgtttggaaagtgcgcaaataaagttgcagtgccaaaagacgcgttatcacttgtgtggcgctctctttttcccactaacggtaaactgtgcgaagaagcgcgcgaaagcgaattgcaaaaaaaggcggccaaacaaagcgaatgccaaaaaggtgacagccataaacacaacaaatagtccgcgaagtgcgaaaaagttaattagattgtttgcttttggagttgcaacaacaattgcacctgccccattccatttctacacaaaaaagaaacaagcgaatactctaatttgcattgtagcgcagccgcaaattggaccacaaaaatgccgccgtttaatttcatcaagcaggagatccgtcccaacaccattccggacttaaaggtggatgccacatttcggaaggtggctaaacatgcgattacctttgcgatttggaagatagacgaggatcgcctggaggcggtacaaagatcacattatggcaccttctacgatagctgcgcctacattatctatgcagcaagtttgtcggggcattatgccaatcacgaaaccatcacacgcgaacagaagccgaatgtgagtcttgagcgatatatccactactggctgggcaagaatgttagcgagcagaatcgatccaatgttgttcataaaatccaggagctggactcgtatctgggaaacatatcctctatttaccgagagacccagaatctggagagtgcgagattcctttcgtatttcaagaagggttacgatgttcgatcgggagcactaataagcgcgccccagaggccacgactttttcaattgtacgcccgcaaatggttgcgatccattgaggtggccaccatcgattggtcgcactttaactcggattacgtaatggtcctgcaaacggataatcttacctacgtctggatagggcgctccagttcaggaattgaacgacgaagtgccctcgactgggtccaaaagcactgcagtggatcgccaatcactatagtcgatgatggatatgagcaggccatgtcccaggagcacaaggagctgtggaacaccatgcttccgctaaagaaacgcatggtctgtcaggccagtcagttggtcagcgaatacgccgactacaatagcaataagttccgcatctataagtgcaatcaacggggaaggctgcacctggatcaattggatgtgggcatgccagcaaaagatgatctaagcgatgcccatggagtctatttactggacaactacggccagagtatttggttgtgggtaggaggccaggcaccgcaggcagatgccctttctgccatgggaaatgggagagcttttgttaaaaagaagaaatatccggataatacgttggtggtgcgtgtcctcgagggtcacgagcccgtggagtttaagcgtctctttgccaactggttaaatgtttggcaggagaacaccaggggacataagccagtgtccacaaagtttggaaagctagatgcccattccctatgcgaacgccctaaaatggctgcagatacacagctcgttgatgatggcaggggtgaaagagtaatctatcgtgtcttcggagatcaggtgcaagaggtgcccatctcaaaaacggttgtgttcaccaccaatgccagtttcgtggtcaagtacagcgtgcagtgcgccaccgttgttcccgcagatttggcctccgttggcattaaaacaatcatctaccagtggaatggttcggaggcctctgtagagtccatttcccgggcggacaagttcgccaaggccagttttgatgggctcaaggagcctggaatgtttgtacagctctatgagttcgatgaaccaccgcacttccttcagatcttcgagggaaaacttattatcaggcgcggtcagcgtaccgagatgccttacaatggtaactccaatgccttgctggacacctttctgctgaaagtttatggcgatgctagctacaatgccaaggctgtggaggagacacatctgtcatcgatcagctccaaagattgctatgtgatcaaaacgaatcatgtttgggtgtggtgcgggcaaagtagcacgggagatgcccgcgagatggccaaagcagtgggagctctgatgggggaaaactctctggtcctcgaaggcaaggaaagtaaggagttctggcaatcggtggccatgtacttcaaccaaactctagtgatcaacggaaatgggaactcatgttccagcagcaccagtagcagcagtggcgccggcagcatgtgcaatggtagctccaatggtggtaacatttcacccactctcagcaataattgttacctaaacaccagtgttccgagtaaaccgagacctcctgtacaactatttctggtatggtggcaacagagttcgctgagatacgaggagattctcggattcgatcagcaggatctcagttcggattgcacctatattctggacactgggagcctcacctacgtctggctgggatcgcaggccccaaaccaggaacgctacacagcgattgcccaaagttatgtccaaaatgctccattcggacgcagatcagcgacagcgttggccgtggtcaggcagtttcaggagccaaatgttttcaagggattcttcgagtcctggcaaaacgattacggcaagaacttccattcctacgagaaaatgcgcaaggatctgggaaataaagtgaccagcaattgttgcttcgcaagcgaaggatcggctctaatcctgaacaacagacagaaggactttgatggtcacaaaaagtatccattaaccgtgctcatccaggaaatggatatgctgccaccagatattaatccgctcaagagggaggttcacctaacacacgatgattttgtgtcagtgtttaatatgtccttttatgaatttgacgagctgccgaaatggaagaaaatggagctgaaaaagcaattcaagcttttttagattataaacatgttgaaatgcgtgtaacgagtgcgcactgtacatatcctcaattgcaacacaatgaatactatgaagaggtagtaactgttgaagcaatttatgttaaacatacacattttacgtagatataataaagcaaaaacatgaaatat

SEQ ID NO: 13875 - protein, 887 aa, DROSOPHILA
MPPFNFIKQEIRPNTIPDLKVDATFRKVAKHAITFAIWKIDEDRLEAVQRSHYGTFYDSCAYIIYAASLSGHYANHETITREQKPNVSLERYIHYWLGKNVSEQNRSNVVHKIQELDSYLGNISSIYRETQNLESARFLSYFKKGYDVRSGALISAPQRPRLFQLYARKWLRSIEVATIDWSHFNSDYVMVLQTDNLTYVWIGRSSSGIERRSALDWVQKHCSGSPITIVDDGYEQAMSQEHKELWNTMLPLKKRMVCQASQLVSEYADYNSNKFRIYKCNQRGRLHLDQLDVGMPAKDDLSDAHGVYLLDNYGQSIWLWVGGQAPQADALSAMGNGRAFVKKKKYPDNTLVVRVLEGHEPVEFKRLFANWLNVWQENTRGHKPVSTKFGKLDAHSLCERPKMAADTQLVDDGRGERVIYRVFGDQVQEVPISKTVVFTTNASFVVKYSVQCATVVPADLASVGIKTIIYQWNGSEASVESISRADKFAKASFDGLKEPGMFVQLYEFDEPPHFLQIFEGKLIIRRGQRTEMPYNGNSNALLDTFLLKVYGDASYNAKAVEETHLSSISSKDCYVIKTNHVWVWCGQSSTGDAREMAKAVGALMGENSLVLEGKESKEFWQSVAMYFNQTLVINGNGNSCSSSTSSSSGAGSMCNGSSNGGNISPTLSNNCYLNTSVPSKPRPPVQLFLVWWQQSSLRYEEILGFDQQDLSSDCTYILDTGSLTYVWLGSQAPNQERYTAIAQSYVQNAPFGRRSATALAVVRQFQEPNVFKGFFESWQNDYGKNFHSYEKMRKDLGNKVTSNCCFASEGSALILNNRQKDFDGHKKYPLTVLIQEMDMLPPDINPLKREVHLTHDDFVSVFNMSFYEFDELPKWKKMELKKQFKLF

SEQ ID NO: 13876 - DNA, 3516 bp, DROSOPHILA
cttagcccaaataggttcataaagcctcgagcacccaagcctttaaactgcaggccaagcgaaaagtgaagacagctggggcaactttcgccggcttttcatgccgacttgattgttgcctcctcccgagttttaagtgcgagatgggattcacacactttgatttcatttgccataaattctgttttccagggaaatcccttcttagactcctcattgcattttaaatttaattttatgaactccacataaattaacattgggtaatgtttgcttgattggttgccggaaaaataactcaagagataaataagttgcagtttttatttgtttttcaatacaacttatgtaatataaacgaaaaataagaaatacttttgtatacactaaattattaaggcttgggtcttgaatgtttcatacatatataaaaaaccagcacaatgtaagcatttacattaggcttaataatatattaaacaggtttatcaatagtggaaaaaagaaaacgaaatattcattgaaacaatcgaagatgatgaggaattggcgtacttaggtaacgtgtaattaaatactaattttgttgggtttatcagctgcttctcaagcaactcaaagacgcgaagaaatccaactgacctatatataaccatagtctgaatattaaaacagaaatccttcgcctacatttcaattaatttaaaacgctgtcgcactcaacgagcttcctatccgtgaatgaaagctcaaccgggggacgtcaattcactgcctgtcggcgaccagtcgtatccacctgtccgtctgcgtcctgccacctgtactggtggtactggtgggcggcgcgttcgcggcccgataatgccgaacatatggcgagtcgcatgcgccgaacgaacgcacaggccttcgatgcgaatattaagggtcctgctttaaattacaattaatttttaattaggcttaaattaacattttcaaagacgctttggagctgcattaatcaattagcgtactcgtatacagaatgctcaggcaagggggcacgcaagtcaagcgaaacaaaacgaaatatcttaaactctaactttgctcatcacaattggtactcgctgaagggaagctgattgtattcaggggctggttacctaatcgggtttcatttccggctgccaaagagtttgccgcgcgctgcagggaacgaaatgatgagtttgctttggtctagaaatgtttgacttcactctggcacttaccatgcgatgtggctggggacagagcgtgcgaactggcgtgccgtttgatgcgcggagtatcccttagctctgaaccagatgcggaggaggcacttgtgcaggcatttgaattggccgtcacattggtcagggtggacactccgctgcacgaatcccctgtggttggcattgatttgtagcgctgcagcgaggtgcgcggcttcttcggcattgtggcctgctgcactgcctcttctagggcgtttagccagtcctcgccctcgctttcgtcttccagaaatttcatgtagaaggagggtcgctttgccgtgtggtgcctagtgggtgtggtgcttgtgcttgatttgggaggttcatggtgttctattttcgactccagttgctgggaggcctcaagcaggaagagatccgtctccgagtcgttgaggaagtctgccattggatcggaggcagctacaggggaaagcactggctctggcgtagccttcgtgcaggttaatcttgtgcggggagcaacaggtgacggagctttaggagtttttagtggcattactggttcggacacagctatttgctccaactggctattgagcctagcacagcgctccttaagaagaacattagcccgcatctgctgtgcccgccactgctcattgtccagttggctgcgtctatcctcgacgcccttaaaggctatctgccggcgtcgttcgcgctggctcaaactgcctatttccgcggagtcgaagccactgtccgtggtggcattgctgcttcggttccagcgccagcccacctccggactttcggtggccagtgtctgggagaagaggcagctgggcgaaaggctgatgtccaaacggggcgagaagtccacactgtcgtccaagctgggcttgtgtttgtgtggtggagtgctctccaggtcggacgtgattcccactactgctgaggagttgggcgagccgggagtgtccacggatacacttacattgtgccctgtgcgtacgctctgtggtgaagctattaacaaaggattgttttatggatattcctgatttttcgagcttggaaatccttaccactgtggcgcttatgcagcagacgcgtgctgagcgttaaagatcgccgtttaagtgcgttctccataactttgacttaacaataaagtgaactgcagtcaattatttaactaatcaaatttgttttgttttgcgctgcggaatgcgctaaaaattaaagtaagccgacagtgttgccagatggcactgtcaaaactcacatggtcactctgctattcaactcgttttgtttatagcccttttccacttaaacgcatagtttaataaaaaaatccactctccaaaatctatgaaaatattttatctttaaaatacaatcaatttaaattttcatctacatatgttcttttatataatggctgacttgatgatatttctgttaccaccaatgcaagaaatcagttatttgagtactgagacatccattggcacataaatccatatatcgcaataagatgaacaataggaaattgtcttaaagaaagtttagtgtataaataaaatagtgtataaatttacatataagtaaacttacggagtaaacgttataaaaatagagaaatgtacaaatatacaaaatataatacaaaaaaaaaaaaaaacaaagatatctataatttttttttgtaacttttagtattttatctatcggagtgcaaacattctggtaggcggtcatgctttggtatttggcaacactaaactccggtcacacaacaaaatgcttatggtgatgtgttaaaaagcgaaattttgaatacaatttactgatccagaaagatgaactacaatccaaatccgggtatgcggaaccgtaagtgggagaactgtaaggatcaggctacgcaagcaagtatacctgaaggatgtccggtgcagccactccggaatttccccacccgccgctgaccggaatcggaatccggagtgctgtcactgtttacgttacacgttaccccgttttgtgcgccgctcctggcttccactgcatcctgctccccagtttctatgcctgctgtgcgtttccgttccgtgatgcgtgtgtagcttgagtgcctgtgttccccgcttcccagttgtatcgtttagatcctccggcactaactaatggttgctctgtcccaaaatagcctcagctgccggtcgcccaaggccgccgaagcgtgtgagtgatg

SEQ ID NO: 13877 - DNA, 1392 bp, DROSOPHILA
aacactgtcggcttactttaatttttagcgcattccgcagcgcaaaacaaaacaaatttgattagttaaataattgactgcagttcactttattgttaagtcaaagttatggagaacgcacttaaacggcgatctttaacgctcagcacgcgtctgctgcataagcgccacagtgcttcaccacagagcgtacgcacagggcacaatgtaagtgtatccgtggacactcccggctcgcccaactcctcagcagtagtgggaatcacgtccgacctggagagcactccaccacacaaacacaagcccagcttggacgacagtgtggacttctcgccccgtttggacatcagcctttcgcccagctgcctcttctcccagacactggccaccgaaagtccggaggtgggctggcgctggaaccgaagcagcaatgccaccacggacagtggcttcgactccgcggaaataggcagtttgagccagcgcgaacgacgccggcagatagcctttaagggcgtcgaggatagacgcagccaactggacaatgagcagtggcgggcacagcagatgcgggctaatgttcttcttaaggagcgctgtgctaggctcaatagccagttggagcaaatagctgtgtccgaaccagtaatgccactaaaaactcctaaagctccgtcacctgttgctccccgcacaagattaacctgcacgaaggctacgccagagccagtgctttcccctgtagctgcctccgatccaatggcagacttcctcaacgactcggagacggatctcttcctgcttgaggcctcccagcaactggagtcgaaaatagaacaccatgaacctcccaaatcaagcacaagcaccacacccactaggcaccacacggcaaagcgaccctccttctacatgaaatttctggaagacgaaagcgagggcgaggactggctaaacgccctagaagaggcagtgcagcaggccacaatgccgaagaagccgcgcacctcgctgcagcgctacaaatcaatgccaaccacaggggattcgtgcagcggagtgtccaccctgaccaatgtgacggccaattcaaatgcctgcacaagtgcctcctccgcatctggttcagagctaagggatactccgcgcatcaaacggcacgccagttcgcacgctctgtccccagccacatcgcatgcgcgcggcaaactctttggcagccggaaatgaaacccgattaggtaaccagcccctgaatacaatcagcttcccttcagcgagtaccaattgtgatgagcaaagttagagtttaagatatttcgttttgtttcgcttgacttgcgtgcccccttgcctgagcattctgtatacgagtacgctaattgattaatg

SEQ ID NO: 13878 - protein, 373 aa, DROSOPHILA
MENALKRRSLTLSTRLLHKRHSASPQSVRTGHNVSVSVDTPGSPNSSAVVGITSDLESTPPHKHKPSLDDSVDFSPRLDISLSPSCLFSQTLATESPEVGWRWNRSSNATTDSGFDSAEIGSLSQRERRRQIAFKGVEDRRSQLDNEQWRAQQMRANVLLKERCARLNSQLEQIAVSEPVMPLKTPKAPSPVAPRTRLTCTKATPEPVLSPVAASDPMADFLNDSETDLFLLEASQQLESKIEHHEPPKSSTSTTPTRHHTAKRPSFYMKFLEDESEGEDWLNALEEAVQQATMPKKPRTSLQRYKSMPTTGDSCSGVSTLTNVTANSNACTSASSASGSELRDTPRIKRHASSHALSPATSHARGKLFGSRK

SEQ ID NO: 13879 - DNA, 4362 bp, DROSOPHILA
ggaggctcaggagcgcggtgtctatccagaagatgcattgcgcgagcgtttcctgaatgtggagcgcgtggcgcgacgattggctttggtgcccgaggaaggagccggcctgcccatctacttcctgtcctatctgcaatcgctgttcatcttgcgacccgataatcccatatccaaggacgaactcgagaacaaacccttcgactatagcaaactggacacctacgatatcctaaacagggccaggtgaggcgattgattcatctatcactagagttatataatatatattatatatattatgtttcacaggtaccatgtggatcgcagcgactttctgcaggcgctcaagtacatgaatctgctgcagggtgcatcgcgcaagattgccggcgagtggatgaaggaggctcgcctcatgctggagactcagcaggcggccaacaccttgatggctcacgccgctgccagcggactattgtatttgtagactacgtcccgtgtccccttccttcagaaacaagatgatacacttactatttgttattagtccaggagaagatggtacgattaccaacaatatgtaatttgtccaattagcgatcacagttgaaacgaaatagcacttatatacatatatttgtaacattttgtttagcttcaattatacaaattaaacatagaaaccatcattataaaatccaaaacataaatactctgggaagatttgtaaaaaattcgataccaaggcatgaatggaatatgatatattactaaagctgaaattggcaagctttgtgtttctgaagaacaatgtgattaggccataaataaacataaagaacatccacttgttgtttaatttagcgaaaaaaattaatataataaataagttgactaaaaagtatgctgaatgtcaaaattcaaataaaatgcattggctaaatttaatttctctgttctgaaaagaaagcatggtaggcaaggcaaatgtattcaaaaacaggttactatgcggttgccgccaaatttattccttaaataatcgtatatgttcgttactaattttcgaacgccaaaatcgcgatagttggtcgttagccagcactggacgcgccagtttcgtgggcggctatcgccagccctggtagtcagaggcaatcagctggtttgcgtggtcgatttggtcctattgaaatttttcggtttggcaccggagcaaaaatcacatcgcaatcaaaaatttcgcgtggccaaaggacacacttttgagtttggatcaacagccgggaagatctagctaaccgaatagcaaaatgtcgatgctggcgagaacagttggacggacgttcatgcaggtaaacggccatccaaaccgcagctcttacataaacacttgctcgcgacgcgctgtgcgaatatttctgcgctgaggcctagttcttatacgtttcttttttttttttttgaggttataatcctagccagccttaacgattacattgcattcttctcgttttaggctgcggcagcacgtagtctgcacaccacgtcgacgctacgggctacggtgagtgttaaatgcgcttattaagtggcaccagttgtaaccggaaaataattggtcttgcaggataactacggcgccaacaggaccacctgcacactgattcccggcgacggtgtgggtcccgagctggtctactccctccaggaggtcttcaaggtagctaaccatccatcaagttgcaatcattcacatacagtattccaatgcgtcctaattcttataaatctatactcttgcgtctcttgatctctcttaaaaaaaaggttatttaagcttaggatcattgccagcttggtttcctatttaatagaaaagctttttttaagcaagtcggcgtttagttagttatgtacatatttctagaatctattagatttaaaaagcacagggctctaaaaattaattaatatatttcactcttcacagagcgcattgtatttgataacacttccatttttcccgatcacgagtgtttttattatataaatcaaaacatcaaacttatctgtatcgtaaagatatgtgataagtggctgctacttgaaaattttagtagatttcgggatttccgttttaactgaacatacatgttcatacgtgcgactaaattaaaaaatgctatgtaaattctttaacttttcaagcccaatcaatatgcataattatcttatcttgtcgttcaggcagccagcgttcccgtggacttcgagtgctacttcctttccgaaatcaatcccgtgcttagtgccaaactggaggatgtggtggcatccattcagaaaaacaaagtgtgcattaaggtaagtttgcaagaaaataaaatagtgtgataaaatctaaacaatgtgctccttcagggcgttttggccacacccgactacagcaatgtgggtgacctgcagacccttaacatgaagcttcgcaacgacctggacctctacgccaatgtggtgcatgtgcgcagcttgcccggtgtcaagacccgccacaccaacatcgacacggtgattattcgcgagcagacggagggcgagtattcggcgttggagcacgagtcggtgcccggcattgtggagtgcctgaagattatcaccgccaaaaagtccatgcgcattgccaagttcgccttcgactatgcgacgaagaatcagcgcaagaaggtcaccgccgtgcacaaggcgaatatcatgaagttgggcgacggtctcttcctacgctcctgcgaagaggtttcccggctctatccgcgcatccagtttgagaagatgatcgtggacaacacgaccatgcagatggtttccaatcccaaccagttcgacgtgatggtcacccccaatctctatggtgccattgtggacaatctggccagtggtctcgtgggcggtgctggtgtcgttgctggtgcctcctactcctcggaatccgtcgtctttgagccggtaagattcgccataaagacataaagataatccataagatcgtgatttacacggttctcgagcctagctgtgcgaatccacttcagactattcttatctctaataccgatttccgattgcagggtgcacgtcacaccttcgccgaggccgtgggcaagaacgtggctaatcccactgccatgctgctctgcggcgtgaagctgttgcgccacatcaacctgcccacctacggcgagatcatccagaatgccatcaacaaggtgctgaacgatggcaaggtgcgtactaaggatctgggcggacaatcgaccacgcaggactttacccgcgccatcatcctgaacatgtcctagatgggcaccactgtcatcgccggcatcgcgatcagcaagtctacaacatcatgggcaacaacgttggcgcttatataatcgacattagacagtttctgttgttgccacagctaaattttgaattgttgaaagaaacaccttgaaagttcttagttatcctattacgtccaattttttttatttgtcccgatgtcttcagtgcattcatttgagtattatttccggcgaatatttaagtttagtccaattgaaacgcctgcagacccgccccgaatccaaaagttgcgaattctttagttttaccaattggcagtaatacatcgatccttgattatgttgtaattatttacgtattatttccccccccccccctttttgatttcgcaaagatgctaatttacggtcgaattatattttatgtttaacccgttgaaaagcaaaacaaaaaaaaaaaccgaaaacaaatgatattgctaaaccaattaactgataacggatggctttgagtggacccactccactggagctgtgagaaagataacaataaactcaaatctaaattaattattatttaaaagccattgtcagttccgagctgtctaaattttaagtaatacaaacaaaagataaaaaaaaaaacccaaacatatttctcaaacttttttttgactggaatgaaaggccaaaggagatttcatcgctattcccaactccggcgccactttcacaggaaatccaatcccgtaaagagccggaaaagctctagttgttttttaaaaaaccaaaaacaaatttattagaaaagtcgataccaaatgtagccgaaatgaaaaacttagaacaccaataaggacggtaatgattatccagacgcacagtccacgtccgtctccaattattatccacccttgggcttggccaactcgatgaggcgtggcgaggctttggccttcagagccgccggcgatatggcaaacggattctcccggatatgcgtgtt

SEQ ID NO: 13880 - DNA, 1429 bp, DROSOPHILA
aaacaggttactatgcggttgccgccaaatttattccttaaataatcgtatatgttcgttactaattttcgaacgccaaaatcgcgatagttggtcgttagccagcactggacgcgccagtttcgtgggcggctatcgccagccctggtagtcagaggcaatcagctggtttgcgtggtcgatttggtcctattgaaatttttcggtttggcaccggagcaaaaatcacatcgcaatcaaaaatttcgcgtggccaaaggacacacttttgagtttggatcaacagccgggaagatctagctaaccgaatagcaaaatgtcgatgctggcgagaacagttggacggacgttcatgcaggctgcggcagcacgtagtctgcacaccacgtcgacgctacgggctacggataactacggcgccaacaggaccacctgcacactgattcccggcgacggtgtgggtcccgagctggtctactccctccaggaggtcttcaaggcagccagcgttcccgtggacttcgagtgctacttcctttccgaaatcaatcccgtgcttagtgccaaactggaggatgtggtggcatccattcagaaaaacaaagtgtgcattaagggcgttttggccacacccgactacagcaatgtgggtgacctgcagacccttaacatgaagcttcgcaacgacctggacctctacgccaatgtggtgcatgtgcgcagcttgcccggtgtcaagacccgccacaccaacatcgacacggtgattattcgcgagcagacggagggcgagtattcggcgttggagcacgagtcggtgcccggcattgtggagtgcctgaagattatcaccgccaaaaagtccatgcgcattgccaagttcgccttcgactatgcgacgaagaatcagcgcaagaaggtcaccgccgtgcacaaggcgaatatcatgaagttgggcgacggtctcttcctacgctcctgcgaagaggtttcccggctctatccgcgcatccagtttgagaagatgatcgtggacaacacgaccatgcagatggtttccaatcccaaccagttcgacgtgatggtcacccccaatctctatggtgccattgtggacaatctggccagtggtctcgtgggcggtgctggtgtcgttgctggtgcctcctactcctcggaatccgtcgtctttgagccgggtgcacgtcacaccttcgccgaggccgtgggcaagaacgtggctaatcccactgccatgctgctctgcggcgtgaagctgttgcgccacatcaacctgcccacctacggcgagatcatccagaatgccatcaacaaggtgctgaacgatggcaaggtgcgtactaaggatctgggcggacaatcgaccacgcaggactttacccgcgccatcatcctgaacatgtcctag

SEQ ID NO: 13881 - protein, 370 aa, DROSOPHILA
MSMLARTVGRTFMQAAAARSLHTTSTLRATDNYGANRTTCTLIPGDGVGPELVYSLQEVFKAASVPVDFECYFLSEINPVLSAKLEDVVASIQKNKVCIKGVLATPDYSNVGDLQTLNMKLRNDLDLYANVVHVRSLPGVKTRHTNIDTVIIREQTEGEYSALEHESVPGIVECLKIITAKKSMRIAKFAFDYATKNQRKKVTAVHKANIMKLGDGLFLRSCEEVSRLYPRIQFEKMIVDNTTMQMVSNPNQFDVMVTPNLYGAIVDNLASGLVGGAGVVAGASYSSESVVFEPGARHTFAEAVGKNVANPTAMLLCGVKLLRHINLPTYGEIIQNAINKVLNDGKVRTKDLGGQSTTQDFTRAIILNMS

SEQ ID NO: 13882 - DNA, 3493 bp, DROSOPHILA
tttaacttccgctcgaattaactataaataggtaactcccagtgggccagacactttagtataacgttttttttttttcgaggtgctacagttgctcgcgcggataaaattcgtttttgattgatccgcgagcgcgaacaaagtgtccaaacaagcggagcatcgcatccctctcagaggtaaccaggcaaacagaaaccgatccgtcagcaaagtggctacaaaagcacgtgaagaatagagtgaatagggtgctgccccaactggctcggattacggacaagtgcgtcatactgaaatggtgcaacggcgttatacaagaccactggccactcagacagatcttacaaatccgattcgctgtcaaacgctaattcaagttcaacccatatcaaataacaggcttgttcgcacaacaaacaattacgcgagccaaaaaggaaaaaaatacacaaaaaaatattattagccactgtcgcgcacgaagtcgaccaaggaagcgagcgagcaggcaggcaggcaggcaggaggagtaggaggtcagggtgggcaacgtatacccattaccagttttcctattcgacagtctcgaaactgaattttgtgcttatatggccataagcttaacacaataataacaacgtcggtcgagtcagcgtcaacggcatcgacatttgtataaagacagtcgtgattcatgatctgcgacagccgcacaacaagtccttatagtccaagcacatcgcgacgtgaccttgagcaattcgacccactgatcgccgaacattttctttcgcccgcagccggagtactacaaggacgcgccacacttccggcgaattggagacggacccgagtacaggctggagatacccagcgccaaattggatttcaccggcacctattccgtgatagccagcaattgccatggcgaggccaaggctgtaatatcgctacaaatattcgccaaaggtaagcagcacagtgaatgtgtatgtatttattgacctgggcactgggggtagatattcaataggcggggaaagacaacgtcccgccagaagtcttcagccatgctcagcaaactgctaacgaattccggatccgcttgtacccaaacgtagtgtagtgctccgttgctctcgaacgtgggacttagcacgcagtagagcgcctttttaacattcgccgcaaacatctggatttgtatttgggccatgtacttgggtgcaatagattcgcgtgcctcgaggtacttctcgaagtcctcgtcagtctttggtgatttgatttcgacaatgtgatcgtccgtgatgccatcaggggcggcgcacaggaaggggaagttctcgtgcaggatcagaccgcattctaagtagttcttgttctccagcttctcagtctgtttcaatatgaagcgcttgtgctccttctgctgcacccgatcctcgttattcttgtcacgtcctctgcaaaacatcatattgaagatttgatcgtcatcatcagaggttttgcggcttatgatcatgtgcatcatggagcaacggatgcgcatatactgtacctccacccacaatcgggatttgtatttgcttcgcgttgcctcgtacagactttcgataatacccgtatgtgcctgtgcctccatgtgttgcacatagctggacggatcgacgacattgtactcatttgctcggagcagcacatggtgtacgaacatgggctcgaactcatcggtggtctccacacattgccggtagagcgccgagtccctgccacagtcggccagttcattcagaatggtcactaggaaagcctctccctcgctggcgctaagttctttcgagtttagttcgctttccattcgcacatcatccttgggaattatatcacatattcgagtagcagttgtgggctccggttgcaccagattttccaactcgtggccccaaaactccaccacagccgagggatttcgatctgtgctcttgtttagcagccagaaggtgaaggccacgatgtgggcacaagtacctgtaatgtactaaagattaggaactagacattagtggcaaatggagtcattctcacatgctgcagtgcacaggctgcattgaccgtccatgatcatctgagcactttcgacgatcttaagcgatacattggcgtgagttaccgtgttggcgaagtcggtggcagaaaacacgagtcccttgagttcgcacacgtcgccatgtctgcgcacctggacgtaatccgtgaggagatcacatctattcgttggtctgttggcaaaaattcaatttttaatagaatacacagtaggtatatgtgcgaacgggatggcactcacatttgttttgatttctcagatgcgccggatagacaaaaattgtacaccattccgctgttcaaagcgggtatattgtgtatgtctgctttgcggaagccgggttccaggtccatgggcacaattatcatgcccctcattttgttttaaccaaaatttgagtacaagaagtagaaaattagatggtgtgctaaaaataaacattgggccacagctgctatcgattatcgatatattcgcactcttgcaagaatctgacaaaaatagccaagacactaatcaccactgcttggcaagcagtttaatgggcgccaatttcgaaatgcaatatttttttactaagtcaaagtgctaatgcataatatctttttttcaatagatatactcaacaaaagccgcatggataaagtgcacacgagacatgggtaagttcaagcttattatcaagatatgttgtcattaacaagctttaacaattaatcagcaacatcgagacccttccccgattcgttcgcaacttgcgaaacctccgctgttgcgatggggatgcgatatcgctggaatgtcacgttgaggccgatccggagccgttcatcatctgggaaaaggatgggcatgttatgcccagcgatcgggactacgtgatgtctttcgatggaaccaaggcaacgctgagcataccgcgcgtatatccagaggatgagggcgagtacacgtgcgtggccaagaactcggtgggtcgcagtctctcttccgcctgcattatagtggatgtgcccgaggagaaggagaatatgctcagccgccagctagcgcgtcccagtggcctgctctccgcccactccacgccccgttctacgccgagatccacgcccgccagaagtttctctcccctgcgcctatcgtaccgcaccagcagcatcgatctgtccggcgtggcggaacgcaggcgtagtgatgcccggaatgccatcacggcgccaaagtttctcgccattccctacaatcgcgtcgtcgaggagggcgacagtgtgcgcttccagtgcgccatctccggacatcccacaccgtgggcgacatgggacaaggatggcctgattgtgacacccacgccgcgcattgccgtcaaggaaatcgatg

SEQ ID NO: 13883 - DNA, 1368 bp, DROSOPHILA
atgaggggcatgataattgtgcccatggacctggaacccggcttccgcaaagcagacatacacaatatacccgctttgaacagcggaatggtgtacaatttttgtctatccggcgcatctgagaaatcaaaacaaataccaacgaatagatgtgatctcctcacggattacgtccaggtgcgcagacatggcgacgtgtgcgaactcaagggactcgtgttttctgccaccgacttcgccaacacggtaactcacgccaatgtatcgcttaagatcgtcgaaagtgctcagatgatcatggacggtcaatgcagcctgtgcactgcagcatgtacttgtgcccacatcgtggccttcaccttctggctgctaaacaagagcacagatcgaaatccctcggctgtggtggagttttggggccacgagttggaaaatctggtgcaaccggagcccacaactgctactcgaatatgtgatataattcccaaggatgatgtgcgaatggaaagcgaactaaactcgaaagaacttagcgccagcgagggagaggctttcctagtgaccattctgaatgaactggccgactgtggcagggactcggcgctctaccggcaatgtgtggagaccaccgatgagttcgagcccatgttcgtacaccatgtgctgctccgagcaaatgagtacaatgtcgtcgatccgtccagctatgtgcaacacatggaggcacaggcacatacgggtattatcgaaagtctgtacgaggcaacgcgaagcaaatacaaatcccgattgtgggtggaggtacagtatatgcgcatccgttgctccatgatgcacatgatcataagccgcaaaacctctgatgatgacgatcaaatcttcaatatgatgttttgcagaggacgtgacaagaataacgaggatcgggtgcagcagaaggagcacaagcgcttcatattgaaacagactgagaagctggagaacaagaactacttagaatgcggtctgatcctgcacgagaacttccccttcctgtgcgccgcccctgatggcatcacggacgatcacattgtcgaaatcaaatcaccaaagactgacgaggacttcgagaagtacctcgaggcacgcgaatctattgcacccaagtacatggcccaaatacaaatccagatgtttgcggcgaatgttaaaaaggcgctctactgcgtgctaagtcccacgttcgagagcaacggagcactacactacgtttgggtacaagcggatccggaattcgttagcagtttgctgagcatggctgaagacttctggcgggacgttgtctttccccgcctattgaatatctacccccagtgcccaggtcaataa

SEQ ID NO: 13884 - protein, 452 aa, DROSOPHILA
MIIVPMDLEPGFRKADIHNIPALNSGMVYNFCLSGASEKSKQIPTNRCDLLTDYVQVRRHGDVCELKGLVFSATDFANTVTHANVSLKIVESAQMIMDGQCSLCTAACTCAHIVAFTFWLLNKSTDRNPSAVVEFWGHELENLVQPEPTTATRICDIIPKDDVRMESELNSKELSASEGEAFLVTILNELADCGRDSALYRQCVETTDEFEPMFVHHVLLRANEYNVVDPSSYVQHMEAQAHTGIIESLYEATRSKYKSRLWVEVQYMRIRCSMMHMIISRKTSDDDDQIFNMMFCRGRDKNNEDRVQQKEHKRFILKQTEKLENKNYLECGLILHENFPFLCAAPDGITDDHIVEIKSPKTDEDFEKYLEARESIAPKYMAQIQIQMFAANVKKALYCVLSPTFESNGALHYVWVQADPEFVSSLLSMAEDFWRDVVFPRLLNIYPQCPGQ

SEQ ID NO: 13885 - DNA, 18393 bp, DROSOPHILA
tgaaggcctaaaaacaacacgtagccgacacgttgcgttgcgtatacgccatggagtcactcgctgtgctgtactgtgtgtgtatgcgtatttgcttctgagggtgcgtcatatgtttgcccatttccttccttcctgcggcctgcttgttgcctttgtgctatgcaatttctagttaataaatatttccgcctacaaacaaacggagcaacaaaaaaaaatatgacagacacgcccgccaaggaggggacttttgggcggatatcgcgcaattagttgagtcaacaattaaaacgtttgccctttttcacataagagtgcaaacttggcatggccattattagaatatatgctgtgtgagaaaactataaatcacccgcacttaagatagatacgaaaggaaatggcaccgaaatatttcccaaatatgacgtcatattcaatatcttttccgcagagtggacctcagcaggacagtaatccctttaccccaaatcctgcagctatcacatgctcattctggcatattaattggctttcattaattatattttgaaagcgtgtccgggacatggcgaaaatagtgttccataattaattgatgttcataatattaaggaaagtacgtatataaagtgtggtcatttaattccccagcagggtccaatggcacaaagttcaaaagtatatccttcgtcggaaagctttttggcggtctccaccgaaagcctttaaaagcttgcttgaaactttttggagagttttctgtacaccaacattttgtgtagaaaaccattaatgagctttaaaagcttactccagtgcactgaaaaaataacttactatacaataatttaattctataataatttcaaagattcaggttatttaggtaatttttatatattcaggttgtggtattatacaagtttaaatttaagataaagaccccaaattttacccatttcccaaactaaagactttgactgcgttttttcttaacttttatttacaaaattaaattctctttctgttcaattacatggaaatgacaaaaccgcaccaaaagacaaaaacaaattttgtgctataggaaataattaaatttgcaatcaaatatcggttttgcattagcattctcacatctttctataattttgagtggtatggtgcatctattggtgctacttcttgtatctacaacatcaaaaatcaacttaacggccacataagatactccttgcgtttattttgtggtttatatatacgtatcatacatttatgcatatatatagttaaatattcggtgtatgtatataatggttattccacagtttccgccgtcacctcttcatgtggtttttgattaataattacacgtgtatgtacttcatatatggttctgtgtatatatatatatatattttattcctctcgcacattatcggtaaactttaacaatgcgctgtatctcagttattagactaggtaaaacaatccgtatctgtatctctctgctcaccgttaaggtttatgcacttgtactttaacatttgtttatgtattttcaaaacacacgctccgttttacgacacaatcgtgaatctggtttcacacaattaatgttactatgttgtggtttttttggcccccgaaagaaactgaaaggaaaactatgtatgtaaatgcattttacacgtacgagttgtatccaaattaaagcagattttggcttgcaaccaaagttaagcgacaaacatgttccgcaataatgggattaacattttatgtttttgctaagtatcctttaagtacatatgtatatgcatgtatgtaggtatattcgtgtatatataggatggaaaacaaaggacaaagctttaaaatacgtgtgtaaatactttgtttagtttgtattttatactagaaagagttataagactacagcataggacgcagttaaagatagggtatgcatacatatagatattacacatttacatagggtttatcctgttttctttgttctagttttattatatatctctattccccgcctcctagtcttgctacgcattcaaatatacctgctatacctgttttctatgttcttattttgtggttgccttcgatatcgactacagagttcgctaggacactcaacggattatggtgttgagtgcagaattttgataaatctgttatactgtggcaaatgtgcgctttccagaataagtttaaacggcgaatgaagtgattttgtggcaccctgggcgcttagctcaccaaatcagaaaactaattacaaaaacggaaatgataaaggacatccctcgcttaaatgaactttcagttctacagatccaacgcaaatgacaaatattagaagttacacaaaggacaaacacaatcgaaataaaatgtttaatctcaatcaatcctattccaaaataaaacacagccagcacttttattgaacctcacactaaactcgttgataaaacgccaagctgcctaatggacgtcgctacgcggatgtttatctggacctgacctctgaccctctgcgcgacccgccctacttcatcttcttgtcctcgtgcgccttcttcacaatggccagcttggagtgcggcgacgaggggtgcagggtgcgatagggcgcctccttggtgccatgcaggaccaaggaccattccagcagattgccgtgtcgtgtttggggcgagttgaagcgagcctgtgggcgaattcgttcagaaaggccggactacataggtaatttatatactacctccaatttccaggtcccctgcggatactcgccccacgagtgagtggtcataaagggccatttggtgaagccatcgcggtggtcatcatcgttggcgcgcctcgacaggatcatggatctatggagtaatattaatattattgatattattaatgaattcacaaaaccaaaatatagttaggaatttttcaaagtaatattatttcacttactttgtgcccattggcgatgtaaggaaaagttcaagatccccgcgtcgtgaggcatttgccgagatcaccgcctgcacgtgttccaaatagttgacctccgtgtcggtgcccttgcaagcatcggttttgatctcccagaagagcgaacgacccataacaatggccctgcgttagttagttagcaaaaaaggataagctggcttaagccaagaagaagaccgttatagactcactgtggctgggtaagctcgcccgcctcgcaatgatagcgcggtggcactgaatgccactgcttggatagtgtgaccatggcgccggcgtccagcactccgaacccgaataggtggttgaactccaggcccacgccgttcattgtccagtggaatcggttcttggcatcgaacagcgagttgcgcttcgatgtcagcaccgtcagatgctgtatgtcccgccaagtcagctgaggactgccaaagaagggtgggtttaagtgggattagcataaattcataaagtgacaaaagaaatacactcgaagaaattgtactcctgttgcttggtctcgaaaaagtcaaatcactgctttaaactttttaacttttttttttagcagattctgttctaatagtaacagtgaataaacttagtattttctgtgcaccaatacttttgagtgtatcaatcagagggggaaaaggcgaggattactcacttggcctccaaggccagggcaaagacgcccgctgcttcgggcgccgccgcactggtgcccgagtgggtggtcgtgcacttgccatagaggtccgtggtggcaacgcccgtgttggggtccttggctccgttgctgaatgtggacgccagcgtggagctgcagctctcgtcgtagtgggcgttctggccgtcgttaatggcactgttaatggaaatggtccacatggaggcggcgtagccgtcacaattgcagtcatcctcctcgccgccgtcgccggatgcccaaacatagatgttgcccaggccatttcgaccctgcgggtggtgtgaaagattagccataaattccaagaactggacctcgtggtctcccagctcaaccgtacctcattgacgccctggactatcgctcgcatggtggcattccggggaccgtccacggtcttgccatcatcggtgggaccccaggaggcgctgtatatgtggattttgtgcggctcgtggcccatggagttggcctcgattaggtccgtcatgtacggctgatccagcatgcgaatgcctgttgagcgagcgataagtatgcattaaatctaatggcggaaattataaatcaatatttatacgatccccgccaaccatcactttcacttgacgctttatggcaatcgtaaaaattgcagtgcatttcccagctccgcctgtggttgttcgaaattttgcccgatttttcacatgatttctccccggcgagcgataaaaatgacagataacgcggctggatttgcgaccgcacttgttgcctccccattaccaagaaaaaatatctacaatttcatgtaaaaatcacattttttcggagctcaatttacaataatggaacgcgctccatgaactttacactttacagatagcagatacatatgtacacggcggtagctgacaattggttcaccccgtctttttgcggattacgccgcgtatgcgtaatgcgatttatcagccaaaaactttggaggtcaggacctcgaaggcgtcgctgtacacgcatatgtatatttattcagcgaatactgccaaagccacttacctgcgattttgctgtcataagcaacgccaacgccgcaaattccattatctctggcagcagccacttcgccggcacaacgagttccatggctgaaaaatgaacagcggaccaggatgagttggggttaaacattcagagagctggtaagcagcttaataaaaagtactttctatccattaagcagtgcgtataagctgacaaactatcaagtgaacttcagactcaacggaggagaacattaaattccgcaactgccttttaattagtcaaagtttgtctttgctagaacgatgacaatagcagcttaacccatccacttgggcattccattccaatcgtatgacacaaacaaattatcctaaacattccagttggctatcaaggacattttacccaaaatcgatagcttttccccctttggccatcacttacctgttgaaccagtcgtcggtgtatcggggatacggaaagggatcgttactgctgaagtcataactggcctcggcgttctggaaatgagcagattaaaccagataaaatacgaaccaacatgtgtgcgttaagtaggttttgttgtagcttttgggaaaattattcaatttactccataacatttatatttggaagcaaacctctttgcatatgcatggctgataagccctttgacaataatgactgtggaaagttttagtgtcaggaaaagttttaagcttttagcttcaatttcctgccaacttttattattacgcacattaggggtttcaacggtccgttgctaaattaaatctcacatctagagccacagcaactgtgggctatttggccatgaataattcctcactggcaatcgatatgtgcagtaagccaaaatttaattaaaagcttgctattgccattcgatggacagcgtaaattgaaagggtttccaggcattcatgtgcgtgtgggttgtactcacataattgaatttcagatccggatgcatgtagtccacgcctgggcagagaaaacgccacaataaagtaaaaacataataaaccagtagattgcatttttattcattcattcatttccgaaaatactcaccatcatccatgatggccgtcgtaacattcttcccggtgattccctgggcccaggcagcctgcacattcagatccagcctgactttgccgccattctgacccgtgttcttgaggtaccattgcatgggaaagtaggggtcagtgggctcctcgtcaatccgattgccctcgccaactttcaggtcgaacttcatgccgtgaatggcgggcaccgccggccgcaggccacgtttaacccgcttgaatcccggctgttgcacggccgtatgcacctgcggaatgggagaggccattagcgttaaggtcggcgtggtaaccacaaaaatgggttacgctgatgggccatctgtcgcacaaacccgaactccgtgtatgcaagtcccgggcatgcgggtcattgttatgcgtgtgcgtaccaatccaaagctgtgcaaacagatgtgaacagaaacgaaacgaccttgtttgcatgccaatttccatattgtccttccaaccccgcctcccaatgagtggctcgtgtgcattctgcaccctgattatcgacaatggcctattggcacgtttcactccgttggccaaatggccaaatggacacacaaccgaacgcaatgccatcgatgtccgttatgcagaacggcaaacaatgtccggtgaaaactatttcgggagcttggaatgaattctgtcctttgacatttgtgcgaaaaagcaggcacattgttaccagctgacccatttacacggagcatacaattttgtgattcctgttttccctcatattctatggcacatacataataaaaatgcagcaaaaaaggcgtggagtactaggctaatgaatggaaagtctctaggttagtagcaagaaaaaaaagaccttatttttccagaatagttcaggcttagtggtacgtactaatgtagaatcaatgtgtaaatatggcaaaaagccccattaaaatttatttctgtgtctgtattccaagccattgcattgagcacgttcctagcttattttcactcgaatcaacagcaagtgtgccagtttccctttcgaccttgatgcgaattttccgcatttcccccacctgccaccatcttttttactcaccgccggatggctcttgagggcccgtgtgtgcgtcagactcctcctggagcgggcatgtggaagggtccggtgcttgaaatgatactcgtgtccatcggcgccgaccagctgtaaggagtccaaggagtgcaaggcaacattttattagagtgcgtggcattttaattggggaaaacacattaattccctgcttgttttgtgcctagaagcgtgacccgtaattgcgctctaattgagtttggccccagccattcctcacacattctgatgtggtggttgtgtgctgcccataattgtgctctaaattgccagtcataatcatcatctgctgcagcagcagcaactccaacatcatcatcattaattggctttggtaaattgagtgccagtagccagcagttgcgaatagcttggcccagactgagccagtaattttccgtttttccccactgcaattttagtgaaagggatctcgagtttccacacgatacgtgccgggccttcgggccaaacccactttcacttggccgcccttgggaaatggaccactattttcggcctacacgctggcaaaatggtcctttatcaagattacagatttataataataataaatggttccgctttgtatataagatggagttccgaatggtaactattttcttccttaagacttttaaataccatttacagtatgaaaaaaagaaggaatttagcttggccaagaatctggttttaccatactttttcccttagtgtatgattttgatccggctgcaacatgttgctcatccctgagacattggagactcgaatggcgtttggccagctgctgggcgttatataactttgcccttttgaacggatggatgggcgggcgaagggcgtcctgcataattcaggcttacatcgtgattaattagcagctgtgcggcgttgagtgcctgtgctatcaattcataattcgcacaaatgcgcctcaataaaacggcattagtggggagcggcgatgacaatacccatcaatttgccagccaaataaacccgactgcgaatctatttttaaaacgcgcctcattaacccagccagccgcaaattataaggatgtcgacttgtaaggcttcctggcaggagcggtaagcacacgtgggtaattgtaattgccttaaaccagccagtaactgactaaacaaaggttttcgctaaccatcggagtttcatcaacgtgagcttatgcaaaacgcgcccacgcggccgttttaaggattctcgcccgcttcgcagcagcattaaatatgaataaggacatttgggtaggcaaactgaggcagaagaatgctttcattttttgcctgtttatggaatctacggcttttctgaccgctgtctgctaactttcaattcagcatcaacactttggccgcaatagaatgaaggtgcgcggaaagggttgcaggaatagccgaaatttctttgatcagcgaaaaatgcgtaattctaagtaaattttggaagcgtttaatgaatttcaagtaaaaataacaaacgaaataggaaaccctcttcgttggaacacaagtccaaagcggaaaatcaatggatataattaattactaccaacaatgaggtactaaaatatatttaatgagaaactagttaaatattggtgattttctttagatctttatatttggaatacatttttggagcttacgccttattgttcttgatagacttctagactttgagtcataaattgataatttcgtagcaagccacgtagccacgtcagccatcccaccaccagcgccagtaccactcaataaatggctccacccaagccggaaaatattggcggggggattcaaacatcagtggtttacttaggcgccaagtgccgcgcataagtaagcgggaaaacaacggcaaggcgcgtaacttgagggccatcaatccgttgactgctgtcaatcacggttctccacagacagtttgagtttgtctatttttatgccctgttaatttgtgtgtaaattactcaatgggtactgcaacagctggcccagctggtttgtttggcctttactagccagtttaatggacttcctaagtatgttgccagcttacaaaaaaaatgtagatagataacgatagcgtatacgcacagtgggcgctcttacacgcacacggcacacaaataaacaatgggaattaactaatctggccgatggtcgaccacatgccgctaaattgctagcatatttttagatgtcccgcataatttgcggatttttcttcataagcacagcatatggtatcgtatacatatatcgctcgcatccccaaacccccagccccactgccaagtgaaagtcaaagtaaaaacaaaaccttcagtcactcggatttatgtgggtggagctgaacacaaatattaagggcaacaaagcaggacatctaatgtagcaatatagctgccattgtgtctgtgtgcactgctcgccattataaatataatgtgtcacacggggtgataacggggctaaaataaagtaaggacagctccgtggcaagtggcagctgttcgccaccacccttttcgctcagtgtgtgcgtatgtgcacgtatatgtccaagtgtgtgagttatttaagcttaacacaccacccacacggccaaagttggccaaaagctcagacatgtgtgtgcttctgtgcttgagacacattgctcactcctcagcctgccaaaatggtgtctataattagttggctgccgcatttaaatagcaaatttattaacgagaagccgttggcatctacgccacttcgacacttgttgctcgacaggacaacagctgtgtagttacatcacgtccagggaatttcggtgtgggcggctttgtcgccggatcgtggccacaactcgcccgcgccatgacacgtcatctctcttggcccgtcaacatcagaaatttatggatttccactcgccccgtgcgaacccatgcaaggtaaatgaaaaactcgctgaaaaagctgaaatatcatcagttgtgctgtacatgacagcttcccccgtatatatgtgtatgtacacagccatgtatttatgtgcagcagatatttcatagtgcctgcaaaaatagcatacaacaatggtccaatgggcgtagggaatgggcgtttgtgtttgccctgaggcttaaaggactttaacttgttaatatagctctctttgtttaccttaatcgaattcttggtcggtcagctgctgacagtacacaatagtgggcattcaacaagttgagcacacagaacagcttttaaattcctttgcaagagttgataaaatatttagatttcaatgcccggaaaatgtgtgccttacacggcgagtatagagtatagcttccttttggaacaaatacgcattattgctacatcctacgccataaatgtgttatttgcatgcattagcatactcaatctaaaaatattgaaaggtatattgaagaccttcctccgcaaaaatttgaaaatatttccgcgaaacatagaggaatctaatgccgcaatcgctgacttccataagagcagaaaagtaggcaacagattatgtgaatagcgtaagcgattcatctccgataaaagccattacgcaatcgtcgcattttatttgttacccaatattgaacgccccgaggaataaccattcatcaatttgtacacacaattggccaaaatggccaacggtttagttaaccaaccaacgtcagaagctggcgtttatcaaggacagacgtcgtcagtttatcaaaagctggccaatttttctagtggcattagccgtcaataactactggcatacacataatatagatagcagtcgggttacaatgtgataaatgtgttcgcagtgcaactgcgctaattaggaaaaatcgccgttcttcctgccattctcgcaattaatcaatcactcaatcaataattgggaaacgtgtcattgcactatggtgtttgcataaattatcgctacacgcgaaaatcacttgtgcagactgctgaaaacggagtcccaaatgatagcattttatcttgctggtatagagaaaatcctcatcaagtgctcttctcccatctgtcaagagtggcacttttattcaattgaaaaatacgcaaaaaaacttgcctgtctttgctgcgccaaaacaatgcaaataagcgtgtttggattgacagcttggcgatccacacaaatccagtcgtcaataaatggcatgcaaatttgcacagccttaaaattagaagacctcgatggcaggtggcgaattggagaaatgcaaatgagtgtcctggcccaggactcgtgaataattcagcaggatgcggcgacaaaggaaacggcaaagacaaacagcttcgcccaactcgactaataagctttgattgaggctcatggcatgtgcccgtgattgtggcatttgatttgctggctggatcaatggttaaacttgcacaaattgaattaaacttcagccagcgtcatatataatagatgaatttaaacagcgagtgcacacaggaaattgcgttttgactcgcagcttaaactgggtcaaattgtaaggccagcgtaattgaaagcgacggaatggtagtaagcccttaagacgcttttctattcggagtagggcaaaggcagcttggccaccagcacacaacataattatctggagcgctctgttgacattgaaatgccatcgctgggcagacactgcgtatgagcgatttctcaaagcacacagagccagctccacactttgcggagtgggcaacctctgtagccacgccagctggcagttggctaattaaatttcaagattttcatctaattttatcggaatgaaatttgccgcatcgcaaacaaaacttttactcactgacctttgacatttggaggcgtgcaagcgcaaaaagccagaacgtttaaaaaaaaaaaaagaaaatgtaattatgtattgtgtgttattcacacactcgtttatcaactgcagacatttcgggagtgaggcgctgaaaagttttttaattatttacaatgagcaagcggcaggtttggtctttgtccttgcctcggtttccactttttgtggctctcgaagcattttccttttgttgagggcaaaatatttgacaaaactttggctcgagtgttgatttattaaattgtttagccacagtggcagaccgacagacagccaaggatgctcaaagggagcaggatcaggagaggcgtgggagcagcagtggtgtgtgcattagcgacacctgtccaactgagacaactgtgcgggcccaggagcacggtccattggttccattatgggagctgatccacgctgagccaggcagcttgtttacagcatgtctatatttagtgcctccctactttcgcctccatcgaacattctgaatatccttgcgaaaagcatagagaaaaaagttaagcaggcaccgggcaaaactagttaaagttacacttttttgtgacctcgtttaagtgaaacccgaaaacttactaattagcattagagccctgtgaaatccgtatcatcattctcttgatatgatatttatagtttaaaactcatttgtcaaacgatatgtccaggggcagacgatgcgttgcgtaacacaatatccccaaacgcaaacgaaaagctggcaaatatttgccagatgttgggcttccgtcgacacattttcgcaagggaaaagtaaaaagttaaggtaactttcgtaatgttattgagccagtgtcaacctattagtgtgagcaaaattgaaagtaaatctgacaaaggaccttgagttatcttctgtacatctttgagatatatatggtacattactttccatatacattatttattccacttgttctttgacgccagttactcttagatttggcttacataaatcccttgaaaaggatataaattacccttatttttagccacttgcattatttatttcaaggcatcacattcagttgctgcaagccaaaacctctttcatgcagtcctgcccataatccactgcaagtgtgcgtcataaacagcagcataaatttgaaatggcttaaaatgaatgtatcctgtttcaatttgaggcaatgggagttgctttcaaaattatttttagtccttcaaccataaatgccggtggcaatatgggaaaaccaaacggcaaaactattcagagccaattgctgcattaatagtcgtaaatcttccatctgtgagaaattgttgtcatctggtccctacaatagccagcctttgtccggcaaaccatcgagctgctttccagggctaaaaataaataaataatgcgcctggactcgggccgcaacactgcgtatacgtgataaggcatcgtgtgtgccgtggtggcttgtgtgcaagtgggtggcgtgtgtgcctgtggtttttggggcgatggagtgaaccttttccgagcctcggaccggcatcttgaactccaccaactgtgtctctgtttgtccagcgtatttcactggaatcgcagtacgcctcctttgtttgccttgtatttgccaacatatgctgctggccttgggttacaaatgtccgtgcctttaatttgcaaccatctagccatctgggcgagcgaccgccgaatttgtaaactcgtttttcatttgccataataaatgaaagaaaaacagccagcgataagcaaacggagacgaatgtgccaatgtcagaccgcaaagtcatttcaacatttgtctctgcagatccactctgcccgctaaaaagcaacacaaaatacggtttggttttttgtggcaacgggaaacttgttaagttgaaaatatgcggtccaactacattggtattcgttggcatcttaataaggtcacaacactcttgcataatttatgagaaaactatggcttagctgtatgaaactatgcatactagatgagcgttgacatttcaggaactcctgattatctaggacaagcttaaggaaagcaaatacttgcaatgtgtgagacaggagctacacggactaaggacatctgaagggaagctactcactccgcatattagagactcagtaaggattttaaagggtattcggctgacctaggggatgcattttttttatttattattgcctggcgacgtacgaattaagctagagcgaacatttaatatccctcctaaatggctttccgcctcataaagtactatcttttaatacgaaaaaatcgcaacaactttgtggatattttttcctatgcccataaacgttcgtgtaataatctgcttttgctgttgcaatcgccattgttggagatgttcttgcgacttagaagggcttttcaaacagcaacaccagcaaacaactaacgcctgttgccgctggccacgtcctgacttaacgctttgtgcaaggatttggctcacagcccgacaacgaagacaagcggctcaaaaggatggtgctgatggtctagggggatggctcaatgacaggtgagttgttggcttttaaagttggtacacacaaaccaggcaggcaagcacaccatgcatgctcaaaggctttcggcccggtcgttggtaaacttttaataatcgcaaagacgagtcgctttgtggctttggccaagaagtttggaaaatattctaggccaaccaaccactgggcacgaaactgcagagatagctgctggtattaaactccgccaacagcgtgggcaataatcctgcgtgggcagtaaggaagcatatgtatttacttgagcaagaaattgactttcgctttcttttttgcctcacagtgagccgcattcaagtttcagggcggcaattacattcaacgcgggatcgagatttatttagatttgcacggcaatagctgactgaatctaacgttttactgccgataaggtcgtaacatcaaaggcaataaaatctaaacacactcattgtcagagtaccgcagataagatgcggcgtatacgcaatatcgattggtatgagagcaaaagtgagtttgccgtgggtaagcactcacttttggtttgggatacattttgatttgtgctcggcgatagcgtttgacgtaggagcaacagatttcatttgagttttatttttcgttgttttcctcttttcttttttttttttggtttttgatacatgtgccgcacatttattacgaggaccacacccacacagagcatgggatttttgggcaattatctaaaaacgagttcgaagtccggaggggaaatggcaacaggctgcgatttgtaattaaatcgggggctatttttaaaacgttgagcaggaaaatcttttagctctgataggattatatcggcaattaagtgggtaaaaaatcaataataattacgaagctacataattagagtggaaattcccctgaaaaagattgtctctacgggcatgaaggaaatcgagaggaattagtcgtttgaaattgcacagatttttgcttgtgtttcgtttgcaaagaaaacattccgacgcaattagtccctttcccaggacccgtatgtacgcctgtgcaatgcgagagctgtggccatggcaactgcggcatgcaatcagcttttggctgagatgggggcagatgagattgcgccattgcaaacagcatcgatgtcgcaataaagccatcggataacaaggaccacgccatccgccaggaacagcgagccggggcctcaggtgacgactggatatcggatttccaaggaataggagagttaattggatttagcgccagctttttgtagtccctcccccatgcccatctaccgctctctagttgttattgatgcccctaattaattgcgtccgttccagctcttgaattcgcattaatcctgaaatcctcgagtgagttattgacctaatccgagtgcgtgtgcaacaagtgcgcgtcatagctgtcaagtgctgacagaattgggcaatggttacgcattacgttgacggatgacaaacccataagagggtttctcgatgcgaatcgcagggctgtcaggattgcagaaagtgaaagtccatactgacgttgcacatggaattacaacaggaatgatttcgcaacgaatagtttgtatgataagcaaacatacaagaagcaatactttggaaatgattatacatgcatcattgatccgtagcgaattgattccattctatttacactttttcatttgaaactcgacataatctgggcagaaaatcgttggaatgacaggtcaaagtgccgcagacagaagcgattcgagtgcaaattactgacctattatgatgttatttacccccgtgtgtgggcaagtttattttcgccacgttgaccttggctcgaatgcaatgggtctttagcatgcaatgcgcaaatttgcgcctggcggtatgcagcggaaacttcgctctgccgacggaagttggccaatgccacaagccccaaaaactttgccgctcgccagctggccaaaagctgcctttggcattccgagcacgctcctggtatccacacacacactcgagcactaggacacccagacccctcgagcaatcgcaattaacgcctgacacgcgcccgacaagtgcagcatgtcagccagaaacgctaacaacttggcccaaaagaagcgagccaccaagccggccgtcggcaatataataattgatttttcgcacattccacttaccgggcctaggttgtcgaagccgtacttgtcggccacatcatgggcaaacgagttgtccactccgcgccggaagcgcaccaggaaggagctggtaaagacggcggggccgctcagtcccgctcccgagccgcctgctcctccgcccgctcctgcactggcccagtggaggagcaggaatggggccaacagccagctccatgtggctgctgccatggaattcagattggacgccttggtcctgcgggttcctcctggcctctgactcctggcggcgatggggcaactctggcagcccgtacaaacagttggtgcgtggggcgtcctttgggtgatttttttccgttggcaggataccgaagtgctgacgaaaataaaggacgcgctccactgcacactctgcgaattggcgacgcgaattgggtagccaggatcaagttgctcggttggcaaaatatcctcttgttgtggttgcaatttgttttctttattgtgtatttttggccccttctatggagcttgttgtgctttccttccgcctgaaattctgtttctatgtacttcgtctggagtctttgtgcgctgccacgaacttcactggggcgctgcgcgctgagtactgttcgccagcggtaccgacggacgccattatgaatgtccgccaggcgccaaagcggtggcaaaagcttcgccgccgaagctcgctcgaaagctccgactagcaggcgataagccacccgccactcactcgacgcacccctagcggagataccgttgtcttaccagcttcgccagtggcgtgcacaggaatgttccaaggggctactactgttaggcttacaaaactagaagtacgctagcaaaactagaagtacgctatcatggtaaagtaagtaatatacatatcacacagataagcttaatcccccataatccacccgactacgcccctgctcgcctactgctgctcagctgcgttggataagcttttgctatggcttttcccaccgactcaggctttccatctcggttggcttggcttctgcagcggctttggctgcccgcagacgtcaccagtttggacgcccgctgccattagccacccaccattccgtgctaagttgtagctagtgttttgtcattggtttatgctgcgctccgtaaacatatggcagcatacttgactttcgctgactttcggctgaatggcacgattcggctgaatggagtcacttgctcctgcggttcgaatggcgaagggactactgacgactggaggaggactattcataaacatgggcgcaattgcctcttacgcgtaatggctgcgaaagggcttcaactttgaccttagcccaaataggttcataaagcctcgagcacccaagcctttaaactgcaggccaagcgaaaagtgaagacagctggggcaactttcgccggcttttcatgccgacttgattgttgcctcctcccgagttttaagtgcgagatgggattcacacactttgatttcatttgccataaattctgttttccagggaaatcccttcttagactcctcattgcattttaaatttaattttatgaactc

SEQ ID NO: 13886 - DNA, 3921 bp, DROSOPHILA
agttcgtggcagcgcacaaagactccagacgaagtacatagaaacagaatttcaggcggaaggaaagcacaacaagctccatagaaggggccaaaaatacacaataaagaaaacaaattgcaaccacaacaagaggatattttgccaaccgagcaacttgatcctggctacccaattcgcgtcgccaattcgcagagtgtgcagtggagcgcgtcctttattttcgtcagcacttcggtatcctgccaacggaaaaaaatcacccaaaggacgccccacgcaccaactgtttgtacgggctgccagagttgccccatcgccgccaggagtcagaggccaggaggaacccgcaggaccaaggcgtccaatctgaattccatggcagcagccacatggagctggctgttggccccattcctgctcctccactgggccagtgcaggagcgggcggaggagcaggcggctcgggagcgggactgagcggccccgccgtctttaccagctccttcctggtgcgcttccggcgcggagtggacaactcgtttgcccatgatgtggccgacaagtacggcttcgacaacctaggcccgctggtcggcgccgatggacacgagtatcatttcaagcaccggacccttccacatgcccgctccaggaggagtctgacgcacacacgggccctcaagagccatccggcggtgcatacggccgtgcaacagccgggattcaagcgggttaaacgtggcctgcggccggcggtgcccgccattcacggcatgaagttcgacctgaaagttggcgagggcaatcggattgacgaggagcccactgacccctactttcccatgcaatggtacctcaagaacacgggtcagaatggcggcaaagtcaggctggatctgaatgtgcaggctgcctgggcccagggaatcaccgggaagaatgttacgacggccatcatggatgatggcgtggactacatgcatccggatctgaaattcaattataacgccgaggccagttatgacttcagcagtaacgatccctttccgtatccccgatacaccgacgactggttcaacagccatggaactcgttgtgccggcgaagtggctgctgccagagataatggaatttgcggcgttggcgttgcttatgacagcaaaatcgcaggcattcgcatgctggatcagccgtacatgacggacctaatcgaggccaactccatgggccacgagccgcacaaaatccacatatacagcgcctcctggggtcccaccgatgatggcaagaccgtggacggtccccggaatgccaccatgcgagcgatagtccagggcgtcaatgagggtcgaaatggcctgggcaacatctatgtttgggcatccggcgacggcggcgaggaggatgactgcaattgtgacggctacgccgcctccatgtggaccatttccattaacagtgccattaacgacggccagaacgcccactacgacgagagctgcagctccacgctggcgtccacattcagcaacggagccaaggaccccaacacgggcgttgccaccacggacctctatggcaagtgcacgaccacccactcgggcaccagtgcggcggcgcccgaagcagcgggcgtctttgccctggccttggaggccaatcctcagctgacttggcgggacatacagcatctgacggtgctgacatcgaagcgcaactcgctgttcgatgccaagaaccgattccactggacaatgaacggcgtgggcctggagttcaaccacctattcgggttcggagtgctggacgccggcgccatggtcacactatccaagcagtggcattcagtgccaccgcgctatcattgcgaggcgggcgagcttacccagccacaggccattgttatgggtcgttcgctcttctgggagatcaaaaccgatgcttgcaagggcaccgacacggaggtcaactatttggaacacgtgcaggcggtgatctcggcaaatgcctcacgacgcggggatcttgaacttttccttacatcgccaatgggcacaaaatccatgatcctgtcgaggcgcgccaacgatgatgaccaccgcgatggcttcaccaaatggccctttatgaccactcactcgtggggcgagtatccgcaggggacctggaaattggaggctcgcttcaactcgccccaaacacgacacggcaatctgctggaatggtccttggtcctgcatggcaccaaggaggcgccctatcgcaccctgcacccctcgtcgccgcactccaagctggccattgtgaagaaggcgcacgaggacaagaagatgaagtagggcgggtcgcgcagagggtcagaggtcaggtccagataaacatccgcgtagcgacgtccattaggcagcttggcgttttatcaacgagtttagtgtgaggttcaataaaagtgctggctgtgttttattttggaataggattgattgagattaaacattttatttcgattgtgtttgtcctttgtgtaacttctaatatttgtcatttgcgttggatctgtagaactgaaagttcatttaagcgagggatgtcctttatcatttccgtttttgtaattagttttctgatttggtgagctaagcgcccagggtgccacaaaatcacttcattcgccgtttaaacttattctggaaagcgcacatttgccacagtataacagatttatcaaaattctgcactcaacaccataatccgttgagtgtcctagcgaactctgtagtcgatatcgaaggcaaccacaaaataagaacatagaaaacaggtatagcaggtatatttgaatgcgtagcaagactaggaggcggggaatagagatatataataaaactagaacaaagaaaacaggataaaccctatgtaaatgtgtaatatctatatgtatgcataccctatctttaactgcgtcctatgctgtagtcttataactctttctagtataaaatacaaactaaacaaagtatttacacacgtattttaaagctttgtcctttgttttccatcctatatatacacgaatatacctacatacatgcatatacatatgtacttaaaggatacttagcaaaaacataaaatgttaatcccattattgcggaacatgtttgtcgcttaactttggttgcaagccaaaatctgctttaatttggatacaactcgtacgtgtaaaatgcatttacatacatagttttcctttcagtttctttcgggggccaaaaaaaccacaacatagtaacattaattgtgtgaaaccagattcacgattgtgtcgtaaaacggagcgtgtgttttgaaaatacataaacaaatgttaaagtacaagtgcataaaccttaacggtgagcagagagatacagatacggattgttttacctagtctaataactgagatacagcgcattgttaaagtttaccgataatgtgcgagaggaataaaatatatatatatatatacacagaaccatatatgaagtacatacacgtgtaattattaatcaaaaaccacatgaagaggtgacggcggaaactgtggaataaccattatatacatacaccgaatatttaactatatatatgcataaatgtatgatacgtatatataaaccacaaaataaacgcaaggagtatcttatgtggccgttaagttgatttttgatgttgtagatacaagaagtagcaccaatagatgcaccataccactcaaaattatagaaagatgtgagaatgctaatgcaaaaccgatatttgattgcaaatttaattatttcctatagcacaaaatttgtttttgtcttttggtgcggttttgtcatttccatgtaattgaacagaaagagaatttaattttgtaaataaaagtt

SEQ ID NO: 13887 - protein, 654 aa, DROSOPHILA
MAAATWSWLLAPFLLLHWASAGAGGGAGGSGAGLSGPAVFTSSFLVRFRRGVDNSFAHDVADKYGFDNLGPLVGADGHEYHFKHRTLPHARSRRSLTHTRALKSHPAVHTAVQQPGFKRVKRGLRPAVPAIHGMKFDLKVGEGNRIDEEPTDPYFPMQWYLKNTGQNGGKVRLDLNVQAAWAQGITGKNVTTAIMDDGVDYMHPDLKFNYNAEASYDFSSNDPFPYPRYTDDWFNSHGTRCAGEVAAARDNGICGVGVAYDSKIAGIRMLDQPYMTDLIEANSMGHEPHKIHIYSASWGPTDDGKTVDGPRNATMRAIVQGVNEGRNGLGNIYVWASGDGGEEDDCNCDGYAASMWTISINSAINDGQNAHYDESCSSTLASTFSNGAKDPNTGVATTDLYGKCTTTHSGTSAAAPEAAGVFALALEANPQLTWRDIQHLTVLTSKRNSLFDAKNRFHWTMNGVGLEFNHLFGFGVLDAGAMVTLSKQWHSVPPRYHCEAGELTQPQAIVMGRSLFWEIKTDACKGTDTEVNYLEHVQAVISANASRRGDLELFLTSPMGTKSMILSRRANDDDHRDGFTKWPFMTTHSWGEYPQGTWKLEARFNSPQTRHGNLLEWSLVLHGTKEAPYRTLHPSSPHSKLAIVKKAHEDKKMK

SEQ ID NO: 13888 - DNA, 3183 bp, DROSOPHILA
cccacatctgcggcatgatcagcaaccacctgacgcggaaacagtatcgcatcattggattggatcccgcccggcctttaattgagcgcatgaagagcaacaagtttcggttgtcgatcgatgatgccaacgtcattcaggtgctccacaccaatgccggtttcctgggccaggaggataactccgggcatctaaactactgtgtcaacggtggacgcatccagccgttctgcaaaggaaatccaatcagtaaggctaaattaaagtagtttaataccctctttctcggaaaaagaaatcatatataaataaatgtgctctctatcaaacaggaaaatcgcgatgttcgcacttcttgagcatctgctacttggccactgccacatttaaacacaataagttcatgggagtaccgtgtcccaatggctgcctgaatcttagtggatccaagaggctgccagtgagcggcaaagtgaatcccttcgagttcgcctcgctgataagggagtaccacataggcaacgatgcccccgatgagtaagtttattaaaaaccatatatataatttataaccaatttcatatttgatttagcgcccgaggctgcatttgcattgatgtgccgtatgccaagcactgcccctttacggatgcgtaggagctggtcttcagtagtttgtaattctatgataaagctgtcgataataaattcaagtaatattatttttttggtctttgggtattttagtaaatatgaaggaaaaatgagaaataattacttaccttctactacacgtagtaggagtttattattaaaatgttgcaaattccaaatttagttttcgaaaatttaaaaatcaaattcgatatactaagagtttggttcaccgtaatataccaaaatttatatcgaatatatgatatcgatgtttgcaatcgtcattgcagtcgctacagctgtttggtgttttaccatctctatggacattgtgtatataaaacatttgttattgctcataacagaatttctccatttactacaacctgaagatatatagttatttatatcgttagtttatttaaagtaagtaagatacttataccgtgtaaaatgtaaaacaattgaaaaatatcataacccattgtaaatcgcatattatagtttgcccaacaaggaattcccaggaaatatattgtaattcttgagataaatatataatcatgggttgcgatggaggaactattcccaggcgcgatgagctggtgcgcgtgaagcaaaagccagagcaggtaagtctattcgattggagcacctcctagccagaccgaaatatcatttctcgaaccctacagaaagacaaagatgcggagagggagttccgttggcgccactgcaccttgacccagcaaagcctccaggagccgatcgccatgtgcggcatgggtaggctctattccaagcagagcgtcattgagcgactgctggagaaggaaccgatgccagagacagctgcgcacgtgaagagcatgaaggacattcgccagcttaatcccacacccaatcccgccttcaccgaggaggacaaaactgagggactgctggacacacgacattctccttacatctgcaagctgattggcctggagatgtccggcaaatttcgctttgtggccctttggagctgcggatgcgttttatcagagcgtgccttgaaacagatcaaaggcagtgtggctagcacttgtccgctgtgccaggctgcctatagcgttgaggacgtggtggtcctcaatggcaacgaggaggacatggagctcatgcgggtcaagatggaaatgcgtgcggccaagcgtaagtcctccaaaaaggacaagaagagtgccaaaaaggtggaggtgaaagcggagcccgcagaggaacaggagccagtggcgtccacatccaaggctgcagccgcagagaagcccactacaagcacaaaaaccaaggcggtggcgccggtcaaacgactgggcgccgttaatgcaatgcaggatcccgaactgaagcgtctcaagagcgacttcagcgtggccaaggacccgaaggccagcgatgtttacaagtcccttttcacctcccataaaaccgaaaaggaccaggagcgcgcccactgggtcacctataatccattctacaattagtctagatttcgtttaagtttgctgtgttaactcagtcacatgtccatagtttgatcgttgaaaccacacacacagtttcaaaatatacaaccgacaatgtatcgtgcagcctatcaaaaaggtttccttaccgtgctttacagcgtaggcagttcgcccctgaacaactggtcttcctatgtgagtatctggcattcaatgcagctgcctcgtctctagaaagcatccttgtaacagaccaaaaacgggtatatcaaacggatctacgatgaggacatcaagtccctggtgctcgagataatgggctcaaatgtgtccaccacattcatacactgccccagcgaatgcaaggagcagctgggcatcaagttgcccttcctggtgctccttataaagaacatgcacaagtacttttgcttcgaagttaaggtaaggccaagtgctatgaatttatagtaaactctggactgcacaatgatgacaatatatccttagattcaagacgatcagcgcttcatgcgccgtttccgagtgtccaatttccagagcaagacctccgtgaagcccttctgcacggcgatgccgatgggcatgtcaccggggtggaaccagatccagtttaacctggccgacttcacgcgccgtgcttacggctccaactatctggagacggtatccttgcagctgcatgccaacgtacgcatccggcgcatctacttcgcagataagctatacacagaggctgaattgcccaatgactaccgtctgatgggcaagccgaaggatctgaagaagccggagaagcagttcaaggtgcaggccactgcgcgtcctccgtcgcctttgaacacgggtcgcggtgaacccggaccctccaaagacacggacgcagaggcaacaggtcccgccacggatccgatgagtgagccggagcccgcgctgcagaagtctccgtcgccgcctgttccgcagaaggttccgtcgccagcagcttccgctc

SEQ ID NO: 13889 - DNA, 1042 bp, DROSOPHILA
catttgttattgctcataacagaatttctccatttactacaacctgaagatatatagttatttatatcgttagtttatttaaatttgcccaacaaggaattcccaggaaatatattgtaattcttgagataaatatataatcatgggttgcgatggaggaactattcccaggcgcgatgagctggtgcgcgtgaagcaaaagccagagcagaaagacaaagatgcggagagggagttccgttggcgccactgcaccttgacccagcaaagcctccaggagccgatcgccatgtgcggcatgggtaggctctattccaagcagagcgtcattgagcgactgctggagaaggaaccgatgccagagacagctgcgcacgtgaagagcatgaaggacattcgccagcttaatcccacacccaatcccgccttcaccgaggaggacaaaactgagggactgctggacacacgacattctccttacatctgcaagctgattggcctggagatgtccggcaaatttcgctttgtggccctttggagctgcggatgcgttttatcagagcgtgccttgaaacagatcaaaggcagtgtggctagcacttgtccgctgtgccaggctgcctatagcgttgaggacgtggtggtcctcaatggcaacgaggaggacatggagctcatgcgggtcaagatggaaatgcgtgcggccaagcgtaagtcctccaaaaaggacaagaagagtgccaaaaaggtggaggtgaaagcggagcccgcagaggaacaggagccagtggcgtccacatccaaggctgcagccgcagagaagcccactacaagcacaaaaaccaaggcggtggcgccggtcaaacgactgggcgccgttaatgcaatgcaggatcccgaactgaagcgtctcaagagcgacttcagcgtggccaaggacccgaaggccagcgatgtttacaagtcccttttcacctcccataaaaccgaaaaggaccaggagcgcgcccactgggtcacctataatccattctacaattag

SEQ ID NO: 13890 - protein, 299 aa, DROSOPHILA
MGCDGGTIPRRDELVRVKQKPEQKDKDAEREFRWRHCTLTQQSLQEPIAMCGMGRLYSKQSVIERLLEKEPMPETAAHVKSMKDIRQLNPTPNPAFTEEDKTEGLLDTRHSPYICKLIGLEMSGKFRFVALWSCGCVLSERALKQIKGSVASTCPLCQAAYSVEDVVVLNGNEEDMELMRVKMEMRAAKRKSSKKDKKSAKKVEVKAEPAEEQEPVASTSKAAAAEKPTTSTKTKAVAPVKRLGAVNAMQDPELKRLKSDFSVAKDPKASDVYKSLFTSHKTEKDQERAHWVTYNPFYN

SEQ ID NO: 13891 - DNA, 3672 bp, DROSOPHILA
tagaaagtaacctagcctttgcttaactaaaaccaactgattttaactttctaatcaaacgatctctataaatttaactttacttaagctcacctacaagctacctaaaataacacatatttaaacaattaatctaaggttatatttgcatgataggataaccaaagtcttgcaaaataaaacctaactgtccatatatgatcataaatatgacattaagatccgtttagggtttgctcttgaaatcaaacgtatgactaaccgcctgattgttttccactttgcagcagaggagccgggaaggagcggtagaggcgcacccagtgtatccggcaaaggcaagtcaccccaggtgcgttccatgcccagctctccgctgcctcagcgatccgctacgccgacgcggctgatgagccaacgtgtccgtgaggcggccgagcgtcttgcccaacagcacacggtggccagtgctcagcggcatttgggcaatgggagaggcactggcactggcaatggaaatggcaatagcaatagtaatggcaatggtaatgggaacaccgcggagacgaatcgcgaatcacgcgcgcgacgtctcatcaaccgattcaatagcgaaacgcagcatatcacgtcctagtttaagtcggttaaatgccgacgagcataactttattacagataaagcagatatagcattgtttaagtaaaaaatatatatatataccccagagaaactttacgaaacactcgaatatgaatgcgactgcggatcagcatcccacccacccacacacacacgtctacccactcacagtaggatatatgtatgtatgtctgcattcaagcggatgcactccctccgttcagagggaactgtacttaggctagaggaagctaagtgtttaaattattgtatcgatttatatacatatttaccatactaattaaagttaatgtaacgaaaacgcaggatcagtaatcttatttagttcaatggtaatcaatgtgcgattagcggatgatcgcgctccttgagtcgcacccacagtccgccggaggctctcagcgtaatccggaaggtggccgcaatggttgtctttccggttacaggaagcagctggtagctacgcagcaggcgcgacactatggtcttgatctccatgatggcgaatcgattgccaatgcaatatctcggtccagcgctgaagggtaaaaaggcgtagggatgacggttctcggagttctcgggcgaaaatcgctccggctggaacttttccggatcgggataaatgtgggcaagacgatgggtggcataggggcaaatgaaaacgttgctgccggcgggcaatgtgtgctttgccaggcgaacctcttcgcccagtttacgagcaataagcgggacactgggatacagacgcagtgcctccttgatgcacatctccatgtaacgcatctcgtgcagatccgtcatcgtgggagctctattactgtcctcgaatatggtcgccagctccaggacacagcgatcctggcactcgggattctgtgtcagcagaaagagagtgaaagccacggcggcacccaccgaatcctggccagccagcataaaggtacaggcctcgttgacgatatcctcctcggtgaagtcccgattgctctcggagatctcgatcatgtggtcgagcagacactttcgctcgctattgccattattattgttctggatttggcgacgtctctggatcattttgcgtgtgaagtcattgaggcgcttcttctggttaagctcatcgttggccatcttggtccagtggtagatcccgtccagcagcagccagggttgcgtaaaccgcgcgggcatcatgatcttgccctggcggaacggcgagtcctccatcatggccacatcctgacctcttttcttgatcggcacacccaaaacggcctctgcaagtcgttcagggattaagtgagaaattatagcttgctaatcccctagagactcaccatttagtatgtccagtacacagttgttcacgtacttggcaatatttatctccgttcccacggcttcggcatccagattctcgtacaacgattgcgaggcatccacaaaggtgtcgatgaacttctccagcagattgtgatgaaacgctggctggatgagccgtcgatgattgctccacttggaaccactgctggttatcagcccatcacccaggaaattgtgcatcagtcggtagaagaagaccttgttggtgtgcttcttcgaggagagtatcacctgcagatcctccggctccaggacagcaaagaagggaaagagcagcacccagatccgcaccagagatccatatagatcgaaggccttgccggcacatctgcgcatcactgtgaaatgggattcaatttaacttaaaaggtatctttcacgaaaaggtttcttcaaggatcttacagtccttatccgtgaccagcatgcagttgcccagaaatggcagcgatggcggacccgtgagtctcagcgagaggagaaccgatctcaagtacgtgttcagggtggcgtagaatgtgtagatgctcaggctgatcaccaggaggatcagaatggagcatagctccaaattggtggtgcgctccagctgtgggggcgaaagcaaacgtaaatgcattgggtcaagtcgcgtggataattgcccgcttaggtcaatatttggtttgctatcgagaacgccgagctcttgaacgcacttcatcagctacgcactgcgctcactggagtctaattaactgaggaatcttggagcacttaggcattcgaacttggatgcgagcacttgcccttgccgcgtgtcgcaagttttcggcaaacacacgttatcgtaatcgcaacgaaagtataagttatgtatctaactgcggtgtgaattgcttgggccaacatggcgtatgggcgatgctataagtacgtgtgtgtgtatccataagatcgattaaagcaccacaccgttcatgtgtacgtgttgctttgctttggtttttttttctttatttttgggccattcgcgtcgatgtttcgtggtgcaacaggttacacgatgagcacaaaacatgacaaatgatgatgatcaccggacaaaaatccagggacagccttttgttgcccacacttcccacacctgtcgtcgccccacacccttgcaccactaacccccccccccccccaaaaaaaaacccctttgtttggttctggacgagagtgagagccccaacaccattagccaaatgcgattggtttcagggccaagtgaaaccaccggttggttaactgactcagatctcaatgattaatttattacggacaaggaatcggcaaacgatcgcagttggtcatcataaagtttatccaaaaatctaggtggcattccatttagtgggaacttcttaccatcagttcgtagtaagctaagttaaagagtaaaataataggcgcttttaatcctcctcagccacctcatcctcgtagccctcgggcagggcattcacctcggcattgtgaaacaaactgcgattgccatctccccatgggaatcgtttggtccgccgcctcaggtactcgtacttggcgaacggctcccgctccacgtgcttgtgtccggtgaaggcgtttgc

SEQ ID NO: 13892 - DNA, 1545 bp, DROSOPHILA
atgcatttacgtttgctttcgcccccacagctggagcgcaccaccaatttggagctatgctccattctgatcctcctggtgatcagcctgagcatctacacattctacgccaccctgaacacgtacttgagatcggttctcctctcgctgagactcacgggtccgccatcgctgccatttctgggcaactgcatgctggtcacggataaggacttgatgcgcagatgtgccggcaaggccttcgatctatatggatctctggtgcggatctgggtgctgctctttcccttctttgctgtcctggagccggaggatctgcaggtgatactctcctcgaagaagcacaccaacaaggtcttcttctaccgactgatgcacaatttcctgggtgatgggctgataaccagcagtggttccaagtggagcaatcatcgacggctcatccagccagcgtttcatcacaatctgctggagaagttcatcgacacctttgtggatgcctcgcaatcgttgtacgagaatctggatgccgaagccgtgggaacggagataaatattgccaagtacgtgaacaactgtgtactggacatactaaatgaggccgttttgggtgtgccgatcaagaaaagaggtcaggatgtggccatgatggaggactcgccgttccgccagggcaagatcatgatgcccgcgcggtttacgcaaccctggctgctgctggacgggatctaccactggaccaagatggccaacgatgagcttaaccagaagaagcgcctcaatgacttcacacgcaaaatgatccagagacgtcgccaaatccagaacaataataatggcaatagcgagcgaaagtgtctgctcgaccacatgatcgagatctccgagagcaatcgggacttcaccgaggaggatatcgtcaacgaggcctgtacctttatgctggctggccaggattcggtgggtgccgccgtggctttcactctctttctgctgacacagaatcccgagtgccaggatcgctgtgtcctggagctggcgaccatattcgaggacagtaatagagctcccacgatgacggatctgcacgagatgcgttacatggagatgtgcatcaaggaggcactgcgtctgtatcccagtgtcccgcttattgctcgtaaactgggcgaagaggttcgcctggcaaagcacacattgcccgccggcagcaacgttttcatttgcccctatgccacccatcgtcttgcccacatttatcccgatccggaaaagttccagccggagcgattttcgcccgagaactccgagaaccgtcatccctacgcctttttacccttcagcgctggaccgagatattgcattggcaatcgattcgccatcatggagatcaagaccatagtgtcgcgcctgctgcgtagctaccagctgcttcctgtaaccggaaagacaaccattgcggccaccttccggattacgctgagagcctccggcggactgtgggtgcgactcaaggagcgcgatcatccgctaatcgcacattga

SEQ ID NO: 13893 - protein, 514 aa, DROSOPHILA
MHLRLLSPPQLERTTNLELCSILILLVISLSIYTFYATLNTYLRSVLLSLRLTGPPSLPFLGNCMLVTDKDLMRRCAGKAFDLYGSLVRIWVLLFPFFAVLEPEDLQVILSSKKHTNKVFFYRLMHNFLGDGLITSSGSKWSNHRRLIQPAFHHNLLEKFIDTFVDASQSLYENLDAEAVGTEINIAKYVNNCVLDILNEAVLGVPIKKRGQDVAMMEDSPFRQGKIMMPARFTQPWLLLDGIYHWTKMANDELNQKKRLNDFTRKMIQRRRQIQNNNNGNSERKCLLDHMIEISESNRDFTEEDIVNEACTFMLAGQDSVGAAVAFTLFLLTQNPECQDRCVLELATIFEDSNRAPTMTDLHEMRYMEMCIKEALRLYPSVPLIARKLGEEVRLAKHTLPAGSNVFICPYATHRLAHIYPDPEKFQPERFSPENSENRHPYAFLPFSAGPRYCIGNRFAIMEIKTIVSRLLRSYQLLPVTGKTTIAATFRITLRASGGLWVRLKERDHPLIAH

SEQ ID NO: 13894 - DNA, 11021 bp, DROSOPHILA
ttaggtacctattattattttttttttattagcatataccttaagatttgctttaaattcgaattttgattttactacgccttcactgcctgcttcatcagctgcctcggattcggactcgtattcgaatatggatacaaatacgagtccggatacggatttggatttagtttagattccgttctcagttttgtggaacatgaaacgccatcagtctctccataccaagcagcctttggttccagatcagcagatctttcgatttgtttagctggaacacaaatcgcttttgatgcatctttggatacgtttcatgatcccaccttagtatgggtgtacgtgtgctcggcattcccccgttaattccccggctagatcataaaaaattgtttatgaaaggcccgagcccgggaacataatcgatcatcgatcagcccattttgcagttggaaacttttgcacttttcgcttggaacaacaatcaagtaatatttttgtgggcaacaatttataaatataaagatttgtgtacacgaccgatcttcaccggactcgtcaccggctccttctttctccccctcatttcgctctaaaacttgagatcatttggttgcgagaatcgattgcatcttgactgggtctggactgcgatcgccaaacttttttccgggagtcaagtgatcttgatagcggattaagccatctggatcgtaatcgtggtagtgtagagtgtttacttattcgcgatcttcgttccactcactcatctgcaatgggaaagagcaaaaagatgtggattgtttagtaaaagtgaaatgattaatgtatttaataagatggtcattaggggcataggaacaattatctatagggaagtatctatagtgtctccaaaatctataaactactgataatataacttgttaaaagatgtagaaatcatcgtaaagaaaaagtgccataagaaataagaagagttggtaaaagcaaactaagggatttatgaataggaatgaaaaggataggacgggatgggtgatattggaagacttacatactttacggcacgatttctgaaggtttcttgctccatatcgcggattttatgagttagcatgtgttgcttcaggttgccctggaaaataaacgaaaaaaaaaggaaatttcccatcagttttctggtttaaatttcgttttaagtgtaggcaccgttagaaaaccccccaataaattcagaatagaagtaactatagctcaccttggtcgtaaagccgcgatcacagatgctgcacttgaatggccgctctttggtgtggctcctgtagtggatctccagcgccgagtggcaggggaatgtcttgtagcagatgccgcaggtggtgctgccgcgaacaccgctgagtgccagtgggttgaatggagccgccggcattacggactgggcgatctggttcatcgcattgcacatgttctgggtggtggcgggggggaagagcggcaggttggggaacatgccgaagggcgggcgggcgcccatcaacggattgggcggcggtcccgctcccggtccgccttcctgccgctgatcgcgcgcttgcggcggtgtttgtcgctgggccgcggctgctgcggccgctgctgcagcagctgctgcggccttttgctgcgcttcagctgcctcgcgacgcagttgctcctggtgctgatgcagtgcagccatttgctggtgatgatggtgctgcgcagctgctgccgctgccactgccgcctgttgttgcatcaagtgctgatgctgctgctgcaaatggtgttgcagtccgggaggcaagcagtcaatgcccacggtgggcggcaggggtgaggtcagtatgttggcggaggcgtggctagaaccactgggactcctaggcaagctgggcggactgactggcttctcctttggcaggggagaacgcgaactggaactcgatgtgggggcagcacggggcgtcaagtccagggctccctgagaagcctctgaacgagcgggcgaagagctgcgcttgataacctgggatgatgcatgtacgctgggcgaggtgggcgcagaggtggagcccaccgaatggccatgactcgaggcggaggaacgcggtcttacggggttcgtgttaaccacaccggtggcatcaattctcagcttttgctcgaacaacagggacttgaagtcatcaccagagcgcgatctgtcgccctcctgctcgagattactattcgagaggtgctccgacgacacatcatcgtcgtagtcctcgccgcagtccatattatcatccatatcgccctgcgacgactccgatcccaaggcgccattgtgggcaccatgattcggacccggaggaccacctggaccgccgggaagagcaccgaaatggaaggcagccgctgcgaagggattcataaagtgaccgggcatcatcgaaggtggcgggtccctgatctcggccgcctggatttgctccggcgtcagatcagtgggctcacccgtatgcaatcggatgtgctgctgcaggaccagggcattcgagtacttcttgtggcaaacggggcactggtggaagtttctcatcggcggacgaatcttgtgcacagccatgtgggtctttaggttgcccttggtggtgaatgccctgccgcagatcctgcacttgaatgggcgctcaccggtgtgggttcggtagtgcatctggagggcactcttgcaggataacacccgatcacagaccacacactgattgggatcgctaatcttcttgttcttcatcagctccttgagcttcatggtctcacaggtgttcgaaacctcgatgaagttctcccacgagttatcgttgctgtgcgggcggggcagtagtgcggccatctcgtgcttgatggggttaaagaacggcgatctggccatgtggtgcgggtggtggtgcggtggtggtggaacacccggtggaagtgctccgccagcgggcgatcttactggagagtggtgttcgggtgatagcatcttggcggtggtaaagttaagggggaaacgctcagcgaagaaatcttcgcggggtggcaattgccccggtgtgggcaggtgatccaggtgggattgcgagcccggcgaagattgcggatgcataagtgcggccggttggatgggctgcaccactggtggatagcccatgtggctgtgacggtggtggtgcggggagcggtgctctgatgaaggagagggtgtccttcgtggctctatgcgatggtcctcctgtttaacctgttcctgctcctccacacgctcctccttgatgcgcacctccaggggcagcggttccggctcgggctctgagcactctgccatctcctgttcatgctcctcccgctggtccttctcttcgacgggttcgttcttaacctgcggctcatcctcatccaattgaggcgatggctttctcagatccgtgggcaactcctgagggaagtattggtgcggcgcagcggctccaagacttttaaggatttccataggcgggcgatagagattctgaaggccagggaaggcgggcggaaaggatgccggagcagagcccaacgggggcggggcgggggaatgattgggagagctatccgtgggcgacatttgatccagcagcggcggatgaaacttgtccatgtgctccggaatgggcgtggcattcatgggcacatgggggaacttttgggcatgccgctgaaagtgaaccttaaggttgcccttggtggtgaaccgactgccgcacacattgcacttaaatggccgctcgccagtatgcgatcttatgtggatctggagcgccgagtccgagccaaagaccttcccgcagtacctgcagcggtgcttgaagaacggctcattgcgaccctttccctcacccgatttctcaccgaaggcaaagtcgtcagccatgctgttggccaggattccctgcgacgcagagtccagcacctcctgggcacgtttctggagcagatccagggaattcggctcgggcagatcatcatggttggtgataatgctggaggccagatcggaaccgaagggcagtggtgtgttctccatttcctttaacttggccagcgcatcctgcgccgtatctgctttgtgtgtgttatccaaactcggtctacgatttggctgggattcgtgatcatgctcacgtcttcgcttcagagattcagctggagaaccggaggactctcgcagcggaacaccagcatttattagatgctgacgcgctttagcctccgccattctggcctccgccttctggcgcagttccatatcggcgatgcgctcctcctcctcataggtatctgtttcctgttcctgatcttgctcctgatccgcatcctcctcggtatcctcttcctgtttcgcctgattgagcgccagctgcgactggagctgttggatcagctggatctggaagagctgctgttgctgcagattgaagagggtttgctgaaggaaggccaactgcttcatggcagcctcattgtcggctccattggaaccattcgcaatggtcttggccgcaaactgggcaatggccatttgcatattctggatggcctccagggtgaccggagctcccgctccgcccggcagagttacctcagtcgagggcaccgcactgctgggtgcctcatcgggcttctccacatccacctccacgtccttctccttctccttctccggtgtcctctcggtggccgcctcctcggcactggcctccgccactggggaactcggcatggagccactggcattcggttcccgctcctcggaactgggctttgtcatcgccactctgttgttgttatcctcaacgggctctatctctgatttcgcctcggatttgatatcgttctcgagttggtggtctggtgtgctttgctctggtatgctctgctctgaagtgctctgctcctcgggctgctcctcctccggctcgggacttcggctgggactggccgtagtggttgccgtggtcagtggcgagcagccaccgttctcctcctgatcgctaccgatgtctgaaaaaacagaaaacaacattctcaaattatttaggatacgagttaagtaagcgcaattcacagcctaactatattagtaatattgagcgaagctgtatttttgacactcaaataaaaagtttataagatttatgattatgattttgatttgctagcaaaacactctttctaactgcacatgattgaaataaatgtcttaaagtcaataattaatgtaataattccagctaatatctaatcgccaagttgttcatgtggaataaattttcatgtttttcttcgcataccaaagatgctcatcggatgcagttgtagtgcaaccaaaatagtcagaagctggttgagattgctgcccatttcccgataactcaactacctgttaactgccccctgccgcccgctttttacccccttccccccgcgttgcatatgacttaatcgccggcaattgttcattgcaatgcgttaaagttgcagctagttgctgctgctgttgctgttgccgctgccaactgaatgcaattacacttcttgttgaagcatgtgttctctctccttttccctcagtcgcagctgtttttttgctttctgcccacaattagtctccaagtcgatcgctggcagttgcaattgttgctgttgctcgtgttgctgctgctgttggtgctgctgctgctgctggccgactgatgctcacttgttgccaggtgagctgtccaaaggggagaaagcagttgacagccgtttggcctggtccagtgcctctgactaattaatcgcggcgggcctaaaaagcaaaccaagtcaaagattggtccaccagcgacatcagcaacaccaaaagcaacagcaacagcattagcaatagcagcaacttttgccgcacacgcacataaaatataatttatgataagtcagagccaacgaactggggccacactcgttcgatatatataataaaacatatttctgcacaaatcaaacgagttgggcgagttttctgttgtctgtttctgttttcgtccacaaaagacacacagctacagactgaactacagctacagcttcagattccgattcagattcagattcagatacacggatggcgagtacaaaaaaaaagatatgcagatagagcgcgcctggtcactatcagcgccatttgcatatcgatcgcatttatattatttgtatgattacttttcggtacagaattcattttaaagttcttttttaaccgcctaacattcaattaaaaacgccatttggccggcctgcaattgcagttcaaaaacgaaaccgctcgactggaggagttatgattatgattgctgataagtgaagtgtattttaattaattgaaattaattataatgttgccataaacctttcaagcggcggcaacacgcaagccgaaaaacaaaaccacttccaattatgacgaacataaaattgtctcgaacatggttaagtcattttgcaattggtaataaaattgttaaatttacaataacaattaacgcagcttgtttattgtgttggtgttgccctgtaaagacagggagatattgctcctcgtctgaggccattgccttagcccccgattcgaattcgatttcgatgtggatttggatttggattttggtctttagtttgccgtgttttagttcctcggatcggaagcgtgggcgcccaaacaaaatatccaaacatttaactaagtctatatatataccgattgtaccgccgctctgccacctagtgtatgtgtgtgagtgtgtgtatacgagttggtggtgagccgtttaaagatttattttttgtctaccagaaacgagcgtattttgttccactgacaactagccaggttcattccgcccgtgctttctgtatttgtatctgccagataaataaatatgaaattgtgaaacgagacgaaattatatatttcccattgttgaggcacacaaaccgctcctatcctatataaattcaatcgtgcaagtttaaaggtggattaagtcaagccataaattcgcgccatgtctgttggctaaattcgaatgaattattcccgcttctcgtgcgcaactaaatcgaataaatccctcgttcaggaacgattgaagagttttttttttttgggggggggggggcgtgcctcctgcgcccttaaatactcataattgctaacccagcctgtccatcaactcattaaccaatgtcaactttttggcactttgtgtgttcaaatattttcaacaatatcgggatgcaaataaattgtgctttggtttatttctgctttcaacacattcattttttacttcagatggtgagagctggtaaagtaaattaattgaagtacatttatttctaggaatatgaaagtattggccaacgcagcaaaaaccattaaaatttatatctcgaattcattatacatctttaaaggaaattaaattttctgtattcataccaaaaaagtgctgttcttgtgattcgttattggtcatgaagaatgcaagacagatcgaaaaatactcggatttagatcatattttatcaatattatcattaggttattgatgattagtacttatcccaagtataccttctccacttttaggttaccttcccataaaatttcaatcaagtctgcggtattaatcttcatctataaaaagtttagctatcacgactttcttatataaaatatttaagttcatctgtgtcaatgacattttttctttctgtgttctgaactcgaagttcccttgggtccgtacctttacctcgacatttttcagttcattcctctagcactgacttttgcatacgcctcgactttagttctgggctgactttcaattattccatcatcatattcaatatgcaaatcgctgcgaaccaaccgtgagcccgctggcctgaggtgaaacgaatgttcagccaattggaaaatgtaaaatcaaaaacagaaaaaaaaagaaagacatgcgaataaactacataaagtatacacaaagtaagctaaaaaaagaaaaaaacagcgagtgtgtggcataattgaataatatatccaagtccggtctgatcggatttggctgccataggtcacaaaggggaaaagcgcagcaattgaattcgccatcagagttttaggtttttcatacatttttaataggaacagggaaaaaagtacaacaaaatcgcataaataaaaataattaaataattaatgccattaagttatgcgagcgcgacttcgattacaaagcaaaacgacacaaattgatgagcatttccatattcacagaattggctttgcactgaccacattgcatgttaaggtatatagtccatataaatcatatggaaataagcgccagctcactgcgagtctgctttgattttcatttttgcaatattaatttaatttattatcccgcactaatgagttaacatttattaatgctcgatgcagcaacaacaacacgtgaataaacagcttatatacctatgtatgtgccgtcatatgcggtgtataaataaaaatcgcgccaaacgaaatgatgaaaaatatccccatctttacgcacacaggaaaaagtgtttatgatttttttttaggtaattttcaaagcctaatgtgcactcacttgataaaggctgtgtaattgcggaattaaattgaaaatatactttatttcatttagacagggtaaagtaggaaagttagtaaaatttggcttaattttttttttaaatgccataaccaatatggcctcacttcccgtagtcgtaaaattcacttaatacatcagccttacaaatttcaataaatataattaagttcgctggaatgcaaatgtccgaatatcgaagctttcaaaatcaattaaagaaacacgcctgccgagaggcctccaaaaattaaacataacaccgcgtccaacttatttcagtgcctttcccaaagttatgtatttcttccatataaaatgagccgaagccatatttaaatcatatcgtttttaagttgctccattaaaacgaaatcgatttttgatttatcataaaaaacaagatcgcaaaaggggcgcggggaaattaaccaatagaagctgttaacgtttgaattaaatcaaatcagaaactggaaatgcaaaatcaaagaaatatggtttaaatgtatagatatgtccatataatcggggggaaaactggtgcatttctcaatttgaatataccattttttttagacatgataagccatgctcttttgaatttgtattaaattgcctacctacgatttctgcctctgatgccacaattattaatgtttttcaagaaatgttggtttccacttcggagtcttatcagtcaaatggaaaacggttgttaagaaaacttcagaaaacaataatgacaaattggtcaactaatcttaaatggttcagttatgcatacaaatgggtttcgtttggaaaatgtcgtttttaggttccgctgatgggaaaatactttctaatttgcggttttttgtttttttttttctagagaaatgacaaataggataacaaaatataaaaggcagccgccaagctgttggttaaaattttttgactcgacacgttttcaaaatatcaaatttttgtctattagaaatttcaattatgtcaaaaaacatttaagacattcctttcaaaaagttttttttatttcccagtgaatttcccagttttcttggcaaatagattttcagctcacctttgtcggcgctgcgagcgcgatccttcagctgtttgacaatgccatatttcactgtaccaaattgtatcattttattgatggtctcctggtgattatccttgaagtcactacgcatcgcacacagaacgttggacaggtgatttttcatcaagagaacttttagttagcacttttttgtgagtgtgtttttggtaaagattttcattaactcagcttgatcattgcactatgtttttttttggtttatttttgtgagggaaaaaataactaaattttagttacttgtagcacttttgtgttttgccgtcggcagtgggaaacgcgtagtaccgctggcctttgcgcgtgtttagctaatttatcgtatctagctgttggccaaaaactatagctgaccgttgattgtcatcgtaagtggtaatttttgcggcacttgggggaaatatcttgtgtaaatcgatggaaaactcgccaaaaacagaactgagtgcgcgttacgcatacgcaacgtgttacgagtgcggcactgagagaaatcgagtgctcgctgcgaacgttcagcaacgcgcgtccaaacaagagtgacacaaacaataacagccgctacgaataacagccgccagaagtcgtcgggcgctcggctttgttcggctgccttcgtgagcaaccggtttgcgtacgtgtgtgtgtgtgtgttattacatcctgacaatcactatcactcagccaacccaccttgtgctcactcacacacgcatgtacgctctcccgctcgcatttcatattatttttcatatgcgcctctcgctcgctctcatcataatttttattaaattgctgttactgttactcttgccggcccgctcactccctggtgctttttttccttctacttttgcctcgggatgctcagtcgcagtcgctgtttttacctgagagacgtttatgaaacttgttcggcgaattatgagctgctcttcattactccctctctctctttctctcgggccatttcgtgaatgagaacatacaaagaagaagcagcgagacttccttccgccttttgcggctcacctttgcgccattgttgttgtaatgccccatctcgctcgctctctcgattaataatttatcataatttatgggag

SEQ ID NO: 13895 - DNA, 4122 bp, DROSOPHILA
atgaaaaatcacctgtccaacgttctgtgtgcgatgcgtagtgacttcaaggataatcaccaggagaccatcaataaaatgatacaatttggtacagtgaaatatggcattgtcaaacagctgaaggatcgcgctcgcagcgccgacaaagacatcggtagcgatcaggaggagaacggtggctgctcgccactgaccacggcaaccactacggccagtcccagccgaagtcccgagccggaggaggagcagcccgaggagcagagcacttcagagcagagcataccagagcaaagcacaccagaccaccaactcgagaacgatatcaaatccgaggcgaaatcagagatagagcccgttgaggataacaacaacagagtggcgatgacaaagcccagttccgaggagcgggaaccgaatgccagtggctccatgccgagttccccagtggcggaggccagtgccgaggaggcggccaccgagaggacaccggagaaggagaaggagaaggacgtggaggtggatgtggagaagcccgatgaggcacccagcagtgcggtgccctcgactgaggtaactctgccgggcggagcgggagctccggtcaccctggaggccatccagaatatgcaaatggccattgcccagtttgcggccaagaccattgcgaatggttccaatggagccgacaatgaggctgccatgaagcagttggccttccttcagcaaaccctcttcaatctgcagcaacagcagctcttccagatccagctgatccaacagctccagtcgcagctggcgctcaatcaggcgaaacaggaagaggataccgaggaggatgcggatcaggagcaagatcaggaacaggaaacagatacctatgaggaggaggagcgcatcgccgatatggaactgcgccagaaggcggaggccagaatggcggaggctaaagcgcgtcagcatctaataaatgctggtgttccgctgcgagagtcctccggttctccagctgaatctctgaagcgaagacgtgagcatgatcacgaatcccagccaaatcgtagaccgagtttggataacacacacaaagcagatacggcgcaggatgcgctggccaagttaaaggaaatggagaacacaccactgcccttcggttccgatctggcctccagcattatcaccaaccatgatgatctgcccgagccgaattccctggatctgctccagaaacgtgcccaggaggtgctggactctgcgtcgcagggaatcctggccaacagcatggctgacgactttgccttcggtgagaaatcgggtgagggaaagggtcgcaatgagccgttcttcaagcaccgctgcaggtactgcgggaaggtctttggctcggactcggcgctccagatccacataagatcgcatactggcgagcggccatttaagtgcaatgtgtgcggcagtcggttcaccaccaagggcaaccttaaggttcactttcagcggcatgcccaaaagttcccccatgtgcccatgaatgccacgcccattccggagcacatggacaagtttcatccgccgctgctggatcaaatgtcgcccacggatagctctcccaatcattcccccgccccgcccccgttgggctctgctccggcatcctttccgcccgccttccctggccttcagaatctctatcgcccgcctatggaaatccttaaaagtcttggagccgctgcgccgcaccaatacttccctcaggagttgcccacggatctgagaaagccatcgcctcaattggatgaggatgagccgcaggttaagaacgaacccgtcgaagagaaggaccagcgggaggagcatgaacaggagatggcagagtgctcagagcccgagccggaaccgctgcccctggaggtgcgcatcaaggaggagcgtgtggaggagcaggaacaggttaaacaggaggaccatcgcatagagccacgaaggacaccctctccttcatcagagcaccgctccccgcaccaccaccgtcacagccacatgggctatccaccagtggtgcagcccatccaaccggccgcacttatgcatccgcaatcttcgccgggctcgcaatcccacctggatcacctgcccacaccggggcaattgccaccccgcgaagatttcttcgctgagcgtttcccccttaactttaccaccgccaagatgctatcacccgaacaccactctccagtaagatcgcccgctggcggagcacttccaccgggtgttccaccaccaccgcaccaccacccgcaccacatggccagatcgccgttctttaaccccatcaagcacgagatggccgcactactgccccgcccgcacagcaacgataactcgtgggagaacttcatcgaggtttcgaacacctgtgagaccatgaagctcaaggagctgatgaagaacaagaagattagcgatcccaatcagtgtgtggtctgtgatcgggtgttatcctgcaagagtgccctccagatgcactaccgaacccacaccggtgagcgcccattcaagtgcaggatctgcggcagggcattcaccaccaagggcaacctaaagacccacatggctgtgcacaagattcgtccgccgatgagaaacttccaccagtgccccgtttgccacaagaagtactcgaatgccctggtcctgcagcagcacatccgattgcatacgggtgagcccactgatctgacgccggagcaaatccaggcggccgagatcagggacccgccaccttcgatgatgcccggtcactttatgaatcccttcgcagcggctgccttccatttcggtgctcttcccggcggtccaggtggtcctccgggtccgaatcatggtgcccacaatggcgccttgggatcggagtcgtcgcagggcgatatggatgataatatggactgcggcgaggactacgacgatgatgtgtcgtcggagcacctctcgaatagtaatctcgagcaggagggcgacagatcgcgctctggtgatgacttcaagtccctgttgttcgagcaaaagctgagaattgatgccaccggtgtggttaacacgaaccccgtaagaccgcgttcctccgcctcgagtcatggccattcggtgggctccacctctgcgcccacctcgcccagcgtacatgcatcatcccaggttatcaagcgcagctcttcgcccgctcgttcagaggcttctcagggagccctggacttgacgccccgtgctgcccccacatcgagttccagttcgcgttctcccctgccaaaggagaagccagtcagtccgcccagcttgcctaggagtcccagtggttctagccacgcctccgccaacatactgacctcacccctgccgcccaccgtgggcattgactgcttgcctcccggactgcaacaccatttgcagcagcagcatcagcacttgatgcaacaacaggcggcagtggcagcggcagcagctgcgcagcaccatcatcaccagcaaatggctgcactgcatcagcaccaggagcaactgcgtcgcgaggcagctgaagcgcagcaaaaggccgcagcagctgctgcagcagcggccgcagcagccgcggcccagcgacaaacaccgccgcaagcgcgcgatcagcggcaggaaggcggaccgggagcgggaccgccgcccaatccgttgatgggcgcccgcccgcccttcggcatgttccccaacctgccgctcttcccccccgccaccacccagaacatgtgcaatgcgatgaaccagatcgcccagtccgtaatgccggcggctccattcaacccactggcactcagcggtgttcgcggcagcaccacctgcggcatctgctacaagacattcccctgccactcggcgctggagatccactacaggagccacaccaaagagcggccattcaagtgcagcatctgtgatcgcggctttacgaccaagggcaacctgaagcaacacatgctaactcataaaatccgcgatatggagcaagaaaccttcagaaatcgtgccgtaaagtatgtaagtcttccaatatcacccatcccgtcctatccttttcattcctattcataa

SEQ ID NO: 13896 - protein, 1373 aa, DROSOPHILA
MKNHLSNVLCAMRSDFKDNHQETINKMIQFGTVKYGIVKQLKDRARSADKDIGSDQEENGGCSPLTTATTTASPSRSPEPEEEQPEEQSTSEQSIPEQSTPDHQLENDIKSEAKSEIEPVEDNNNRVAMTKPSSEEREPNASGSMPSSPVAEASAEEAATERTPEKEKEKDVEVDVEKPDEAPSSAVPSTEVTLPGGAGAPVTLEAIQNMQMAIAQFAAKTIANGSNGADNEAAMKQLAFLQQTLFNLQQQQLFQIQLIQQLQSQLALNQAKQEEDTEEDADQEQDQEQETDTYEEEERIADMELRQKAEARMAEAKARQHLINAGVPLRESSGSPAESLKRRREHDHESQPNRRPSLDNTHKADTAQDALAKLKEMENTPLPFGSDLASSIITNHDDLPEPNSLDLLQKRAQEVLDSASQGILANSMADDFAFGEKSGEGKGRNEPFFKHRCRYCGKVFGSDSALQIHIRSHTGERPFKCNVCGSRFTTKGNLKVHFQRHAQKFPHVPMNATPIPEHMDKFHPPLLDQMSPTDSSPNHSPAPPPLGSAPASFPPAFPGLQNLYRPPMEILKSLGAAAPHQYFPQELPTDLRKPSPQLDEDEPQVKNEPVEEKDQREEHEQEMAECSEPEPEPLPLEVRIKEERVEEQEQVKQEDHRIEPRRTPSPSSEHRSPHHHRHSHMGYPPVVQPIQPAALMHPQSSPGSQSHLDHLPTPGQLPPREDFFAERFPLNFTTAKMLSPEHHSPVRSPAGGALPPGVPPPPHHHPHHMARSPFFNPIKHEMAALLPRPHSNDNSWENFIEVSNTCETMKLKELMKNKKISDPNQCVVCDRVLSCKSALQMHYRTHTGERPFKCRICGRAFTTKGNLKTHMAVHKIRPPMRNFHQCPVCHKKYSNALVLQQHIRLHTGEPTDLTPEQIQAAEIRDPPPSMMPGHFMNPFAAAAFHFGALPGGPGGPPGPNHGAHNGALGSESSQGDMDDNMDCGEDYDDDVSSEHLSNSNLEQEGDRSRSGDDFKSLLFEQKLRIDATGVVNTNPVRPRSSASSHGHSVGSTSAPTSPSVHASSQVIKRSSSPARSEASQGALDLTPRAAPTSSSSSRSPLPKEKPVSPPSLPRSPSGSSHASANILTSPLPPTVGIDCLPPGLQHHLQQQHQHLMQQQAAVAAAAAAQHHHHQQMAALHQHQEQLRREAAEAQQKAAAAAAAAAAAAAAQRQTPPQARDQRQEGGPGAGPPPNPLMGARPPFGMFPNLPLFPPATTQNMCNAMNQIAQSVMPAAPFNPLALSGVRGSTTCGICYKTFPCHSALEIHYRSHTKERPFKCSICDRGFTTKGNLKQHMLTHKIRDMEQETFRNRAVKYVSLPISPIPSYPFHSYS

SEQ ID NO: 13897 - DNA, 4114 bp, DROSOPHILA
attatattagcaaagtccattttgtgtgggtatttctagaggcaaacaatgacatatagtcataaggcaaacacaattatacaaatagtttaataaagcgtacatatgcatttcatttcttttgttgaaaaataaaactctattatatttttaatttctaatttttaaatgacactcgtaactatgactatgctttttatggtaaattctctatcttctcactgcattagtcacgctgactataacaaaaggaaggcaaattagatttccttcttgcttaattcgaattttcccggtccaagcccagtttatatgtgcatcgtggtcatcccactccaagatactcatctcctgacgtcacagtcgaaattcttatcggggaactaacttggcatgcgaaacacgcacaaattcaaattaattgcaacgcttcgcctgcaaatcccagtctcataaaccgaagattactatgcttacgcatccgtggagcaaaatgcagtggccaggacaacggctttaaagttgcggcttaaagcagatccccgtgggttggacagcacaatattcgatggtggccataaatgattataactacccataaataggtgatggttgccggccactgatcataaagccgacaacttttacagcataattaagagctgataaagttatataatagataaacatattggggaaactcggtgggctcccatttccattcccacatccgctgctaccgtccaacgtttgccaagtgcacacatcgtgcttcggtcggtgtcggtggcgtatgagtgatgtttgagcacgcccaccaagtatcctgcaaggagcgcaacatgtggtcccacgtcccccatcaccaagttttgtgcgaatcctgcgtgtatattgccgtcagccaatcagaggccaccgcggcatctgcgctcgtcctcggcggaagtaaataaaagcggatgtcctggctggacaggacatcattcgagtgcttgcgttcaacaagtccagcaaacagagcagcagctgaaccccggtgttaacaactaacaagtttgtccattaacttctttgtggaagcaccgatacctcaaagccctcatcaggtgggtacttgtgtcttgagatgtgcagagtgatagatactttagaggaataactgaatacatataaagtgaatccttgaggtttcagtcgaaaggtgtgaaagataaagcctgtattaaaagtgtgtacatttgtgaaaatatggtactatcataatgatggctttatacttaattattcaattatccaacgaatatcaccagcttgcctggtcttgtaagaatgattagaaaatttggtattttggtatttaaaagaatggtagaattgcgctaatataaagtgtaaagctatttaaaaatagtccaaaaacgtaaggtagatgaagtggaaagtattgtagtttttaaaaacgctatggtatgtgaggaagatttcctataaatatgtaatttaacatttaaagaacttattagttttgaccatgagtgatagacatttcaactaagtcgcaatagatggtttcttgtgagtaaacagacatggcaattgatttgcatacgtgcaccttgattgagccctaaacaagcatcagtagtttggatccttggaacgtgtcctatgtgcaactcccgcccggcatctactcctccctccagacttccggtgctggtttttctaagctaaacagatgtgggaacaacacgttcgcacaggtgtttgcatgccgactgcaacacggggcgtatgagtgctgcctccacttccatcatttcgagcgtaatcatcatcccgaggcgttgacgcagaacaaattgccttagcctccgccattttcagctaatagaaacaaattgtgtgtcgcgtaaacgtattagggtaccattaagacgcctgcttggatgcgatttaaaatggtaacaccgccgctagccagaaggccaagtacaactccatttatgcataatactttgccagggcaacgccatcatcagcgaatggcaatcaggcacgtagcattaagatcattacacttaatcaaaatcagtggggttggatggacatggggcatgtagcatggagcgaggagcttggcttagtcgccctccagccaggatgtccttgccgcgcaacctttgccggcgataatcaaataagctcgacaccagctttcgttgtcaatcatgtttcataacccacttgcagcatgtccttcgctcagttctttgtcgcctgctgcctggccatcgtcctcctggccgtgtccaacacacgggccgcagttcagggtccacctctatgccagtctggcatcgtcgaggagatgccgccgcacatccggaaggtgtgccaggccctggagaactccgatcaactgacgtcggcgctgaagtcctacatcaacaacgaggcatccggtgagtgaatcaggaccagacaattacctcaagattacttatcaattactatgcttgctccagctttggtggccaactctgatgacctgttgaagaactacaacaagcgaacggatgtcgatcacgtcttcctgcgtttcggaaaacgtcgttaaggacatttttttgcaaggacatcccgaacaccacttggtcccgacatgagacaacgacactggaccctgaccacaagcggcggaatcgtttctgttcacccaaaaagcacaacactattttgacgtcttcagcataattatgtaaacgtaatcgatggaaactcagaactatactcaattggaagctctctagttcattaaatatccaatgtccaatgtttctatgcaacaaaaaaaaaatcgaatacatatttgtaaatactcaaagaccctcgaaatgttctgaaagttaaacccttggttttgatttaattcgtactctttatttgctgagtgttataaagaactaataatacgtatttcaacgatgtttaaatatctcacacatatttccctagcatgaagcactattattaaataaccaacaaatgttttcaaatccaaacactattttccgttgtatactttaataaagacaaacttttcctctcaatttgtgaatgcatagcaaaatgcaattgaaatggtttacatttaataggaaagttgggctactctttgaacaacattcaacaacaatgattttggcgagttagattgtgaacttcatacataattaacttttttgctcctttctaacaagtttatatagtcaatcaccatggaataaacaataaaaaaaggtacgaaatttttttttacattttaatttattactgttgacggtttcttatacgttaaaacattctaataaagtcaattttactaaatggattattgacgctattgcattttgttgtacgtcatttgcgtaatctttgaaaaatatttccgaattttattcgtatccttgaaatataatttcgtatgagaatggttaatgggttccatagtacgcagatattttcgctccattgggttttttgattttcaatttttttgcttttgctgaaaaagttaaaagttaccatttaattgcatgtttttattaaattattttgccattcttaaaggttttatttaaattaataaaaaattaaacaaataacagaatattctaaatcaaatggacagaaaaacgtgaaataatgcagttattattcataaaatgtctagacttgcaaattaaaaattgtatgacttttaaaaattagtttctttgtctgattctcattacatattgccttttgctcattggttaattttctgatattttgtaatatttttcgtttgtattccatttttctgggatgatgtgactttgttttaagtcatttttcttgtggcaaaatggttagtttaatatttatatttattttcaactaggaaattaaagtctcttaggcatttcattgtcatttcaattcgattctatataaatttattatataaatttattgattttatatttagtttctttggatctatggagattgtatctcgtgaagtatcagtctttttaataaattttcatttgcatatcttgtttat

SEQ ID NO: 13898 - DNA, 904 bp, DROSOPHILA
ttcaacaagtccagcaaacagagcagcagctgaaccccggtgttaacaactaacaagtttgtccattaacttctttgtggaagcaccgatacctcaaagccctcatcagcatgtccttcgctcagttctttgtcgcctgctgcctggccatcgtcctcctggccgtgtccaacacacgggccgcagttcagggtccacctctatgccagtctggcatcgtcgaggagatgccgccgcacatccggaaggtgtgccaggccctggagaactccgatcaactgacgtcggcgctgaagtcctacatcaacaacgaggcatccgctttggtggccaactctgatgacctgttgaagaactacaacaagcgaacggatgtcgatcacgtcttcctgcgtttcggaaaacgtcgttaaggacatttttttgcaaggacatcccgaacaccacttggtcccgacatgagacaacgacactggaccctgaccacaagcggcggaatcgtttctgttcacccaaaaagcacaacactattttgacgtcttcagcataattatgtaaacgtaatcgatggaaactcagaactatactcaattggaagctctctagttcattaaatatccaatgtccaatgtttctatgcaacaaaaaaaaaatcgaatacatatttgtaaatactcaaagaccctcgaaatgttctgaaagttaaacccttggttttgatttaattcgtactctttatttgctgagtgttataaagaactaataatacgtatttcaacgatgtttaaatatctcacacatatttccctagcatgaagcactattattaaataaccaacaaatgttttcaaatccaaacactattttccgttgtatactttaataaagacaaacttttcctctc

SEQ ID NO: 13899 - protein, 100 aa, DROSOPHILA
MSFAQFFVACCLAIVLLAVSNTRAAVQGPPLCQSGIVEEMPPHIRKVCQALENSDQLTSALKSYINNEASALVANSDDLLKNYNKRTDVDHVFLRFGKRR

SEQ ID NO: 13900 - DNA, 13057 bp, DROSOPHILA
aacaccatccgtcgcataatcaaacccaacagcaacaggaagcgacacaacagcaacatctgcaatcccagccaggaaatcgatccagtaccatttcgcgcagcgatcacctgccgcttattgactttgagcatcctattgtggcggctgagctcccagatcattccgccttgggcagcattcggcaggattatcgatataggaaaacacctgcggatgagcactatcgttatccgaagagcgccaatatcgaacagatggcagcggaggcccagaccgcctcgcttttccgctttccggttgaggatctgatacagttccaggtggacgatgctctctaaccactaactacgctagttgtacttagagtaagttaaggctagctgttccgcattgcaaggacttaccttgaataattaaatgaaatatagctaaattgaatgttttgtatttataatattattaataaaggtatctcaatttctattaacagacgcgattcttattattcaaatcatgttttggcattttatcagaattaatttattcggtagtgggttgataaaaaatgaatagattttgctaatatgtagattgatagcgcataatttaatgtagttcaagttgtacaaattcttaaggcttatttttaatcggatcatgaagttaatttacatctctgtatgtaatttttattacaaatgttgtagtttgcttcatattaaattaaattaaagcagggctatggattgtaaataggaacccctttaaaaggtaggcaataatgaatcccgaaaatacttttttcgtgagcccaaaagtgggcttcaaacttcactgccagttttcattgccaattccattgcgcgtgcgcgaaacccgcagcaaaacagaaccggcaagagccgaaaaccagtattccgagccgagtctttgtgagcgcctctcattggaaagaacgggcagcaacaggtaagtccggccagaaggtaagcgagcgtcgcttcgtacagacgtggtcgcgcttgtaactcgactcaaatcggcatccgcaagatactttagagcaatccgtagcagcaaaaacaacaagagcagcaaggcgcaagatcaagtttcggaccctagcgtcatccgttgtgcggtttcgagtgtgtgtgttatttgcgtgcgttggccaaaaccgaaaatataaccgtggaatagttgaccagaaatggtcattccgcattagtgttaattatagtttatttgcccgaactgcttgccctaagccgaccgcccaaattgcatttacttcctgctttttcgccacgctctctccttcttcctctccgccatttcggtctccatttgctgttcttttttggccaaaacaagaacccatagatacctactatactatatacctgaaccagtcggctgcctgtgtttatttgttttagccgcttttgcacattcccctgcttttgcttgcgatccgtggtgtgtggtgttggtaccaaaagaaagccatcatcgccacatttgccaatcgccgagaagtgcccaatgatcggaactggcgaacagcagccgcctcatcatcatgtgccacttttcacatgtgcataaagtgaaatcttctgttcgctactaaatttcttttagatctcgtcgaaacatcgctttttggtttcatatacccacattcgctttgcacatcatttgtggaatgcgatcgagagctggcaaaagttcaaacggcaaggctaagataagcaattctgcaagatcagctcaaactaagcctcagcccaatcccatattcatttgagccaacccgcgacaaggccaactgggggcggtgcagcggctagcattgaaaactcattgtttcgagcccaataaataaccagagtttgttttgcatttcggccagtccaagaacgcgagcggagcggagtgagagagcaaagagattgaattataccgaaactgtgtcgttctacatgtgccaaatactcgagtaaacaacatcgaaactcggacctaacggatacggatacctaacggcactgatattagcaacggcaacatgttgccgctgctgttgccactttttctgagcctgaccgccggccagctggtcaaccaaccgccgcagttcgtccccggaacgggcgacatgtcccgatttagcctctcggaaaacacacccgtcggcagtcccgtcttccagctgaaaggtgagttgcaaccaggtcgcttttttttttttttttttaattttggtgaggggagttctggccaagattgcatgctcgacatcttatcaacatgtgtagtacggggccgtcacgtttcataattttatgcggaattgcttcacggctttcattgcatcgcaaaagacaatgaacacccatagcccaattcccacgcagtttgtggcaatgcctttcactgccagtagttcgttttgttttggccaaaataaagaaagagatggatcaaaacctggcctagtgtgggaagttggaattaatagtaactacatatatgggctatttttatgggaatttaaaaagccacatgcatctaatcttagtacttatatacaaattaatcctaatagaacagacacttactcagatttgagattatatctattatagaataagataagctgcaaagaatatcgctaagatggtctactttcgtacaagaaaactatgtagataaagtaagctactgactcagtcgatcttggtctaattaacaaataacctattatctgattcatctgttatctttaagagaacaattgtttaatagttcactaccaatctctaaataaatcaacttgattttggcacaatcaaatctgcaaaatttaataaagttaaatactaaacaaaaatgacatctcatacgagataagtctttaataatataactaatgttcaattaaattttcataagaatactaaaaataccttttattgtatttaaaaagtgccgctcatttttataatttttgattgtgataaaattaattgcctcttaaatgacctaataattttatccattaagatcaagtaagattggcatttctgattttgatgttggttaaattaacaagcataattaaaataacgtttagtaattttctttctgtctttcgttactttcacttaaatcatttttggccaaataggctattcagaagggtatttccccttcggttcaagcaagcattcatccaaaactggctctaataattttgtaatttagcttttgatcataactcaaattaccagtggtgactttcatttcttggaccgcattggtctgggtgggccacctacttcgggtcaaccttgtgcggagtattggatttttgtggtcgccgcacgttttcagcaccctcgtatctcgcattcgtcagatatataagcatatattcgcgattgcataatgccacttggcttaaaatatgcagtgcggatctgcaagaatgctcgataagccaacaagatattcatgtttttattgtttatttttttcattttctgtttctggtttctagttttttttttttttttgaagttagctcgcccgagaatgcagtttgctaatcaattgacaaacaaaaacaaacaaagacagccaaagacatatgtatctgataggtgagcaggcggaaatgcatttgaacacgtttgtgcgtagcaccatcgataagtgttagtccacgataatgaagattgcggtaagctaatggcgcccattagatagagaatgaaaatagcacttttactccgaacgagagtggcaatcaatcgagagtcgatttcctatatctctggcaatactaagacttaataaacttcgggcgggccagccactcctcctgaattatgttatcgaacaggcagatctagtttgcacctgcccctcaagcaaatgacaccctaacacagaggcccagttaagagattgagatacatttgcagctgcggcggcttcgggcctgcaatttgatgctgctccacggcaacttcataatcagatggggcattgtcttaactggttgccgagcgtgtgccaaatcgccttggatgatgctcgcccagtgactccgcctgcaaatgtaaccgatgccgagactcggatgcagatggagactggttagttttgcaagcggtatccgtgagatacgaaacacgtttgctctggctgggtgcgttggaaatcaagagtgtcgcggaaaacctctagtagacaccgaaaaaagtaaacggaaaaactgaccaggccaaggaaattgcttggcctaaacggtgagccgggaaactgagctgaatccatatcgggcacaacataatccgagattgccagacaataccgagtgtcaatcgttgcataagccaaaaatccgctgggattgcctcctggtgtcgaaatttgaggatttaattgcacggaatgctgcagatcagttagccgcttgagttttcctttcatacccacttaattacacattttaccataccaaaaacactgagtaaaacgaatgttggcacatggcgggcgtttctttcgcttctttcggcttatccactgttccatgtgtaataataaccaaaatattaacaaatacgctccgtcaagcatgaaatcacaaattatttctgccgcatcaacagcaacaatggtaaccacaacaattacatcctccccctccatgaaagcatccatgctgggcgaagtgaaaagtagcagagcttttccacatctcgcacgtacccgcaattacagtgctcattcagcttttccactttccccccaattgcctaaaaaacacaccgtatgtacatacagacacatacttgaatcgaacatgagaattcataaagagaaaacgagccagaattgagaagtggagggggttgatctagagataccctatgtatctaagggatcggttgcattttgtaactttagatccattttgcggatatcagatgtttatcgttttgtcatttataaagtgggttctcaataatgaatgataaaattcgaaaataatattgatagaattaaagtattgtaagtaagtattgcatatcttaaagtctttatatctaagcccagttaattagttcacagaccccacgactacgtggtatgagtaagtgtgagctggaaaaaatgattatgtacattgaaaagttaaaatggtcactcacgcgccaatgctgggggatcgagtttgggattgggatagagcaataaagttcggggtacttgggggcagggaaacgcttgtggtatgtatgttttttatttttggttatatggaggagcggctgtgcctgtttgcttcccgctttgggccgtgtcttatttttttttttttttgtagtcgtgctgcaattgtcggtgtaccacaaacccgctcccaacgttgagttctccccaagcaaacttgaaaaatctgtctgccaaaagcggttttcccgaccgaccgtttattggtctctgttttcttttgtaagctccccgagttcatttgttttctttcttttcttttctccatgattgctttggtagaatttctaaagtaatttcgtgttgcccccgagctggaatttttcggctacccgaaccaaatacttgtagatatatttcctgttattagactctgtgggcatagagaaagagaaattaccggggaatgacacaatccacttagggctagacccacaactaactagttgccccagttccgacgggccggaaaactgcagtcgactggaaaagtcggcggcgcaggaggttgtgggaaccgaattagcatttttcacacgcttttacataaaccgacggcggcggctccactgaacgaattcccgaagtgacagcctatgacgctggctcggattacctgtaattaaagcagcaagcgtgtcaaacaccgggactcaaccgtcgccaactaatttgttgcactttgccggctgtccaaaacacgcgtcccacacacaatcagaaaatgtattgatcgttcgttggatcattatgtggactaaatcttattttttcacatagcatatcattgattatgtatcttaatgaatagagtatccgtatggttatcttattttgctactgatttattactttgtgtaagaaaagtttttcccgatctataaacgtcattttaaaacagtgtaacattaaagtcaagctattatttggttattttcttattataagtttataatataataagtttatattcttataatataagtttcttcattcttgaacttcttttaatgataattaaaatctttatatatgtatcttttacaggaactgacccggaaggaggtcgcctaaagtacagtatcagcggacccgttttctctgtggatcgggaaacgggagtggtgcgcctgcgccaggagctggatcgagagacccaggataccgtcgaggtgatcattagcatcacagacgaaggtatctacggaacagagcccaataccgtctcccaaaggcgagtgattcctgtaagggattacaatgacaaccagccgactttcctgggcagaccatacaccgccagtgttagcgaatccttgcccgtgggttcggagctcagtgtggagccacccattgtggtcgtcgaccgggatgagggtatcaattctgaggttcagatgaagtgtcttgaggtacgttacatatttgtgaaatatatggtaagcccgtacatgtcttattttgtattcattgctactccaggaaaatgacatttgcgacatatttgaggtgcgggccgtgaaaatatctgatggaaactacacagcccgagtggcgctgaagcaacagctggatttcgaaagtcgtccatcgtacatcttgaccatatcggcctcggacagtgcattggataaccgcctctcttccctggccaccatttcgatcaatgtgatcgacatccaggatcaaccgccaatctttactaatgctccgtactccgcgacggtaccggaaaacactcccgccggagtgagcattctaacggtgaaggcagtagatggggatgtgggcataccaagggaaatattcctatctctggaagatgaacccttcgggcactttgagcttgtaccatttggagatcctcgagacggaactgcagtacttcaaaccacatcagagccactggatcgtgagaacgctgagatcctccaaaatggtggggtgtatgtgttttccatacgagccacagaacttatcgatggagctattcccgccgagcactcgcttacaagagtaaccatcgtggtcaccgatgtggacgatcaccagcccacctttagtgggccgcactttaatgtctccataacggagaatctggcaaatggaatgccattgccgggactctcgatcttcgtggatgatcgcgacatgggagagaacagtcgctatgagctttctttaagagatgtgttcaatgccgccagagtatttgaagtttctccgactgaatctcaaggccgaacaccagtggttgtcaaagtattgaatgctagtcgattggattacgatgttgtcgatcctgaccttcgaaaatttgagttcgatcttgtggcttccgtgaagggcgtggagaaggccaagactcgggtcgagatccatctgctggatgccaatgacaatgcacctgtgtttgaccaaggtacctatcgttttacggcagctgagaacctgcctgtggacgcgataatcggacacgtaaaggccactgatttggattccggtgaatttggacatgttcgctacgtactcaagggtttcggtgcggacaacttctatgtaaatccggaaaccggaggcgtttatctgctgaaacctctggactatgaaaagcaaagtagctacagcctgacagtggtggccatcgatggaggtcagcgggaggccaatgccaacttgttcgtcggggtcaccgatgtgaacgacaatcatccgaacttcgaaagcaaggaatatagtcgaactattcgggaaggtgcagccctttttgagccccagttctttgttcgtgcccacgatgcagatggtccttcccaaggaaatggacgggttaagtattccattgtgtccgagaacagcattgctggaaatgtattccggatcgagccggatacgggcgagattgtcattcagaaggcagcgcgatcaatggacacggagaggggtgaatacgaactggtcgtttcggctactgatttcggtgagttttttgcttattaattataaaaggaaataatcattaattatgaataatcttcataggcattcctcccttgtccaacaccactcgcgttttggtacgcgtcggcatttccggtaatcaacggcccatcttccgcggacacttccaaaatatggagaacctacccattataggcccgcccagctatcgagtctccattcctgagaatgccgctgcaggatcaaatgttacctccgtatctgcccacgatcccgatggtctggacagcctactccgttacaggattgtaggggccaatgacaactttgagattgatgagatgtgagtattacctagatgatcagtttcaatttattatcaattttcaatttattttgcagttctggtttaatcactgtatcgccacaagcccggatcgatcgcgactcaaacatgaacagctttgagatcatagtgaacgctgtggactccggaactcctatcccggaaacggccaccactacggtttatgttaatgtgaaggacatcaatgacgagcgtcccaagttcgagcagaacagctatgcgacgtacgtatccgagaggacagccgtgggtgagagtgtccttcgcgtgaaggcaatcgacaaggatcttaattcaaaattggagtacagcatggtgggtcctgttgctgccaccacaaaggcaggcgtaagcatagccaatcggagcaactaccgactgcaggaagcctttcgagtggacagtcaaagtggtgagatctttgtcaatggaacgcttcgtcacgatgtggccgccatcataatcttcaccgtcggtgtgcgagatctcaatgcagaggtggatcccgagggacaggtggacaccacagaagtaaccgtctacgtgcagtccttccaagataccaatccggtgtttaagaataccggctggactagctcaagacccgtaatcgatgtaaagatcaaggaggaaatgcccatcgatagtgcgctcttcattttgcaggcggaagatcctgtcaccagacagccgattaccagttttgagttgatagaacccaaacaggtggactatttccaagtggcagagcgaacaggagaggtgatactcaagaagcggctggactatgaagccttgggtgatactggtccggagtttgagctgcaagttcgcgctaacagtgccgatcgacaaagaagcactgtcagtcgagttaatatcaccgtggagaatgtgaatgacaatagtccacgcttcgagcggaactcctatcaagccaccatcatcgagaacaggcctcatccggagcgagtgatccgggtgagagctttggataaggatgcggttcttaacgcccgtgatgagcgtttgggctaccacaagatcatctactcactgcagggcgagcacgccatgctgttcgatattaacaatacaactggggaaataatcgtggccagcgggcagaccatcgatagggagcgaacaccaaggattcagctgcagatcaaggcggaggattctcctggccgtcccacggatgccaagcaaagtgtagtggaactgcagatagaggtactggatgtgaacgacaacgctccggagtttactcaaaagaaatatagcaccgtgattccggaaaacgcgcaaatcgactcgtttgttctccagctggaagccgtagatgcggatgagggtctgggtggcgaggtgcgctacgaattggttaacgagggtgaggccaatggacttttcaagatcgataccaagagtggtctgatatccacccgacgtaatcttaccggcaaaggccgcgcacatccatatgtactaattgttcgtgcccaggacaacggcaaccagatgcccaaacagcccaccttgtccacagacaccgatgtcaggatatatattggggatgtgagcgccaatgatggagtgccctactttttgtctcctcgggtgggacaaatggcgaatgtcacagaggtgagcatttgtttataagctttaaaggatttttaaataacctttactttactttacttcagaatgctgttactggagctccagtatttcaagtcattgccagcgatccggatgatgaaagcaccccatccggaaccattacttatcgcattttgccagatactccagatgccgaagcctttgtcatagatgctcactcaggattgataaccactaggcaatcgatggatcgggagacgaaggacatgtacaggattctgctggaagtgagtgacaatggacagcccaagcagtcggcgacgaggatccttcagattgccattctggatgtggatgaccacgaacctcgattcgcaagagaagctgtaagtgaaagaagcgtttcagaagaacattaagaataagaactgacaacaatggttttccttttaaaggacgcaggaccgttgagcatgtcggtaagagaagaggagccggctggcaccattgtcggtaacttcagcgctttggacgaggatctcggcgagaatgcggccattgattatgtgatcattgatggaaacaatgaacagttgtttacgatagagcgaaataacgaaagcctggccattcttaagaccaaaaaacctattgaccgagagcaggttgagtcctttactctgacgattaagtgtctgaaactgggtgaacctggctacaagttcattggagatccctatgatcgacaggatctttcacatttgcgaattaacgttcgagtattggacatcgacgacaacctcccgaaattcgagcagccagatcccactgtgggtatcaggatcaatgtgcctatcgacactgtggtgaccactttgaaagccagcgatgcggatgctgaggccccacccgttggtctttccattgagaacgtgacctttgtgccgcagttctataagcgaagtcgtagtctggccgttggaaatttacataatctcttcaccttgaacaatcgaactggggaactgagaactggaggttcattcgcggattatgtagatggttacttcttaatgcgggttatggccaacaattcagtacaacccaaacggcaagcccacagtaatctcaaggtgtttgtgatccgggacaagtcgctgcttaagttcgtcttcgcccgacctccaaacgagatccagcacaatatccgaccgttccaggagcagttgcagaaaaaactgaagcccctgggattagagttgcatgtcttggatacacaggtcttcaccaggcccgacatgagtctggacttcactgccaccagctcctgcttccagatgttcaagaatggagctgccttatccttcaacgagatgcagaagctgatgaactcacagcagctgcgacaggaactgatagatatatacgccgcctatggggtcagtgaggtagaatcctgctcggtgagaaggactcatgcagcagctatttttgcgggaatgctgacctcggcgggagcgtggctggttttcctggccgccctcataggtctggctgccttggtttccctgtgcacagcctgttgtttgaagaaaaagtaagtttgacacggccttgaccttttccatattcttaactcattattaaccttttccaggctaaagcggcacagtaagcggagtcttcaggcaagtttacgcactcccacggagcacacagccacctcgtacagttactccatgcccgccgtgctctactccgaacccatctacgggcccttgtagccgcagctcatcttctgcacgggaaggtccaggttcaaccactgaccaccaaccaacctagtagactagtggccaagactcaagccccctttgcaccagcggagatccccatatctcccaggatctccgctcggcaattgcgaaccgggacttctttctggcagagattggtagacgatagaatgccaaatcagtccatataccataagcttaagcatactatgcgcgtgatctagaatgtacgtgtagcaccaattagcctctaggatagtgtttacatataaagtaatgtataaagcgtagggatttttaaattgaaatggttagcctaagtcgagtcagttctttgtgtcatttgtgctgaagtgctggtttccctggcgaatttagctggttttcatttggcactttggcaggtctggaatgcatttattttttatatatttatcttatcgtctatttgcctataacatgccgaacaagtgcagtataaacatcgatccaaacgacgtccaattccagctccacaatccaatcctcgaccaggagtccaagtcaggccatgtgcgtgtcgaccgaaaatgagtctcccgttttcaaacagaatgcatatgctttcgctattaagtaaatatatttatatacgactaagtagtttgtccaatgtgaacatgtgtgcaaataaattctattaactacaaaagtgcgaaaaaacgcgaccttttactcattactcgcaacgctttgccgcgtaaagtgatatgcaaatgaatcgtatccccactaatggccttaataccggaaggtgtggacataaaatgcggctatgatcagtagcgatggaatttattgattatatatctgcattatattgaaccttaattgagctgatatgctttgtaataagaatactaactgaatcattaacatacaaaatttaatcaaaacattacttaaccaaagaaatcaattgagatttgaaagtaaagttgcatgacct

SEQ ID NO: 13901 - DNA, 5772 bp, DROSOPHILA
tcgcttcgtacagacgtggtcgcgcttgtaactcgactcaaatcggcatccgcaagatactttagagcaatccgtagcagcaaaaacaacaagagcagcaaggcgcaagatcaagtttcggaccctagcgtcatccgttgtgcggtttcgagttccaagaacgcgagcggagcggagtgagagagcaaagagattgaattataccgaaactgtgtcgttctacatgtgccaaatactcgagtaaacaacatcgaaactcggacctaacggatacggatacctaacggcactgatattagcaacggcaacatgttgccgctgctgttgccactttttctgagcctgaccgccggccagctggtcaaccaaccgccgcagttcgtccccggaacgggcgacatgtcccgatttagcctctcggaaaacacacccgtcggcagtcccgtcttccagctgaaaggaactgacccggaaggaggtcgcctaaagtacagtatcagcggacccgttttctctgtggatcgggaaacgggagtggtgcgcctgcgccaggagctggatcgagagacccaggataccgtcgaggtgatcattagcatcacagacgaaggtatctacggaacagagcccaataccgtctcccaaaggcgagtgattcctgtaagggattacaatgacaaccagccgactttcctgggcagaccatacaccgccagtgttagcgaatccttgcccgtgggttcggagctcagtgtggagccacccattgtggtcgtcgaccgggatgagggtatcaattctgaggttcagatgaagtgtcttgaggaaaatgacatttgcgacatatttgaggtgcgggccgtgaaaatatctgatggaaactacacagcccgagtggcgctgaagcaacagctggatttcgaaagtcgtccatcgtacatcttgaccatatcggcctcggacagtgcattggataaccgcctctcttccctggccaccatttcgatcaatgtgatcgacatccaggatcaaccgccaatctttactaatgctccgtactccgcgacggtaccggaaaacactcccgccggagtgagcattctaacggtgaaggcagtagatggggatgtgggcataccaagggaaatattcctatctctggaagatgaacccttcgggcactttgagcttgtaccatttggagatcctcgagacggaactgcagtacttcaaaccacatcagagccactggatcgtgagaacgctgagatcctccaaaatggtggggtgtatgtgttttccatacgagccacagaacttatcgatggagctattcccgccgagcactcgcttacaagagtaaccatcgtggtcaccgatgtggacgatcaccagcccacctttagtgggccgcactttaatgtctccataacggagaatctggcaaatggaatgccattgccgggactctcgatcttcgtggatgatcgcgacatgggagagaacagtcgctatgagctttctttaagagatgtgttcaatgccgccagagtatttgaagtttctccgactgaatctcaaggccgaacaccagtggttgtcaaagtattgaatgctagtcgattggattacgatgttgtcgatcctgaccttcgaaaatttgagttcgatcttgtggcttccgtgaagggcgtggagaaggccaagactcgggtcgagatccatctgctggatgccaatgacaatgcacctgtgtttgaccaaggtacctatcgttttacggcagctgagaacctgcctgtggacgcgataatcggacacgtaaaggccactgatttggattccggtgaatttggacatgttcgctacgtactcaagggtttcggtgcggacaacttctatgtaaatccggaaaccggaggcgtttatctgctgaaacctctggactatgaaaagcaaagtagctacagcctgacagtggtggccatcgatggaggtcagcgggaggccaatgccaacttgttcgtcggggtcaccgatgtgaacgacaatcatccgaacttcgaaagcaaggaatatagtcgaactattcgggaaggtgcagccctttttgagccccagttctttgttcgtgcccacgatgcagatggtccttcccaaggaaatggacgggttaagtattccattgtgtccgagaacagcattgctggaaatgtattccggatcgagccggatacgggcgagattgtcattcagaaggcagcgcgatcaatggacacggagaggggtgaatacgaactggtcgtttcggctactgatttcggcattcctcccttgtccaacaccactcgcgttttggtacgcgtcggcatttccggtaatcaacggcccatcttccgcggacacttccaaaatatggagaacctacccattataggcccgcccagctatcgagtctccattcctgagaatgccgctgcaggatcaaatgttacctccgtatctgcccacgatcccgatggtctggacagcctactccgttacaggattgtaggggccaatgacaactttgagattgatgagatttctggtttaatcactgtatcgccacaagcccggatcgatcgcgactcaaacatgaacagctttgagatcatagtgaacgctgtggactccggaactcctatcccggaaacggccaccactacggtttatgttaatgtgaaggacatcaatgacgagcgtcccaagttcgagcagaacagctatgcgacgtacgtatccgagaggacagccgtgggtgagagtgtccttcgcgtgaaggcaatcgacaaggatcttaattcaaaattggagtacagcatggtgggtcctgttgctgccaccacaaaggcaggcgtaagcatagccaatcggagcaactaccgactgcaggaagcctttcgagtggacagtcaaagtggtgagatctttgtcaatggaacgcttcgtcacgatgtggccgccatcataatcttcaccgtcggtgtgcgagatctcaatgcagaggtggatcccgagggacaggtggacaccacagaagtaaccgtctacgtgcagtccttccaagataccaatccggtgtttaagaataccggctggactagctcaagacccgtaatcgatgtaaagatcaaggaggaaatgcccatcgatagtgcgctcttcattttgcaggcggaagatcctgtcaccagacagccgattaccagttttgagttgatagaacccaaacaggtggactatttccaagtggcagagcgaacaggagaggtgatactcaagaagcggctggactatgaagccttgggtgatactggtccggagtttgagctgcaagttcgcgctaacagtgccgatcgacaaagaagcactgtcagtcgagttaatatcaccgtggagaatgtgaatgacaatagtccacgcttcgagcggaactcctatcaagccaccatcatcgagaacaggcctcatccggagcgagtgatccgggtgagagctttggataaggatgcggttcttaacgcccgtgatgagcgtttgggctaccacaagatcatctactcactgcagggcgagcacgccatgctgttcgatattaacaatacaactggggaaataatcgtggccagcgggcagaccatcgatagggagcgaacaccaaggattcagctgcagatcaaggcggaggattctcctggccgtcccacggatgccaagcaaagtgtagtggaactgcagatagaggtactggatgtgaacgacaacgctccggagtttactcaaaagaaatatagcaccgtgattccggaaaacgcgcaaatcgactcgtttgttctccagctggaagccgtagatgcggatgagggtctgggtggcgaggtgcgctacgaattggttaacgagggtgaggccaatggacttttcaagatcgataccaagagtggtctgatatccacccgacgtaatcttaccggcaaaggccgcgcacatccatatgtactaattgttcgtgcccaggacaacggcaaccagatgcccaaacagcccaccttgtccacagacaccgatgtcaggatatatattggggatgtgagcgccaatgatggagtgccctactttttgtctcctcgggtgggacaaatggcgaatgtcacagagaatgctgttactggagctccagtatttcaagtcattgccagcgatccggatgatgaaagcaccccatccggaaccattacttatcgcattttgccagatactccagatgccgaagcctttgtcatagatgctcactcaggattgataaccactaggcaatcgatggatcgggagacgaaggacatgtacaggattctgctggaagtgagtgacaatggacagcccaagcagtcggcgacgaggatccttcagattgccattctggatgtggatgaccacgaacctcgattcgcaagagaagctgacgcaggaccgttgagcatgtcggtaagagaagaggagccggctggcaccattgtcggtaacttcagcgctttggacgaggatctcggcgagaatgcggccattgattatgtgatcattgatggaaacaatgaacagttgtttacgatagagcgaaataacgaaagcctggccattcttaagaccaaaaaacctattgaccgagagcaggttgagtcctttactctgacgattaagtgtctgaaactgggtgaacctggctacaagttcattggagatccctatgatcgacaggatctttcacatttgcgaattaacgttcgagtattggacatcgacgacaacctcccgaaattcgagcagccagatcccactgtgggtatcaggatcaatgtgcctatcgacactgtggtgaccactttgaaagccagcgatgcggatgctgaggccccacccgttggtctttccattgagaacgtgacctttgtgccgcagttctataagcgaagtcgtagtctggccgttggaaatttacataatctcttcaccttgaacaatcgaactggggaactgagaactggaggttcattcgcggattatgtagatggttacttcttaatgcgggttatggccaacaattcagtacaacccaaacggcaagcccacagtaatctcaaggtgtttgtgatccgggacaagtcgctgcttaagttcgtcttcgcccgacctccaaacgagatccagcacaatatccgaccgttccaggagcagttgcagaaaaaactgaagcccctgggattagagttgcatgtcttggatacacaggtcttcaccaggcccgacatgagtctggacttcactgccaccagctcctgcttccagatgttcaagaatggagctgccttatccttcaacgagatgcagaagctgatgaactcacagcagctgcgacaggaactgatagatatatacgccgcctatggggtcagtgaggtagaatcctgctcggtgagaaggactcatgcagcagctatttttgcgggaatgctgacctcggcgggagcgtggctggttttcctggccgccctcataggtctggctgccttggtttccctgtgcacagcctgttgtttgaagaaaaagctaaagcggcacagtaagcggagtcttcaggcaagtttacgcactcccacggagcacacagccacctcgtacagttactccatgcccgccgtgctctactccgaacccatctacgggcccttgtag

SEQ ID NO: 13902 - protein, 1820 aa, DROSOPHILA
MLPLLLPLFLSLTAGQLVNQPPQFVPGTGDMSRFSLSENTPVGSPVFQLKGTDPEGGRLKYSISGPVFSVDRETGVVRLRQELDRETQDTVEVIISITDEGIYGTEPNTVSQRRVIPVRDYNDNQPTFLGRPYTASVSESLPVGSELSVEPPIVVVDRDEGINSEVQMKCLEENDICDIFEVRAVKISDGNYTARVALKQQLDFESRPSYILTISASDSALDNRLSSLATISINVIDIQDQPPIFTNAPYSATVPENTPAGVSILTVKAVDGDVGIPREIFLSLEDEPFGHFELVPFGDPRDGTAVLQTTSEPLDRENAEILQNGGVYVFSIRATELIDGAIPAEHSLTRVTIVVTDVDDHQPTFSGPHFNVSITENLANGMPLPGLSIFVDDRDMGENSRYELSLRDVFNAARVFEVSPTESQGRTPVVVKVLNASRLDYDVVDPDLRKFEFDLVASVKGVEKAKTRVEIHLLDANDNAPVFDQGTYRFTAAENLPVDAIIGHVKATDLDSGEFGHVRYVLKGFGADNFYVNPETGGVYLLKPLDYEKQSSYSLTVVAIDGGQREANANLFVGVTDVNDNHPNFESKEYSRTIREGAALFEPQFFVRAHDADGPSQGNGRVKYSIVSENSIAGNVFRIEPDTGEIVIQKAARSMDTERGEYELVVSATDFGIPPLSNTTRVLVRVGISGNQRPIFRGHFQNMENLPIIGPPSYRVSIPENAAAGSNVTSVSAHDPDGLDSLLRYRIVGANDNFEIDEISGLITVSPQARIDRDSNMNSFEIIVNAVDSGTPIPETATTTVYVNVKDINDERPKFEQNSYATYVSERTAVGESVLRVKAIDKDLNSKLEYSMVGPVAATTKAGVSIANRSNYRLQEAFRVDSQSGEIFVNGTLRHDVAAIIIFTVGVRDLNAEVDPEGQVDTTEVTVYVQSFQDTNPVFKNTGWTSSRPVIDVKIKEEMPIDSALFILQAEDPVTRQPITSFELIEPKQVDYFQVAERTGEVILKKRLDYEALGDTGPEFELQVRANSADRQRSTVSRVNITVENVNDNSPRFERNSYQATIIENRPHPERVIRVRALDKDAVLNARDERLGYHKIIYSLQGEHAMLFDINNTTGEIIVASGQTIDRERTPRIQLQIKAEDSPGRPTDAKQSVVELQIEVLDVNDNAPEFTQKKYSTVIPENAQIDSFVLQLEAVDADEGLGGEVRYELVNEGEANGLFKIDTKSGLISTRRNLTGKGRAHPYVLIVRAQDNGNQMPKQPTLSTDTDVRIYIGDVSANDGVPYFLSPRVGQMANVTENAVTGAPVFQVIASDPDDESTPSGTITYRILPDTPDAEAFVIDAHSGLITTRQSMDRETKDMYRILLEVSDNGQPKQSATRILQIAILDVDDHEPRFAREADAGPLSMSVREEEPAGTIVGNFSALDEDLGENAAIDYVIIDGNNEQLFTIERNNESLAILKTKKPIDREQVESFTLTIKCLKLGEPGYKFIGDPYDRQDLSHLRINVRVLDIDDNLPKFEQPDPTVGIRINVPIDTVVTTLKASDADAEAPPVGLSIENVTFVPQFYKRSRSLAVGNLHNLFTLNNRTGELRTGGSFADYVDGYFLMRVMANNSVQPKRQAHSNLKVFVIRDKSLLKFVFARPPNEIQHNIRPFQEQLQKKLKPLGLELHVLDTQVFTRPDMSLDFTATSSCFQMFKNGAALSFNEMQKLMNSQQLRQELIDIYAAYGVSEVESCSVRRTHAAAIFAGMLTSAGAWLVFLAALIGLAALVSLCTACCLKKKLKRHSKRSLQASLRTPTEHTATSYSYSMPAVLYSEPIYGPL

SEQ ID NO: 13903 - DNA, 11200 bp, DROSOPHILA
caaaaaaaaaatcaatcaattttctaaaaaagaaaacacaaaaaaaaaaaggaacgaaaaaacctttactagaagcaaaacaaacgcgtgttgttcatggtttacactgcacccgtggatccatagatttggatccatagatacacccacccacccacttggttcctttcgtagcagcctactatttgctggcgatgcatcttgtttcacacaattgtttccccaacacatttcattgctattgttcgtggttacgactttttttatatagtttgcaaagcattgaaaagggtatatagatttatacatgaatatatattcgccgacatgcatgatcgctgtaatttcataggcatgtggaaaactcgtatttaaatgtttaactagaaatacagaaaagaaaagaaaaaataaactaaaaataaataaaaggaaatgtggaaataaacaaatgataaagacaaaagcaaatcataagcaaattgtacttgatgtcagctgtagcaaaaaaaaaaaaacaaaacacaatatatatgaacataataataataataaaatgtgaaaacggaacttaacattcaaaaattgtttcgatacatttaacaacattcaattgcattatttgattgaagtcaaccgacacacacacacactttactcacacccgaaagagtctgtctcctcgcgaagtaggcgcaaaatcaacgaaagttgtagaagatctggaagctggagatcagcacacacacacacatacacacaagagaaaaacaattattataatatttacagcatgaatcttaaaaactaagcgtttttttctcaaaggaaaagtaaaatgaaacattgttaattaaacatcaaatatcatttgaaataaatttaaataaaacgaaaaggaaacgcaatggtgtcttattatacaactgtgctataaatcccatttaagcagcagagattgtatcccttataaaaaatgctttggtttagttcttaaattctctttagttaagttttctggtttttcttcagcttcgtttcacaattcgttttgttttatacaatttttacatatctacaacataaaacgtacgcgtttggaacaaatcgggaatacggctcgaacggccaaggggatgagcttttttttttagctagccaaggtacataatatcgtataaagaactctaatgctattgccattgtccgcacaaggaaggccaggatcgaagttagtgtaatgatttgttattaaagtgctagtcgtaggagtacgggcttctggacgtgtggtcgttcttgccgcgaaatggaaattggctagccagtggtttggtggcccgcctcctcctccttgttgttgttgcccagtatccagtccatgagcatcatcgatggcgaacgcaatccggattgagctgtaaatttgaattgaagtcgggggattcggttaggtacatggcacttgctgacgcttcagtagcatccactcacagagatccacgcctattgctgttggagctgctgatgttggtgccgctactgctgctactgcccctgctcctgattgtgatcccgagccctgcttggccatgtccttctgcagttgaagcatctgctgcaggcgctgctcgcgctcgtccacgatgaccttgtccttggaatgcttcaccgtctgcaactcagctagcctgaaaagagcaataacaaccattaagcctttgctccattatcttgtaggacagcactcacttctgcttgaggtcactgcccgctgcgctcgtcgtgcccagaagttcgctgttgctgcccgcactgctgattttactgggactgctgctcgaggcggctgatgaggatgccgtggcacttgctgctccggaatagaggagaacaaaaattaggattggatcggatcatatataacaaaaatgctcagaattggcaatccgactcacgttcatcgctaacgcgactccgctcagtttccaactggcgcagtgtgtccgacaacttcagttgcaggtgatcacgttcctcgagcaactgcaccagttccacaatcatttcctcgactcgcatgtcgcgctggtggagcatcatgagggcgtaatctagatccgctttaagcacatactcgggcagtggttcgttggcagttaaggatggtggtccaccagctgagactgttgtcgaggcaggattgcccccactggctccaccacgattctgcagccggaacggatcgtattgggcggctaaacgagcgtactcggctgaacgaatggccagctgttcctttagcgtcactatctccatttcctgcgtttccagcgccttttgcatcttttgcattatgtcgctggtggcctcaccttgtgtggactgctgactctggggcagttccctctgctgctgctgggtaacctcctcaagttgcgccttgaaggcggcttccctttgagagagatgttcctgccaaatgctggccacctcgccgcacttttgctccaccaactgttcccactgctgattgatagctgacagatcgggtatttgctctgcagcggaattctggccaagattttggctttgcaagatttctagagaacggcgcagctcggtgatttcaatgtttttggtatccagctggagcagcgtttgcttcatcctatcctccagctctaggctgctaagaacatgattgttaagcacacgcagttcctcctccatatccgatttctcttgctggagctgttggcacaggctttttagcttttcaacggtctccccgtcgtcctttggaggagcagctgacacctgctgatcttccttgtcctcctccaattgcttgacctgcatgcgtagtaactgtagctcttgatttttggtcaggatctcgaagacaagcttctccgtttgatcttcgcgcataagctcttcgatgcgttgctttaggtgcacaatctctgattccttctcctgcagttgagccatttgctcatcatttctggaggccatgtccaccgagagttgttgaccctgacaactctgacgcaatgcttccaattcggcttgatcgcgtgcgcgcagagcttccagttcgattagttgttggcgcagctgttgaagctccagttgttgattatcccgctgctcgattgcaatccttgccgcttcatcgtgaccctggctactctgacgcaatgcttccaattcggtttgatcgcgtgcgcgcagagtttccagttcgattattgcttggcgcagctgctggagctctagttgttgattgtcctgctgcaaggtcgcaatccttaccgtctcgtcgtgaccctgacaactctgacgcagtgcttccaattcggattgatcgcgtgtgcgcagtgcttccagttcgctttcttgttggcgcagttgctggagttccaatttttggttgtcttccgcctcatcgtaaccttggctactctgacgcaatgctcccaattcggcttggtcgcgtgtgcgctcatcttccagttcgcttacttgttggcgcagttgctggatctcctgctgtaggctctcaatcctcgccgcctcatcgccgtctaaggatgaagagacagttgcggcgggctcaccccactggtctagttggctaagcttttcttggagctcccgaatgcgagcctggtacatttgcacatccatgtcctgacgctccttcatttcggccatacgatcgtttcctgctgtcagaacatcgatacgtttcgctaacttctctttttccagggcgtgctgttgtgaaatttcttccgctttgctcagacgagactcttgcaactggagctgatgcttcagctcctcaataatggttgaatccagatcattatccactgtcacagtgggcgtggcggtcgttgttgccttcgttttgtattccttcagacgcttcataagcttggcggctttagtctgtagttcggtcttttgctgctcggcattggacaactgcagctctaattgagcgattctcgtgtgcaggtgctccacatcggtttgcggcgcttcgttggcagcactggcccagggatcctcgtcaacgccccaatcaatggtttgagcagtctgctcctgaatttcctgctttggctggcacaaatatgcctttttgggctggatcagtggttccaccactggctccgtttggggcagacccaaatccaaatggtgactaacagcatcgggcactgtttcctctgcctgaccgccgaagaacatgtccaatgtaggcgctgccgccggttggataagcttctccagtgccgccaagcgatcacgttcctcatttgccgtttgaatgtcggccagctgctgtgtccgttcgcttagcaggcgctctacttccgaaagacgctgctccaactgcaaacgtcgctcttcctgctcggccaagttctgatttcgcgccagcagcttcgtttccaagtcctgtgcatgcttctccagatcagaaacgtttcgctgaagatcctcgattgtaggtggtggagaaataggtggcggtgcacttgccgctagggaagaaaccctcagtggttgggctatctcatcgaagggcgagggggcggccaaagcatcgccaccaaagaacagtgaagccggtggaggatgctgctgagattgtacagcaggatgatgatgctgttgctgctgctgctggtgctgctgcctggccagttgtgcctgcagttcgcttagctgctccgccaaacgcttgttctccgtttcgatgtagacctgatcatcagtttgattctgacccagagtgtccaactcagcgattcgctgctgcagcgcctgcagctcctggctgtgattggcgcatagagcatctatctgagtgcgcaggttgtccatttcggtcttgtcctgcatggcctgcatgcgaagttcctgtagctccaaaacatcttgctcagcactgtcatgctgcaaacgaagcagtgtcacttccctactcaaagtggatctctcgcgttccacctcctggaactcttcgttgagtcgctgtagttcctcagttcgttgggccaccagctcttgggaccgctccaattgctggcaaagctctcgcgtttcggctgcagctcgctccacatggctattgaggtcgcattcgagttcatcgagctccgtggccttggctgccagtttggcatcgtaaacctgccgctgacggtgcagatccgcctccttgacgtccagttgctgtcggagttcggccagctcctcctggctgtggctgctcatctgttccctttctgcctgggcggtggctgttagttgcgagtgtttggccagcagagactcgtactccgttcgcaggccagccagttgctgcctgctctcttcagcttcgctggtgagcaactcaagttggcgactttgagcttgctcccgttgtccaagctcatagaaacgctcctgtagctgctgatcctgttggcgcttctgctcttcctgctcgcgctgttccttcaactgttgctccagtatttgcactttatcttgggacgccgcttgttggttagcctgactggcggcctgttcctcaagagcagcgcttctggcctgcagttccgtattctgagcctccagcgactcaatgtacgaggcatcctcctgtagcttggcttgaatcccttcgtgaagtgtctccagacgggcgatggtcatctcaaagtttgccttatcgctggcgtactgttgcgccaacagagcgtgttgctcctgggccgccgtaagctggacacgaagctgttgaagttctctctctgccacttggagggattccgcttgttgttgctaaaaattttttttatttgttgcattagaaggtaaatgaggttcaagttcaaagttcaatctcaccgattgtgattccaatagttgatgtgaagttttggtaatggtatcatcgccttcaccggctgccctgctcctttccagcttaagaatctcttgtcggagggcagtaatctgttgtggttgattattatcttcgacatcaaatatgcctaaaaatcgattactcacctccgcatccttttctaaacgcagttgctcgtgagcggcccgcgcgttccgcacatgttccacctcgctgtcttgatcctgctgcagttgctgtaactcacgctgcagcgattgaatcgtggcattgcgaagctttatcaactccttggacttttcgaatttcttcgatttggcctctaattgacgccgcaaatcctcgacagcagtgggctcttcgtttaccctctgtccaagattatggatttcctcctgaagcttagagatttcttccctgagtctggagttttcctggcccagttgaaagacttcctgatcggcttcttggcgctcgcgtcgcaactccttgcttaccagattggcatcttggagctccgcatcacgttcttggataagttgctcctgctcttgtatttgctgctttaactgacgcagggcatcgcgattttccaggttgagatggatcttggccttaaggtcttcgttaagcttgctgacctgttgctgcagttgttcaacccgatggttgtccacgatgggttcacgttccacctcttctttctgcttgacaagctcctgctgttcttgaagttgactagtaagttcctggaccttctgctcgagatcggcattgtcctgtgtgcgtttcttgaggttaagggcatacttcttgagtttctcgcgcagttcgcggttcttgaactgctcctctttgtgggcatgttctaatccttgatactcctggatttgctggttcagggcatcgacagtctcctggctggaggtcaactctctgacctgctgggcaactaaacttttgctaacgcgcagagcctctcggagctgatccggatcctctttggctctcaattcgcgcagctcctcttgtgctgattgcaattccagcatcttaaggttaagcgcgtgctcgctttcgctgacactctcaatgagttgctgcttctgctcggcaactagagtctgtaggatactcagctcgccctccagagattcggctcgggcctctaactctcgacgaatccttgtttgctgctccagttgcttctcatggctcatttccttggagttgagcagctgatcgaattgctctgattgcagctggagttgtgtgatctcggcactctgcctggccaccaattgcagctgttctgcttcggtttgacgcagctccttgatttgatctacctgctcctcgatctgctggcgttgctcggcctgcaaggagcgtgcgtcctccagctgggactgcaattgcaggatttcatcttccctttgagaatcggaaccaactatggccaatggcgcttcggtttcaggatagctttcccgcaattcatccaattcctggcgcaatcgggagatcaccgccttgagttccgcgttctgtgcgtttagctgctcatattccgcaagagcttttccgttgggagcggtcacggccaccacggtctccacaacggtaacagtttctaccgccgtgctcgcttccttaaccttgtggagaagctcactcaattgggtgtgacagttcttggcctccttggccagtttcttggacacattgaacttggcctgcctatcgttggccttgcgataggcctccaattcagagttgagtttgctcagggatttctcgcatttctcaaagagcacggggcctccttcgccggcgtccagtgttgcgacaacttcggaggagcgttgcattgaactgagttcctgcgagagattggatgaagtggacgtggaggagatcagatccttctcacgttcacgctgcaacagctgaagagaacttgaactttcctccaatcttgcctggagttgcaaattctcggccgacagttgctccagcttgtccaatacctctccgcgctcctgggtgaaaagttcgagacgttctctaagctgggaaagagtttcgccagaggaatcctcctcctcagtttgctccgtctgagtgagctcgctgacgtgacttggccctggtggatgcacttgcttctgctcctgggcgtcgccctcgctggccggacgtcgttggcctaggcactctaagtgatgacgctccactatttcaatggattccgcagaactggatgaactgagtaaggcctctagggcctgttgcaattccaatttctgctcttccagcaaacgaattgtttccagctgcagtggattattggactccgtcgattgctctggctggcggtcgtcctcttgcatgttggccaactgccattgacccttctcgtcctcgaggacggcgatcctttgctgcagttcctcgttatcagccaacagtgaagccaactgctgttggccatcttgggattggaatttctgcagcttcttttccgcctgcttgcatttcagctttagctttatgttggccttgttagtttcgtccagctttagcttcagctgctgcagatcctcctgcatctgcttgctggcggcactgtcctccgaatggtcctccagaaataggggcttactgcgactgctttgcgcgagtttctcctcaaggagacgcagattcacattgagcacattgagttccgttgtcttttctgcgagttcttcgttttgggcagccattgccgacttctgttcctgcagctctagaagctgcgccgctatggtggcttccagttcctcaaggcgctgggaaacaatctcatcggtcacctggagcttcgcctgggcagcaacttgctgacgcaactcctcattagttgcctgtagatcagccagctggttggtaagctcctggagctgtttggctagctccgcgctcacctgtgcatcggtatgcgctgcttccgattgcggactgcgggaagccttttcctgctcttgttccaactccagattacgctgtctttcgcgcgccgtggtcagctcttcctgaagttcacagcgcgtcgtttctaacaggtcgttgacgttttccagctctgctagtcgttctcttaagactaaaacttcgccctggaggcgagagttttcctgcaccttcaggctatcctcttctgcctggaccacacgcaattgctctaactcctcgtttcgctgggtgagcgtgcgctgtaattccgcaccggatagttccaatcgctcgatgagtttagcgcgcttggccagttctgtacgcaattcatttagctcctgttcctgccggccctgcttgagttccgtcaacttcatacgactcctgagcaacttcacccggctttcgtccaccgcctcctgaccctgggcctccaagtccaaggcagaacgatggcgggatacgggtggattggagacagacgccgcgtgtcgtaggtccgtcatggaagagcccagctcggcggtcgtttggtggccaatattcgactttacagaaagaagagacttggccagatccctcttgcgctgctccaacaaagcacgattttgttccgtgcgctgtgtgagcatcagaagcttctcgctgccactggtttggagtaaagagacatcaccggggtcgctgtcctttgtgggtgagaccagtggagtggaggagtcgccggagcgcgtcttcaacacggtgagcttctgacccagtgtcttaagcgactccatggagtcactcatgctggacttgtgtcgctcatcctgggatttccttaaggcgcgttcttttaaggcagtgaggcgctcctgaaagcaatcatttcgagtcatttaatgatatgaaccacttgattcacagcgcctaactcacctgctgcttgtacagattctctttaaggctatccaaacggcccttgcctttggtgcctctcgttgtgctggcggatacattctgtagggtagattcaacagataatattgaatcctgcttcacttgggggatttgttcagatttacccacctgtaacgaggacagatcgttggagctgcccgctaagcgtatatccgcctcgccatattcgtgatcgtcgggctgcaagtggtcatgatcagtatggacgcatgtacgtacagggaacaccaagtgaaacccacctgaacgatggagaagtcgtaggagctctccaaagcacccgaatcttccgccattgtcgtttcaattacaaaatattactaactatcctagcgtaccggaccaaatgcagcagcaataacaaaaaaaaaaaaaaaaccaaaaacaaacaaaaacacaaatcgggggaatcgggaatatatatgcggactggctatctgaaggaccgattatatatccacggtggctgcgcagcgctagctatcgacattgactgcaacgagagagggtttaccatatagctaacatatatcatccgcttccgatcggctagaattgtctttagctttgaatttgcgtttcttgttgttctttttattttatggaattcgtggcactgacgtgtgcacctctctatagatgtgtgcgtgtgtgtgcggctgtgtgtgtgcgagtggggctgtgtgtgtgttttgtttgctgtttttccagcgcttgtgtcgattttcgcctggtttctgagttacaagccactaagcactagattgcaacgtaagagctttcttatgtgcacgctgacagatgtatatttaccaattctaattaatgccagcgtaaaaacaattcgataccagggctgcgcaacaactgaatagggtcacaaagccctggtaagttatcgaatgacagatggctcgatagcacttgcgctcgtaatcaatcaatcgattacaaactaattcaaaaattttgcattaatttcaaattgattttatttattttcatacaacaaattatactagtttgtgtatataacttgttatacaaccgtttaatatgtctgatgcttaattttagacatgattggttaatttttggttttggctaataatattattgcatacaatggatacattagtaaataaggactacttaaaaacaggtcagggattcgacacttaataataaaaactaccacgacaacatcgttaatatgcgagttatgcaaaactgataataaggaaccattagactagatgcaacacttaagtacaaaagaaataaccctagcctcca

SEQ ID NO: 13904 - DNA, 8673 bp, DROSOPHILA
atggcggaagattcgggtgctttggagagctcctacgacttctccatcgttcagcccgacgatcacgaatatggcgaggcggatatacgcttagcgggcagctccaacgatctgtcctcgttacagaatgtatccgccagcacaacgagaggcaccaaaggcaagggccgtttggatagccttaaagagaatctgtacaagcagcaggagcgcctcactgccttaaaagaacgcgccttaaggaaatcccaggatgagcgacacaagtccagcatgagtgactccatggagtcgcttaagacactgggtcagaagctcaccgtgttgaagacgcgctccggcgactcctccactccactggtctcacccacaaaggacagcgaccccggtgatgtctctttactccaaaccagtggcagcgagaagcttctgatgctcacacagcgcacggaacaaaatcgtgctttgttggagcagcgcaagagggatctggccaagtctcttctttctgtaaagtcgaatattggccaccaaacgaccgccgagctgggctcttccatgacggacctacgacacgcggcgtctgtctccaatccacccgtatcccgccatcgttctgccttggacttggaggcccagggtcaggaggcggtggacgaaagccgggtgaagttgctcaggagtcgtatgaagttgacggaactcaagcagggccggcaggaacaggagctaaatgaattgcgtacagaactggccaagcgcgctaaactcatcgagcgattggaactatccggtgcggaattacagcgcacgctcacccagcgaaacgaggagttagagcaattgcgtgtggtccaggcagaagaggatagcctgaaggtgcaggaaaactctcgcctccagggcgaagttttagtcttaagagaacgactagcagagctggaaaacgtcaacgacctgttagaaacgacgcgctgtgaacttcaggaagagctgaccacggcgcgcgaaagacagcgtaatctggagttggaacaagagcaggaaaaggcttcccgcagtccgcaatcggaagcagcgcataccgatgcacaggtgagcgcggagctagccaaacagctccaggagcttaccaaccagctggctgatctacaggcaactaatgaggagttgcgtcagcaagttgctgcccaggcgaagctccaggtgaccgatgagattgtttcccagcgccttgaggaactggaagccaccatagcggcgcagcttctagagctgcaggaacagaagtcggcaatggctgcccaaaacgaagaactcgcagaaaagacaacggaactcaatgtgctcaatgtgaatctgcgtctccttgaggagaaactcgcgcaaagcagtcgcagtaagcccctatttctggaggaccattcggaggacagtgccgccagcaagcagatgcaggaggatctgcagcagctgaagctaaagctggacgaaactaacaaggccaacataaagctaaagctgaaatgcaagcaggcggaaaagaagctgcagaaattccaatcccaagatggccaacagcagttggcttcactgttggctgataacgaggaactgcagcaaaggatcgccgtcctcgaggacgagaagggtcaatggcagttggccaacatgcaagaggacgaccgccagccagagcaatcgacggagtccaataatccactgcagctggaaacaattcgtttgctggaagagcagaaattggaattgcaacaggccctagaggccttactcagttcatccagttctgcggaatccattgaaatagtggagcgtcatcacttagagtgcctaggccaacgacgtccggccagcgagggcgacgcccaggagcagaagcaagtgcatccaccagggccaagtcacgtcagcgagctcactcagacggagcaaactgaggaggaggattcctctggcgaaactctttcccagcttagagaacgtctcgaacttttcacccaggagcgcggagaggtattggacaagctggagcaactgtcggccgagaatttgcaactccaggcaagattggaggaaagttcaagttctcttcagctgttgcagcgtgaacgtgagaaggatctgatctcctccacgtccacttcatccaatctctcgcaggaactcagttcaatgcaacgctcctccgaagttgtcgcaacactggacgccggcgaaggaggccccgtgctctttgagaaatgcgagaaatccctgagcaaactcaactctgaattggaggcctatcgcaaggccaacgataggcaggccaagttcaatgtgtccaagaaactggccaaggaggccaagaactgtcacacccaattgagtgagcttctccacaaggttaaggaagcgagcacggcggtagaaactgttaccgttgtggagaccgtggtggccgtgaccgctcccaacggaaaagctcttgcggaatatgagcagctaaacgcacagaacgcggaactcaaggcggtgatctcccgattgcgccaggaattggatgaattgcgggaaagctatcctgaaaccgaagcgccattggccatagttggttccgattctcaaagggaagatgaaatcctgcaattgcagtcccagctggaggacgcacgctccttgcaggccgagcaacgccagcagatcgaggagcaggtagatcaaatcaaggagctgcgtcaaaccgaagcagaacagctgcaattggtggccaggcagagtgccgagatcacacaactccagctgcaatcagagcaattcgatcagctgctcaactccaaggaaatgagccatgagaagcaactggagcagcaaacaaggattcgtcgagagttagaggcccgagccgaatctctggagggcgagctgagtatcctacagactctagttgccgagcagaagcagcaactcattgagagtgtcagcgaaagcgagcacgcgcttaaccttaagatgctggaattgcaatcagcacaagaggagctgcgcgaattgagagccaaagaggatccggatcagctccgagaggctctgcgcgttagcaaaagtttagttgcccagcaggtcagagagttgacctccagccaggagactgtcgatgccctgaaccagcaaatccaggagtatcaaggattagaacatgcccacaaagaggagcagttcaagaaccgcgaactgcgcgagaaactcaagaagtatgcccttaacctcaagaaacgcacacaggacaatgccgatctcgagcagaaggtccaggaacttactagtcaacttcaagaacagcaggagcttgtcaagcagaaagaagaggtggaacgtgaacccatcgtggacaaccatcgggttgaacaactgcagcaacaggtcagcaagcttaacgaagaccttaaggccaagatccatctcaacctggaaaatcgcgatgccctgcgtcagttaaagcagcaaatacaagagcaggagcaacttatccaagaacgtgatgcggagctccaagatgccaatctggtaagcaaggagttgcgacgcgagcgccaagaagccgatcaggaagtctttcaactgggccaggaaaactccagactcagggaagaaatctctaagcttcaggaggaaatccataatcttggacagagggtaaacgaagagcccactgctgtcgaggatttgcggcgtcaattagaggccaaatcgaagaaattcgaaaagtccaaggagttgataaagcttcgcaatgccacgattcaatcgctgcagcgtgagttacagcaactgcagcaggatcaagacagcgaggtggaacatgtgcggaacgcgcgggccgctcacgagcaactgcgtttagaaaaggatgcggagattactgccctccgacaagagattcttaagctggaaaggagcagggcagccggtgaaggcgatgataccattaccaaaacttcacatcaactattggaatcacaatcgcaacaacaagcggaatccctccaagtggcagagagagaacttcaacagcttcgtgtccagcttacggcggcccaggagcaacacgctctgttggcgcaacagtacgccagcgataaggcaaactttgagatgaccatcgcccgtctggagacacttcacgaagggattcaagccaagctacaggaggatgcctcgtacattgagtcgctggaggctcagaatacggaactgcaggccagaagcgctgctcttgaggaacaggccgccagtcaggctaaccaacaagcggcgtcccaagataaagtgcaaatactggagcaacagttgaaggaacagcgcgagcaggaagagcagaagcgccaacaggatcagcagctacaggagcgtttctatgagcttggacaacgggagcaagctcaaagtcgccaacttgagttgctcaccagcgaagctgaagagagcaggcagcaactggctggcctgcgaacggagtacgagtctctgctggccaaacactcgcaactaacagccaccgcccaggcagaaagggaacagatgagcagccacagccaggaggagctggccgaactccgacagcaactggacgtcaaggaggcggatctgcaccgtcagcggcaggtttacgatgccaaactggcagccaaggccacggagctcgatgaactcgaatgcgacctcaatagccatgtggagcgagctgcagccgaaacgcgagagctttgccagcaattggagcggtcccaagagctggtggcccaacgaactgaggaactacagcgactcaacgaagagttccaggaggtggaacgcgagagatccactttgagtagggaagtgacactgcttcgtttgcagcatgacagtgctgagcaagatgttttggagctacaggaacttcgcatgcaggccatgcaggacaagaccgaaatggacaacctgcgcactcagatagatgctctatgcgccaatcacagccaggagctgcaggcgctgcagcagcgaatcgctgagttggacactctgggtcagaatcaaactgatgatcaggtctacatcgaaacggagaacaagcgtttggcggagcagctaagcgaactgcaggcacaactggccaggcagcagcaccagcagcagcagcaacagcatcatcatcctgctgtacaatctcagcagcatcctccaccggcttcactgttctttggtggcgatgctttggccgccccctcgcccttcgatgagatagcccaaccactgagggtttcttccctagcggcaagtgcaccgccacctatttctccaccacctacaatcgaggatcttcagcgaaacgtttctgatctggagaagcatgcacaggacttggaaacgaagctgctggcgcgaaatcagaacttggccgagcaggaagagcgacgtttgcagttggagcagcgtctttcggaagtagagcgcctgctaagcgaacggacacagcagctggccgacattcaaacggcaaatgaggaacgtgatcgcttggcggcactggagaagcttatccaaccggcggcagcgcctacattggacatgttcttcggcggtcaggcagaggaaacagtgcccgatgctgttagtcaccatttggatttgggtctgccccaaacggagccagtggtggaaccactgatccagcccaaaaaggcatatttgtgccagccaaagcaggaaattcaggagcagactgctcaaaccattgattggggcgttgacgaggatccctgggccagtgctgccaacgaagcgccgcaaaccgatgtggagcacctgcacacgagaatcgctcaattagagctgcagttgtccaatgccgagcagcaaaagaccgaactacagactaaagccgccaagcttatgaagcgtctgaaggaatacaaaacgaaggcaacaacgaccgccacgcccactgtgacagtggataatgatctggattcaaccattattgaggagctgaagcatcagctccagttgcaagagtctcgtctgagcaaagcggaagaaatttcacaacagcacgccctggaaaaagagaagttagcgaaacgtatcgatgttctgacagcaggaaacgatcgtatggccgaaatgaaggagcgtcaggacatggatgtgcaaatgtaccaggctcgcattcgggagctccaagaaaagcttagccaactagaccagtggggtgagcccgccgcaactgtctcttcatccttagacggcgatgaggcggcgaggattgagagcctacagcaggagatccagcaactgcgccaacaagtaagcgaactggaagatgagcgcacacgcgaccaagccgaattgggagcattgcgtcagagtagccaaggttacgatgaggcggaagacaaccaaaaattggaactccagcaactgcgccaacaagaaagcgaactggaagcactgcgcacacgcgatcaatccgaattggaagcactgcgtcagagttgtcagggtcacgacgagacggtaaggattgcgaccttgcagcaggacaatcaacaactagagctccagcagctgcgccaagcaataatcgaactggaaactctgcgcgcacgcgatcaaaccgaattggaagcattgcgtcagagtagccagggtcacgatgaagcggcaaggattgcaatcgagcagcgggataatcaacaactggagcttcaacagctgcgccaacaactaatcgaactggaagctctgcgcgcacgcgatcaagccgaattggaagcattgcgtcagagttgtcagggtcaacaactctcggtggacatggcctccagaaatgatgagcaaatggctcaactgcaggagaaggaatcagagattgtgcacctaaagcaacgcatcgaagagcttatgcgcgaagatcaaacggagaagcttgtcttcgagatcctgaccaaaaatcaagagctacagttactacgcatgcaggtcaagcaattggaggaggacaaggaagatcagcaggtgtcagctgctcctccaaaggacgacggggagaccgttgaaaagctaaaaagcctgtgccaacagctccagcaagagaaatcggatatggaggaggaactgcgtgtgcttaacaatcatgttcttagcagcctagagctggaggataggatgaagcaaacgctgctccagctggataccaaaaacattgaaatcaccgagctgcgccgttctctagaaatcttgcaaagccaaaatcttggccagaattccgctgcagagcaaatacccgatctgtcagctatcaatcagcagtgggaacagttggtggagcaaaagtgcggcgaggtggccagcatttggcaggaacatctctctcaaagggaagccgccttcaaggcgcaacttgaggaggttacccagcagcagcagagggaactgccccagagtcagcagtccacacaaggtgaggccaccagcgacataatgcaaaagatgcaaaaggcgctggaaacgcaggaaatggagatagtgacgctaaaggaacagctggccattcgttcagccgagtacgctcgtttagccgcccaatacgatccgttccggctgcagaatcgtggtggagccagtgggggcaatcctgcctcgacaacagtctcagctggtggaccaccatccttaactgccaacgaaccactgcccgagtatgtgcttaaagcggatctagattacgccctcatgatgctccaccagcgcgacatgcgagtcgaggaaatgattgtggaactggtgcagttgctcgaggaacgtgatcacctgcaactgaagttgtcggacacactgcgccagttggaaactgagcggagtcgcgttagcgatgaaccaagtgccacggcatcctcatcagccgcctcgagcagcagtcccagtaaaatcagcagtgcgggcagcaacagcgaacttctgggcacgacgagcgcagcgggcagtgacctcaagcagaagctagctgagttgcagacggtgaagcattccaaggacaaggtcatcgtggacgagcgcgagcagcgcctgcagcagatgcttcaactgcagaaggacatggccaagcagggctcgggatcacaatcaggagcaggggcagtagcagcagtagcggcaccaacatcagcagctccaacagcaataggcgtggatctctctcaatccggattgcgttcgccatcgatgatgctcatggactggatactgggcaacaacaacaaggaggaggaggcgggccaccaaaccactggctagccaatttccatttcgcggcaagaacgaccacacgtccagaagcccgtactcctacgactagcactttaataacaaatcattacactaacttcgatcctggccttccttgtgcggacaatggcaatagcattagagttctttatacgatattatgtaccttggctagctaaaaaaaaaagctcatccccttggccgttcgagccgtattcccgatttgttccaaacgcgtacgttttatgttgtagatatgtaaaaattgtataaaacaaaacgaattgtgaaacgaagctgaagaaaaaccagaaaacttaactaaagagaatttaagaacta

SEQ ID NO: 13905 - protein, 2779 aa, DROSOPHILA
MAEDSGALESSYDFSIVQPDDHEYGEADIRLAGSSNDLSSLQNVSASTTRGTKGKGRLDSLKENLYKQQERLTALKERALRKSQDERHKSSMSDSMESLKTLGQKLTVLKTRSGDSSTPLVSPTKDSDPGDVSLLQTSGSEKLLMLTQRTEQNRALLEQRKRDLAKSLLSVKSNIGHQTTAELGSSMTDLRHAASVSNPPVSRHRSALDLEAQGQEAVDESRVKLLRSRMKLTELKQGRQEQELNELRTELAKRAKLIERLELSGAELQRTLTQRNEELEQLRVVQAEEDSLKVQENSRLQGEVLVLRERLAELENVNDLLETTRCELQEELTTARERQRNLELEQEQEKASRSPQSEAAHTDAQVSAELAKQLQELTNQLADLQATNEELRQQVAAQAKLQVTDEIVSQRLEELEATIAAQLLELQEQKSAMAAQNEELAEKTTELNVLNVNLRLLEEKLAQSSRSKPLFLEDHSEDSAASKQMQEDLQQLKLKLDETNKANIKLKLKCKQAEKKLQKFQSQDGQQQLASLLADNEELQQRIAVLEDEKGQWQLANMQEDDRQPEQSTESNNPLQLETIRLLEEQKLELQQALEALLSSSSSAESIEIVERHHLECLGQRRPASEGDAQEQKQVHPPGPSHVSELTQTEQTEEEDSSGETLSQLRERLELFTQERGEVLDKLEQLSAENLQLQARLEESSSSLQLLQREREKDLISSTSTSSNLSQELSSMQRSSEVVATLDAGEGGPVLFEKCEKSLSKLNSELEAYRKANDRQAKFNVSKKLAKEAKNCHTQLSELLHKVKEASTAVETVTVVETVVAVTAPNGKALAEYEQLNAQNAELKAVISRLRQELDELRESYPETEAPLAIVGSDSQREDEILQLQSQLEDARSLQAEQRQQIEEQVDQIKELRQTEAEQLQLVARQSAEITQLQLQSEQFDQLLNSKEMSHEKQLEQQTRIRRELEARAESLEGELSILQTLVAEQKQQLIESVSESEHALNLKMLELQSAQEELRELRAKEDPDQLREALRVSKSLVAQQVRELTSSQETVDALNQQIQEYQGLEHAHKEEQFKNRELREKLKKYALNLKKRTQDNADLEQKVQELTSQLQEQQELVKQKEEVEREPIVDNHRVEQLQQQVSKLNEDLKAKIHLNLENRDALRQLKQQIQEQEQLIQERDAELQDANLVSKELRRERQEADQEVFQLGQENSRLREEISKLQEEIHNLGQRVNEEPTAVEDLRRQLEAKSKKFEKSKELIKLRNATIQSLQRELQQLQQDQDSEVEHVRNARAAHEQLRLEKDAEITALRQEILKLERSRAAGEGDDTITKTSHQLLESQSQQQAESLQVAERELQQLRVQLTAAQEQHALLAQQYASDKANFEMTIARLETLHEGIQAKLQEDASYIESLEAQNTELQARSAALEEQAASQANQQAASQDKVQILEQQLKEQREQEEQKRQQDQQLQERFYELGQREQAQSRQLELLTSEAEESRQQLAGLRTEYESLLAKHSQLTATAQAEREQMSSHSQEELAELRQQLDVKEADLHRQRQVYDAKLAAKATELDELECDLNSHVERAAAETRELCQQLERSQELVAQRTEELQRLNEEFQEVERERSTLSREVTLLRLQHDSAEQDVLELQELRMQAMQDKTEMDNLRTQIDALCANHSQELQALQQRIAELDTLGQNQTDDQVYIETENKRLAEQLSELQAQLARQQHQQQQQQHHHPAVQSQQHPPPASLFFGGDALAAPSPFDEIAQPLRVSSLAASAPPPISPPPTIEDLQRNVSDLEKHAQDLETKLLARNQNLAEQEERRLQLEQRLSEVERLLSERTQQLADIQTANEERDRLAALEKLIQPAAAPTLDMFFGGQAEETVPDAVSHHLDLGLPQTEPVVEPLIQPKKAYLCQPKQEIQEQTAQTIDWGVDEDPWASAANEAPQTDVEHLHTRIAQLELQLSNAEQQKTELQTKAAKLMKRLKEYKTKATTTATPTVTVDNDLDSTIIEELKHQLQLQESRLSKAEEISQQHALEKEKLAKRIDVLTAGNDRMAEMKERQDMDVQMYQARIRELQEKLSQLDQWGEPAATVSSSLDGDEAARIESLQQEIQQLRQQVSELEDERTRDQAELGALRQSSQGYDEAEDNQKLELQQLRQQESELEALRTRDQSELEALRQSCQGHDETVRIATLQQDNQQLELQQLRQAIIELETLRARDQTELEALRQSSQGHDEAARIAIEQRDNQQLELQQLRQQLIELEALRARDQAELEALRQSCQGQQLSVDMASRNDEQMAQLQEKESEIVHLKQRIEELMREDQTEKLVFEILTKNQELQLLRMQVKQLEEDKEDQQVSAAPPKDDGETVEKLKSLCQQLQQEKSDMEEELRVLNNHVLSSLELEDRMKQTLLQLDTKNIEITELRRSLEILQSQNLGQNSAAEQIPDLSAINQQWEQLVEQKCGEVASIWQEHLSQREAAFKAQLEEVTQQQQRELPQSQQSTQGEATSDIMQKMQKALETQEMEIVTLKEQLAIRSAEYARLAAQYDPFRLQNRGGASGGNPASTTVSAGGPPSLTANEPLPEYVLKADLDYALMMLHQRDMRVEEMIVELVQLLEERDHLQLKLSDTLRQLETERSRVSDEPSATASSSAASSSSPSKISSAGSNSELLGTTSAAGSDLKQKLAELQTVKHSKDKVIVDEREQRLQQMLQLQKDMAKQGSGSQSGAGAVAAVAAPTSAAPTAIGVDLSQSGLRSPSMMLMDWILGNNNKEEEAGHQTTG

SEQ ID NO: 13906 - DNA, 5807 bp, DROSOPHILA
caatggcatttaatagatgattttgtagttttcaatagataaactataatcagatattttggttttgtttaattcaagtatgtagtatctttgattagccaggtcacaccttaaaggtctttgactgtgtggcgtagtactcgttgcggctgtgatagggcttatagggatcgttgatgaaatgctttgggcgccgccaatagctggtgaccatcttgtccagcagccagctctgcgtggcattggtgaagacgtgctgcttgaggcggcgtcgtaaagctgcggatttcttgaagagcttcttttggcgaccggaatgggtgcgtatccaggcgccccagtccaggcgcttaaaacgtttcagtaccgccttgacggtctttcgtttacccttcaccagcgagaatttggtcacgttgcgtgtgtttgatggtgttcctgtggctgctagcacacccggcagctgcaggagctggtgatgagcaggagatgccagtgatggcgtgggcaacaggcacggacgggatagagtcatcaaagtggcacgttgtgtccgctggaccagaggaaccaacgaagatgcagccggcgactggcggcaaacgcttcgcagcgctgaaagttaagaacaattaaagtaacgtaaacttgtaagccctattagctgacttcaacttaccgcttgtcacaaaagttcttagcatttcacttaaaacgacaaagataaacctataattccatacaaaacgcaggtgctcttcttcttatcgaatcgcgtaacagtcagctgtgtgccattcacagcgaacaaacatagattagcttgctattggagatgggaaccggtcatcataagaactatcgcaaatgttttgggattcacccaaggaatggatcaagttcaatttttcgttgataacaattaaggcaaaaggatcccttaaccatgtaatccatttgtagaacactgacaattctgacaatttaaaacttgttataaaaattgttgcttaaacttatgcgcccatctccaaatcaaatgtattttgactggcctatcgagtacatgcgtatatgttgccgacactttttccatcaaaacacaaaccaaaattgagtgatcaaattcgagtggcgcgggcaagcgaaacgaaaaggacgacgagcagcacgcaggactcgtgtgcgtgtgcgtgggagtgtggggaatggaagaggaagcagcagcactggccagccattcacccaccagcgctgacgcagtcgagccagcttcgaacgaattgggcaatatttaattcacgccgccgggacttgaaatttacggtagccgaaggagcaggagcacgagcagagcaggatcacagcaaaatcaacaccatgtatcggctagcggtgcgagatcagtgcaagtgcgccctgcaggtgaatttttgacccattcatttctagctatttgataacgtgaaaatcgatcgtcacgttgccccacacccccgcgcgcccacaaacaagcggttggcgaaaatacaacaagaggcgctggttatgtcatctaccaagcccaggaattgggcgaaaagctccaaaattccagttgaccaagggcgcgggggtatcaacgggcttgccaatttccttaaatgtgatggtcctaaatgtattacctttcattgcaacagcgtacgctgcagcagacgaccgcaaacaacaggcaattcggcggaagcagcagcggaagtggcggccgggaacagggcaggcggcagcaggaggagcagggacagcaaggcgatcaaggatatcaaggataccagagcctgccaccgcatatgcgcgaagctggcttcggcaaagtggtcctcttcgtctcaccactggcagctgtcggcggtgtcatcacctacgccaagtaaatagagccacaatagaggtttaagataaggataggcagtccacctgtagatcaacaaaaattcgtacacattttattgcacctgaaatgcttaaatgaaccatcgaataatgtagaaatccttttccagatacgacgacgacttccgcaaattggtggagaagaatgtacccggcgcaggatccgtcatcaaggtggctctgcaggaggaaccgccattcaagggcatcaccaagaacgtcaacgatcagatcgataaggtcaagtctggcatcgagacagtgacgtccacggtggactccgttacatctaaggtgacgggcctgtttggcggcggcagcggcgatgacaagtccaagaagtccaaagtggagcccgtgaaggccactcctgctgaggaaaagagaccctcaaaaccaagcgaagtcagcaagactgaagcgaagccagtgtcgaagccagcagcagcagcagcgcctgcgcccgctgccaagcctaaggataatccgctgccccgcgatgttgttgagctggagaaagccatcgagctgtctgctcaactggccgtcaaggagtacaacgtcgctattggcgttttgaaagggtgagcaattctcgttaactattcgttgcgtgattttaaatttaatcaaatatcgttcagctttaatgacgatgtccgtaaggttgtagacaaggccgtagagaatggagagaactctctttggaccacgctgaaaaatcgagcaagtgcccgtgatacggcagtggctacggcagagcgagctgcccgtgaggctcaggagaagattggtaagtccattgtttgttaaatagattccaaatttcagtaacattcccttctatcaactgcagtcgcctgcgagatcgccctgagtgctgcggcaacggcccaaaacgcaaagaaagtagaggcagtgcgcgacaagatcaagaagcttgtggaccacattggcaacgtaaaggacgagctttaccggcacaaggacacggccagcgtgtcagacaagtactggcggaatgtggagaaggcgcgaaactacttcattgacgagatcgagtctatcttccccggcctcagtttggcggataagaaacttaatctgtcaaaggaggacctagacttgttcatcctgcacgcctacacccatgtcctggcctaccagaaggagctgcagcgcttgcaaaccgatggtgagctgcgcctgaagagagctattgactcggttcgcggtgacaacgattcggaggctttgcgcgcccaactggaataccatttggaggccgagcggcgcaaactggccgtggaaaatcaaaagaaaatcttccacatccacgccgagtctgataagctgctgcgcttgcagctcaaaaagcaagcagaggcccacgccgatcatataaaggacatcgtggcgcagcgggagaccgatctgacgcgaagctttaagcgtgaacttgaggataagctggcgaccgaaaaggccaactataagttacaattggccgggatgctcggcaagctgcgcggaatggacgcggctctggcaggtaagttatacgttttaaacgatatcggttgaatgtagctagtgtagcgtggctagatatataatggttttcaaaccttttcaaaacatgctgctatattagagatagaggatgagtttcaaggtatattcaccctatatgaagggtagtacttataccaacttattcttggtttaatcaaaatgtttattgacattatatgcaacatttttgcagagcgtgcggatgcagagcgtactgccaatcaggcgcaggccctttgggccgcctgccaagctctgtgggcctccgtgcgcgctgccactcctggcgtgcactataaggataggttgcgcccgttaaagaacgagatcaatgccattgccaaggtggctagtaagttgaaacgtttcccacatttcgatttcagttgctaaatgcatatgcttacagagggtgacgacctggtggccgctgtgctggaaagcgtcccgaaggaggctcaggagcgcggtgtctatccagaagatgcattgcgcgagcgtttcctgaatgtggagcgcgtggcgcgacgattggctttggtgcccgaggaaggagccggcctgcccatctacttcctgtcctatctgcaatcgctgttcatcttgcgacccgataatcccatatccaaggacgaactcgagaacaaacccttcgactatagcaaactggacacctacgatatcctaaacagggccaggtgaggcgattgattcatctatcactagagttatataatatatattatatatattatgtttcacaggtaccatgtggatcgcagcgactttctgcaggcgctcaagtacatgaatctgctgcagggtgcatcgcgcaagattgccggcgagtggatgaaggaggctcgcctcatgctggagactcagcaggcggccaacaccttgatggctcacgccgctgccagcggactattgtatttgtagactacgtcccgtgtccccttccttcagaaacaagatgatacacttactatttgttattagtccaggagaagatggtacgattaccaacaatatgtaatttgtccaattagcgatcacagttgaaacgaaatagcacttatatacatatatttgtaacattttgtttagcttcaattatacaaattaaacatagaaaccatcattataaaatccaaaacataaatactctgggaagatttgtaaaaaattcgataccaaggcatgaatggaatatgatatattactaaagctgaaattggcaagctttgtgtttctgaagaacaatgtgattaggccataaataaacataaagaacatccacttgttgtttaatttagcgaaaaaaattaatataataaataagttgactaaaaagtatgctgaatgtcaaaattcaaataaaatgcattggctaaatttaatttctctgttctgaaaagaaagcatggtaggcaaggcaaatgtattcaaaaacaggttactatgcggttgccgccaaatttattccttaaataatcgtatatgttcgttactaattttcgaacgccaaaatcgcgatagttggtcgttagccagcactggacgcgccagtttcgtgggcggctatcgccagccctggtagtcagaggcaatcagctggtttgcgtggtcgatttggtcctattgaaatttttcggtttggcaccggagcaaaaatcacatcgcaatcaaaaatttcgcgtggccaaaggacacacttttgagtttggatcaacagccgggaagatctagctaaccgaatagcaaaatgtcgatgctggcgagaacagttggacggacgttcatgcaggtaaacggccatccaaaccgcagctcttacataaacacttgctcgcgacgcgctgtgcgaatatttctgcgctgaggcctagttcttatacgtttcttttttttttttttgaggttataatcctagccagccttaacgattacattgcattcttctcgttttaggctgcggcagcacgtagtctgcacaccacgtcgacgctacgggctacggtgagtgttaaatgcgcttattaagtggcaccagttgtaaccggaaaataattggtcttgcaggataactacggcgccaacaggaccacctgcacactgattcccggcgacggtgtgggtcccgagctggtctactccctccaggaggtcttcaaggtagctaaccatccatcaagttgcaatcattcacatacagtattccaatgcgtcctaattcttataaatctatactcttgcgtctcttgatctctcttaaaaaaaaggttatttaagct

SEQ ID NO: 13907 - DNA, 2955 bp, DROSOPHILA
aaattgttgcttaaacttatgcgcccatctccaaatcaaatgtattttgactggcctatcgagtacatgcgtatatgttgccgacactttttccatcaaaacacaaaccaaaattgagtgatcaaattcgagtggcgcgggcaagcgaaacgaaaaggacgacgagcagcacgcaggactcgtgtgcgtgtgcgtgggagtgtggggaatggaagaggaagcagcagcactggccagccattcacccaccagcgctgacgcagtcgagccagcttcgaacgaattgggcaatatttaattcacgccgccgggacttgaaatttacggtagccgaaggagcaggagcacgagcagagcaggatcacagcaaaatcaacaccatgtatcggctagcggtgcgagatcagtgcaagtgcgccctgcagcgtacgctgcagcagacgaccgcaaacaacaggcaattcggcggaagcagcagcggaagtggcggccgggaacagggcaggcggcagcaggaggagcagggacagcaaggcgatcaaggatatcaaggataccagagcctgccaccgcatatgcgcgaagctggcttcggcaaagtggtcctcttcgtctcaccactggcagctgtcggcggtgtcatcacctacgccaaatacgacgacgacttccgcaaattggtggagaagaatgtacccggcgcaggatccgtcatcaaggtggctctgcaggaggaaccgccattcaagggcatcaccaagaacgtcaacgatcagatcgataaggtcaagtctggcatcgagacagtgacgtccacggtggactccgttacatctaaggtgacgggcctgtttggcggcggcagcggcgatgacaagtccaagaagtccaaagtggagcccgtgaaggccactcctgctgaggaaaagagaccctcaaaaccaagcgaagtcagcaagactgaagcgaagccagtgtcgaagccagcagcagcagcagcgcctgcgcccgctgccaagcctaaggataatccgctgccccgcgatgttgttgagctggagaaagccatcgagctgtctgctcaactggccgtcaaggagtacaacgtcgctattggcgttttgaaaggctttaatgacgatgtccgtaaggttgtagacaaggccgtagagaatggagagaactctctttggaccacgctgaaaaatcgagcaagtgcccgtgatacggcagtggctacggcagagcgagctgcccgtgaggctcaggagaagattgtcgcctgcgagatcgccctgagtgctgcggcaacggcccaaaacgcaaagaaagtagaggcagtgcgcgacaagatcaagaagcttgtggaccacattggcaacgtaaaggacgagctttaccggcacaaggacacggccagcgtgtcagacaagtactggcggaatgtggagaaggcgcgaaactacttcattgacgagatcgagtctatcttccccggcctcagtttggcggataagaaacttaatctgtcaaaggaggacctagacttgttcatcctgcacgcctacacccatgtcctggcctaccagaaggagctgcagcgcttgcaaaccgatggtgagctgcgcctgaagagagctattgactcggttcgcggtgacaacgattcggaggctttgcgcgcccaactggaataccatttggaggccgagcggcgcaaactggccgtggaaaatcaaaagaaaatcttccacatccacgccgagtctgataagctgctgcgcttgcagctcaaaaagcaagcagaggcccacgccgatcatataaaggacatcgtggcgcagcgggagaccgatctgacgcgaagctttaagcgtgaacttgaggataagctggcgaccgaaaaggccaactataagttacaattggccgggatgctcggcaagctgcgcggaatggacgcggctctggcagagcgtgcggatgcagagcgtactgccaatcaggcgcaggccctttgggccgcctgccaagctctgtgggcctccgtgcgcgctgccactcctggcgtgcactataaggataggttgcgcccgttaaagaacgagatcaatgccattgccaaggtggctaagggtgacgacctggtggccgctgtgctggaaagcgtcccgaaggaggctcaggagcgcggtgtctatccagaagatgcattgcgcgagcgtttcctgaatgtggagcgcgtggcgcgacgattggctttggtgcccgaggaaggagccggcctgcccatctacttcctgtcctatctgcaatcgctgttcatcttgcgacccgataatcccatatccaaggacgaactcgagaacaaacccttcgactatagcaaactggacacctacgatatcctaaacagggccaggtaccatgtggatcgcagcgactttctgcaggcgctcaagtacatgaatctgctgcagggtgcatcgcgcaagattgccggcgagtggatgaaggaggctcgcctcatgctggagactcagcaggcggccaacaccttgatggctcacgccgctgccagcggactattgtatttgtagactacgtcccgtgtccccttccttcagaaacaagatgatacacttactatttgttattagtccaggagaagatggtacgattaccaacaatatgtaatttgtccaattagcgatcacagttgaaacgaaatagcacttatatacatatatttgtaacattttgtttagcttcaattatacaaattaaacatagaaaccatcattataaaatccaaaacataaatactctgggaagatttgtaaaaaattcgataccaaggcatgaatggaatatgatatattactaaagctgaaattggcaagctttgtgtttctgaagaacaatgtgattaggccataaataaacataaagaac

SEQ ID NO: 13908 - protein, 739 aa, DROSOPHILA
MYRLAVRDQCKCALQRTLQQTTANNRQFGGSSSGSGGREQGRRQQEEQGQQGDQGYQGYQSLPPHMREAGFGKVVLFVSPLAAVGGVITYAKYDDDFRKLVEKNVPGAGSVIKVALQEEPPFKGITKNVNDQIDKVKSGIETVTSTVDSVTSKVTGLFGGGSGDDKSKKSKVEPVKATPAEEKRPSKPSEVSKTEAKPVSKPAAAAAPAPAAKPKDNPLPRDVVELEKAIELSAQLAVKEYNVAIGVLKGFNDDVRKVVDKAVENGENSLWTTLKNRASARDTAVATAERAAREAQEKIVACEIALSAAATAQNAKKVEAVRDKIKKLVDHIGNVKDELYRHKDTASVSDKYWRNVEKARNYFIDEIESIFPGLSLADKKLNLSKEDLDLFILHAYTHVLAYQKELQRLQTDGELRLKRAIDSVRGDNDSEALRAQLEYHLEAERRKLAVENQKKIFHIHAESDKLLRLQLKKQAEAHADHIKDIVAQRETDLTRSFKRELEDKLATEKANYKLQLAGMLGKLRGMDAALAERADAERTANQAQALWAACQALWASVRAATPGVHYKDRLRPLKNEINAIAKVAKGDDLVAAVLESVPKEAQERGVYPEDALRERFLNVERVARRLALVPEEGAGLPIYFLSYLQSLFILRPDNPISKDELENKPFDYSKLDTYDILNRARYHVDRSDFLQALKYMNLLQGASRKIAGEWMKEARLMLETQQAANTLMAHAAASGLLYL

SEQ ID NO: 13909 - DNA, 8479 bp, DROSOPHILA
acggaactggcgcacgagaagaaggcgccgttgcccaactttcagcgggcgcagcagccggttcaccaccagggaaacagtgccaccaaccagcaggatcagatgacccagcaggaaaaacttcagaagattatcatgcgcgagtcggcagtgcacgagcgctggcgctagtcgtcctcattaccaatcttcaccagaaactggatgcagaaccaacgcttgcttccaaacaccagaagaatccattgaaacgaaaggaaaattgtcaagtgcagggcgtatgcagctcaactgtatttgatttgtttaccaggatcatcaaaatttgtggaattgaaggcaaaattattagaagtatgaattgagcacaatgacacgattagtgggagactcacctgttctgaagaccgaaacacacactggcgttgaatagtcacattccacaaacgacggtcaattaaaactaaattaagagtccccagcacgttgatgcaaatgtattgaatataattaaatatttgaactaaacagaagatttacttgcaatgaattgtcatttcttagatacttggcggaaaggtaaaagaatcataatccattgaggctttaaaagcataataagatactaaaatgggtatatatatttttaaatttatcgaaaaaatcgatgagaaatcgcttcctctctagtccactatctaatatgtaaagaagaatgatatcgatgtattacagaagcgcttcgatacccagctcgagcaatcgatacgatagctgtgcatcgatacattcgctcaatgaagctgactgcacgcacgtccgttgcgtcaccggcgctaccttgccttaccgtttaccgttcaccgttcaccgttccgttccgtgccgagctttggcggtcaagctcaaagtttctgtgcgctatctctttcgcgcttgcggcggcggcggtggcgttggcggtagtgggtcgtgtgcagggaatacaagataggcgatgagcggcaactcgggcggatcgaagccatcagtcgatcgcaacaggtgctggtggtcacaggcgggagctgccggaatcgaacggaatcttgttgggactgtctgtcgtcggtggcctttggagaacatagaagagcacatctgtccgctgttgttcatatataattttttccgtgcttttcgcgactctttgttttttctgtgtgtttctgtgcctctgtgcgtttccgtggccaaggcgaccaacttattccggctcagctccaatagtcaaccaatattatacgaaattcgccatagcaaacggggacaatgaggtaagagtggactaaagcaacggtagatgcaatcggtgtacagtggagactctgtaactcgaaccgccaggatattttggaccataaccgccataatattggcttcgagttaagagagttattgcagtatacaactaatttaataagcccatattgatatttaaaagtgcggtagaccttgagacagtgaaatcacaattaacttcgctaactgtgaaaattctaatgaatgtctcacctgtgcaaattcgatgcgaaaccaaaacacggttttcaaattggacacaaatctttaatttgcaatggcttaaaatgcagcctaatagagaaattattactcgtggagcttttttttttgtttttttttataataacttttggttccgctagtaagcccagtttcaaagttttacacgtttttgccaccacaaaatcgaaccgaacagaaccgattattattattattattatttgtgcacttgtgtaaatacaaaacgtacaaaaagcacaacaaatcatttagtcactttcagttattagatattagacatttggcgttaagcaagttgaaagatcgagatcggtatctctgctcgccgcaattaagttgccccattattttagcggcaagtcgcatagcattgccaacaccccagatcgtgtcagataagatatatcggtagatctgcccatttgcacgacatcgttaagtaatgtgcacacatgtgctccccctccccctccccccccattcgattgtccagctgaaatggatacatccgattttcggtcatccaactggcgcgctctttttgtgaccgcctctgttggccgaatctcaggacacccgaaatgcgtcatatccatggcaatgcgtttgttccaagacaagtttatcaaaactgtcgaatgtgggcaattagcgggtttagcgcttgattgccccactttacgacgccccataagatatagtaccgtgtacatggctcagatatggctcagatacggtcagctataaggggcatgaagtttatggcgcccgcagaggaaacacgcgaattttttgaggaccgttcattcagcggggatcattgacagccggtgcaatttatggatatatacagcgataagattgggatatcacatggcagtgaattttttgtttttttttttttttggggcctgcgacccccacgaaggcagtgccattgaaatcattgaaatgcgactattatggtcataaaattgattagcgaacggctatggaaactggtttccagtcgaggaatccccccgccggtattttgcataattcgtgagaacccgcagcgcaattatcgctggaaatgagcactgcaccatacgctactacacgtactcccccacttcatccacctgtatcgtcgtagatcccatccgatccgcacctgccgccaatcggccaaggatgactttcgttcctctcggcaacgtcactgacttatcttcgagctccgctgcagacacgattcgattttgatgacggggcacatttggcgaggggaaaaaaaagcactgataaatggaaatgtgctgactgttttctgattgaaaccgtttgtacaatgtcgcagctgcgatctttggtaattaaacgatgtcaacattccggagatcactagatatcttcgcggagcaggaggctttcatcttggaaaaaaaagatgccatccgtaacatattaactaaaatacatatgtggtaagggtactttgccatataacaaacagcagcacttgagttccgtgaaaacagtttgatcaccttttatcagttgtttaaagatctcttcagaatcaagtgcattcgcaagtgttttgagaatatttcggaatttttatttctccatcggttcaaagaacatttccataaacttttacggccaacggtttctcgactttgaaattccgaaaatgcccacactgataaaggcggataaaggggctataatcccggccagccagccgaccagttggccaatggcacaattgccgatcaattggaggcagcacaatgctaccgatggtagtaaatccattaaaggtgaagtaacaaggagtgagagtgtagtgcctgaatgaaccgaatcttatcgtcgaacgataaccgcacataataataataataataataatatgcagatccagttggtttaccataccgaatgacggggcagaaatggagcattggatttgcaaagcgatggcccttgaggatcttaatctgcagacgggacgcgataatcgatcgtatcgatcgaaatatttgggatcgcgaatgtggaggacgcatttttcggcgttacggccactaaatcgaagtacttgcgactttccccccgtagaaatctacgttaattatagaaaattgcctgttaatagcgcttgagttttacgatctctgtttggcatttttatggcacgttatcgaagacttgggcactccacatccattgccgataagtcgtcaccctcgccccggacagatggtggagggtatgtccggactcatccggtacgtggacatgactgcgcctaagcgcacctacgaatatccctttgtcatgggacactccacacagcggggcaatcactcaactgcggccgtagattgtggatagcctttatagtgggcagctactgaatctgcagatagctgcttttcattcacctgctttccagatagatcgatcgcaatgattcggctaatttgatttaactagtgccctagtgtccatgtccagagattacaatccaggctatcaagttggcaaatagaccgttctattctaatctcacactttgtttacttctggccatcgtgaccattataaatcttatataataacacacataattcaagtatagccattactttagactcctatttaaatttatgacttactcttaaatatatagatattatgctttgaaagtataatagtgtatataaaccagttaagcgcttctttagttttatcttgtgtagtagtagtatcgtttcagtagaagatttgcatctagaattttcaactttaagaattactaacatattgcgatgagcttgtctaccttaagcatgttcgtaaatcgaaatgtagggtatcaccgtgtcgaggcggcctgccagcgagtgactcggcgaattggctgttttccgatagcggcgtccaaaatcaaagctaatcgacaccgccgatccaccactccactcgaccaggtcctccagctcttcagttttgagggcctggggccactgatggcgatcgagatcgcgatcgcatccgttgattgtctgactctaatgagattctcaacttgcaggattgtgtggagtaagaagctcttgctatggctactgctggctgccctcatggtgacggcgttgactctgggcttggtcttcggtctgaagaatcgggacacgctgtacatcagcggagccgtggtgtccaatggcatcggatgtgctgcggtcggcggtgaaatgctgaccgatggcggttccgccgtggatgcagccattgctacgctgctgtgcgagggcctgctattgccgcactcaatgggcattggcggtggcttcgtggccaccatatatacgcgaagtagccgcaaggtggagacggtgattgccagggaatcggcaccggcggccgcgcacaaggacatgttcgtgggcgagacgtcgattacgggcgccaaatcgggtgcggtgcccggcgagattcttggctactgggagatgcatcgtcgctatggcatcctgccctggaaacgcctcttcgagccgtccattaagctggcccgcgagggtcatgttgtttcgcgctatctggccgccgccatccaatccaagctggataacattaaggcagatcccgggctctcggccgtgttcctcaacgcaaccggtgatccccacttggagggcgattacatgaagcgtcccgcgctggccgacacgctggagcggattgccgagaatggagccaaggagttctacgatggcggcgagacgggtcgcaagttcgtcgaggatatccagaagatgggcggcatcattacggagcaggacctgcgcgattacacggtgcgctgggagagcgatggacacgtgtcggcccatgtgagtggcacgtacacgctctattccacgcccatgcccagcagcggacccgttctggccttcatcctcaacctgatggccgatctctatacggacaatgagccgatctattggcagcgcgtggtggaggcctttaaacacgcctatggccagcgcaccaatctgggtgatatgtatgccgatcccgtgagcgccgcgtccatcaatgccaccctggaggagatgctcaagccggagttcctggagagcgtaaggaagctgatccacgacaatagcacttcggaggactacctctactatggcgccaacttcaccgtggaggaggaccatggcaccgcccacatgaatgtcttggccaccaatggagacgccgtgtccatcaccagtaccatcaataactagtaagtgttcatagaatttcatatttagtgtttagggatttactaaggattacgaactaaggatgggtattcagatagatatttggggatttatggaattcgcaatacactcaactcctagacaatttaactcagaaaacaattattttgaaatttattttaattgcaagcacacgaaaagtgctcgcacattttttcccagtgtagagacaccattcggtttggccgaacctgtgcgcaaccatgttggaagctagatgacacttttcaccatacccaacatgtgcgaagcaacagcaagagtggtgagagttctctcccacaaacaaaacagtgcatgtgagcggtgcacacacatatattaacattctcctttcccaccatgcttttgaatcgaagctgcaggttcgattgacaaacacacacatttgaaagacaggggaaactcttggttttttttcaccttggtggagaaaccaatttgtgtcgctagctacgaagttgttgatactcaacgagctagccatcgttcagggtttttaattgacttgcaaatgctgcggataaagtaagcaggtaaaggtgtaaggaggtccaaaaattgtctatacacataaaggcttacaatgggctatcaccgaaaaatcttttgtatttgtgtgtaaatagtggtttagaatagcggttttcccatataccaatattataaggtcgggtttgagtctggactaaggcctaggaaagtgcaactcaagagttcgcgctttttattaactttcatttgtatattacctatattcacatataaaccctttacagtttcggctccaaggtggcttccacccagacgggaatcattctgaacgacgagatggacgacttctccacgccgggcgtgatcaatggcttcggtgtgcccgcctcgccggccaactacatttatcccggcaagcgtcccatgtcctcgatgagtccgtgcattattgttgaccaggaaggcaatgtacgtttgctggtcggagcagcaggtggcactcgcatcaccaccagcgtggcagctgtaagcacttggcgttaattgcccttaagcatataattataattgaggttcttgtccatcaggtgatcatgaagtacctgctacgcaaggagagcctcaccgcggccgtgaacaatggccgcctccatcatcagttggctcccatgcgcgtgagctatgagcaggaggtggacagcagcgttaccgactacctgaagcaggtgggccacgagatgtacgaggagcccgtcggctccagctttgcagcagtgaccgccattggggcgctggagcagccggagccattctatgatcgccgtcgcatcggcagcgccctcactctggccaaaaccaacaagatgcagcattaggatgcgtgtgattttatttatttaatctagttcgtaagtcgcatgagccgtggcctgcgagtaatgtttaccagtatttcgaatagagagtgttttcgaaaattccttttttatgtacataactaccaggctgtgagtgcccgatatatccaaataaacggatttttgttatcctttttccacaagtgcctaggtatctattattcgaggtggattagtgtacacaaactaactaatttttggatgtgccagttttggttggatctcggtaccaagtcgcggatggaccagactaaattgtaccgtaggtacgtgtgaagctgcttcctggaatactgtactctccagcttgtacctagtagacagaaattcaaagaaaagtgggcgtgaaaagtggttacaatgtaccttcgaatttccgcgcgaatgtaggcaggattttcaaaaaaaaaaaaaaaaagaacaggacacgagttcgtcgatggaatcggtcgtcgctgtgcctcgcgttgcgtcgtctgcaacatgttgcacaacatgcggcggggtgaagtgaaaatgtgtatggtggtggtggtgggtctgctggctgggcaacattttcattttcgactgcgtttgttaccacgaaagacttaaatgccgaaccgaacgagttcttcagttgtttacaatttgtcgttgagggtggattacttcgtcgcgagtttcgttcgtgcatgatgcggttgtggttgattgtatacatacatactatgcacaaatccagttctcattttgttattttacaaattctcagcgagcgcatgaactggcagcctatagcgagcagctaatcacaatatttacggcagattcgtggactcaaggaaattcagccagcagccaatcgattttctagtgttatcgaaaaacatttttcattccttcatttcgttcaacatcaaatcaagtcgagtcgaatcaaatgaaatccaatcaaatcacaaaatcacatcgcatcagctgaaccgaaccgaatcgaatcggatcgaatcgaatcgaattcaatcgaatcgagttgaatcgaactgaatcgtcttgaatggaatcgcactgaaacgaacgagaaggaataataatagaagtaacaatactagttactactaacaatactctgtaatagtaatagtaagaggaacagga

SEQ ID NO: 13910 - DNA, 2236 bp, DROSOPHILA
agcggcaactcgggcggatcgaagccatcagtcgatcgcaacaggtgctggtggtcacaggcgggagctgccggaatcgaacggaatcttgttgggactgtctgtcgtcggtggcctttggagaacatagaagagcacatctgtccgctgttgttcatatataattttttccgtgcttttcgcgactctttgttttttctgtgtgtttctgtgcctctgtgcgtttccgtggccaaggcgaccaacttattccggctcagctccaatagtcaaccaatattatacgaaattcgccatagcaaacggggacaatgaggattgtgtggagtaagaagctcttgctatggctactgctggctgccctcatggtgacggcgttgactctgggcttggtcttcggtctgaagaatcgggacacgctgtacatcagcggagccgtggtgtccaatggcatcggatgtgctgcggtcggcggtgaaatgctgaccgatggcggttccgccgtggatgcagccattgctacgctgctgtgcgagggcctgctattgccgcactcaatgggcattggcggtggcttcgtggccaccatatatacgcgaagtagccgcaaggtggagacggtgattgccagggaatcggcaccggcggccgcgcacaaggacatgttcgtgggcgagacgtcgattacgggcgccaaatcgggtgcggtgcccggcgagattcttggctactgggagatgcatcgtcgctatggcatcctgccctggaaacgcctcttcgagccgtccattaagctggcccgcgagggtcatgttgtttcgcgctatctggccgccgccatccaatccaagctggataacattaaggcagatcccgggctctcggccgtgttcctcaacgcaaccggtgatccccacttggagggcgattacatgaagcgtcccgcgctggccgacacgctggagcggattgccgagaatggagccaaggagttctacgatggcggcgagacgggtcgcaagttcgtcgaggatatccagaagatgggcggcatcattacggagcaggacctgcgcgattacacggtgcgctgggagagcgatggacacgtgtcggcccatgtgagtggcacgtacacgctctattccacgcccatgcccagcagcggacccgttctggccttcatcctcaacctgatggccgatctctatacggacaatgagccgatctattggcagcgcgtggtggaggcctttaaacacgcctatggccagcgcaccaatctgggtgatatgtatgccgatcccgtgagcgccgcgtccatcaatgccaccctggaggagatgctcaagccggagttcctggagagcgtaaggaagctgatccacgacaatagcacttcggaggactacctctactatggcgccaacttcaccgtggaggaggaccatggcaccgcccacatgaatgtcttggccaccaatggagacgccgtgtccatcaccagtaccatcaataactatttcggctccaaggtggcttccacccagacgggaatcattctgaacgacgagatggacgacttctccacgccgggcgtgatcaatggcttcggtgtgcccgcctcgccggccaactacatttatcccggcaagcgtcccatgtcctcgatgagtccgtgcattattgttgaccaggaaggcaatgtacgtttgctggtcggagcagcaggtggcactcgcatcaccaccagcgtggcagctgtgatcatgaagtacctgctacgcaaggagagcctcaccgcggccgtgaacaatggccgcctccatcatcagttggctcccatgcgcgtgagctatgagcaggaggtggacagcagcgttaccgactacctgaagcaggtgggccacgagatgtacgaggagcccgtcggctccagctttgcagcagtgaccgccattggggcgctggagcagccggagccattctatgatcgccgtcgcatcggcagcgccctcactctggccaaaaccaacaagatgcagcattaggatgcgtgtgattttatttatttaatctagttcgtaagtcgcatgagccgtggcctgcgagtaatgtttaccagtatttcgaatagagagtgttttcgaaaattccttttttatgtacataactaccaggctgtgagtgcccgatatatccaaataaacggatttttgttatcctttttccacaa

SEQ ID NO: 13911 - protein, 561 aa, DROSOPHILA
MVTALTLGLVFGLKNRDTLYISGAVVSNGIGCAAVGGEMLTDGGSAVDAAIATLLCEGLLLPHSMGIGGGFVATIYTRSSRKVETVIARESAPAAAHKDMFVGETSITGAKSGAVPGEILGYWEMHRRYGILPWKRLFEPSIKLAREGHVVSRYLAAAIQSKLDNIKADPGLSAVFLNATGDPHLEGDYMKRPALADTLERIAENGAKEFYDGGETGRKFVEDIQKMGGIITEQDLRDYTVRWESDGHVSAHVSGTYTLYSTPMPSSGPVLAFILNLMADLYTDNEPIYWQRVVEAFKHAYGQRTNLGDMYADPVSAASINATLEEMLKPEFLESVRKLIHDNSTSEDYLYYGANFTVEEDHGTAHMNVLATNGDAVSITSTINNYFGSKVASTQTGIILNDEMDDFSTPGVINGFGVPASPANYIYPGKRPMSSMSPCIIVDQEGNVRLLVGAAGGTRITTSVAAVIMKYLLRKESLTAAVNNGRLHHQLAPMRVSYEQEVDSSVTDYLKQVGHEMYEEPVGSSFAAVTAIGALEQPEPFYDRRRIGSALTLAKTNKMQH

SEQ ID NO: 13912 - DNA, 12646 bp, DROSOPHILA
aattttaattctttctacgtgagattcttacagttctaaaaagtctaccccggtatatgactaataggattttgacctttaagacacggtccaattgggacttgtaaaaaatgatttctaagaatttgctaaaaataatttgaaatggaaaaatacttaactgaaaataagaaataataagaaaatatagaattgtttacccaaaaataaaaaaattttaattgtaaaattgtcaattaatttatttttaacaatatatgtatgattacacagtttttatagttgaataataaaaacttttcaataattaaaaatttgacatagagacaaacttttgcattatatatgcactttctgtatttattaaatgtttatactaaaaggttttttccattataataatatctataaaaaatttttatagaaaaacacttaagaccaatcaaatttcattttaccggtttgccaatcttttgaactttgacattttatcaatttcaccgatcggaatcgatacttatctcggtcttcttcttccccctttccatcacacttcctgtgtatgtgaatgcaaatttaatgggcgagggggtggtgggtggctgcgagggcggaggctgcagctcaaaacaaacacaaaaatacccccacatacacagcgcgccgcccacacacacacacgtactcgcagacgcaggcacatagacgatgtaaagtttttcactgtttataaaaccttatcaatttcacttactttgcagccattgtgtattgcacttgtaacctctcgttgtcggaagattattgcactttatttctgcttcattttattcattagtttttatttttctttgcagaggaacttacggcgctgccataccttagtgttactaaaaatcaccgtattgcatagctgctggtagtcttcaatactagcattccgttcggtatatttgtgtggtatattttaggaggcccactgcggtcacttttaaaatggccgtcgatcagtgaagttgtatacacttttttcgtgttccgtgtttttcgcttaatttgatcgtttatttaaatgtttttatgaattttggtgagttgaaaagctgatcgaatgcagcctgctggcaaaggattcgatcgaaaaggattttgtgcaaacttcgagtgcccgaaatagtgttttctatccccaaagacaacccccgcatagcgtctctcacctccaggcaacaacaacacacccaaaagagacgcactggaagcataaaaagcaacaaacaggttttcattgtgtacagacgtgtgttgctctaccctctcgctctcgcccccttaatttatgcgcatgcagcaacagcagcagaaacaacaaaaccaacaacatgtataaagcaacataagaaacaagtaatacaagaaaataaatcattgagtgtgagtgtgtgtgcgtgcatgttggctgtaaacagcagccaaagtggtaaagttgagtcgaatcgagtcgagtcgaaaagagaagcggataataagtggcaaaagaagctgaagcaaaagagttagccagcttagaagtgacgcgtagctacaggtgaatatatcggacttgtttttcaagcgcgagacaggcggtggccgctggtcgctgctcgctagtctgtggaacagtaaaacgggtttatggttctgatgtccaaaaagaaatagaattgaatcgattagcagcctaatcaatttaccactgagctgcaacggtaaacggcaaatggaagttgcatttacatacaaacgtatgcacaagttccagcccatgttcccaatttccaaagtgcgtttccccccctcatttcaagtggccaaaattggaacgcgtcccacttaaccccactgcggtgcaggctgtccaaattgaccctcgtaaataactcccacatttgcggcctctgtgttttgtgaatgaaaacttaaaaaggaaaaactaaaaacttgtcgcgccataactacgcctctccaaaaaatgaaatcaagaaaaaaaaagaattagctgaatcatctaaatatatagtaaactggttcgtctgcatgattcaccgaacatcggaagtccggtgataaacctatcctacagaccatgtctgttccgtttatttttgtttgataagtggaaaataagaaaaacagaacagagcaatgaacctccggcgatagcggtttaacaaaagaaaacagacttcacaattgataattattcattaaaaaaaatatatacacactacatgcagagtgtcattacatcagatcagagtccaagctccaccaaaactggcagccagtcgggctccaaaaggcaacatccactacacgccactcgaatccacctgttgccactttgttcggcttaataaaaacgcccacggacccaaacgggttgtacagtgggcattcttcgagtaagaaaaacaaattagaatcctcctcataaaacaaatgaactcttattactacgttttcttctttcggaaggcaacatatcactagatagatagatagatcaccaaaaaatctgctaaacttaatgtatgtaatgcaatttcaattgctcattacctaaacgctgaagataaaagccttaaaattagttcaaccctagttgggaaaactgatttgctcaaaaagtaatacaacctatcagaaaatataattgggatatcaagactcatacatttaggtaattgaaatgtagttatgatggtctttaagtaaatgattattaaacgaataaggaactttcataacaccactttgtaattggacattatctgaaaaaagtgttttattaccggcgtagtaaaggctgtaattcaactcagcggggcctcactgtctcaggcgatttctaccgtgggcggacgattgtaagcggtgcatatctaataactacacgctgaaatcaattttgtattgatcacgtctgtagtaaggaaccctgccagttcttagatgtttacacttttttactagaaaaaaacgtatctccatttaacacgtttttgtcgggcttcccacacgcaggaaaaaaaaacaaaaaaaagatgaggtagaaaaagggagcggcaacaagtgtcaaacgtgacatacttttcacccttatcttgatgaggctgttatctcgcaactcttcgaaacccatgcttatcagcggggaggtggtcgggcgtgccacccaactatcccaaaaatagtggcacacattcgtaacttgatctcgaatgtgagctcattaatttagcgccagacggtcagttttttgtggaactggcataattgtatctgtatttttatgggctgccagaagcggaacggacttcctggcattgaacccaagtgtgtggcttgtgaaatatgagaacgccactaaaaaaaataaatgaaaacttacgaaaacgccggttgcaagtgtggttacctcgataagccaaataccctatgtagcaataatatatataaggtcaagaatagatatatatgtacgactaagacctttctaactacagcagagaggagaaccaagttgctgagatctaggtgccccagaaaaggtgttaattagctgtctttattcctagatgactgattatttctgtaagtggctccactgggctacaactaaaagaagaagtaccgacccaagtggcggtcggtaccattcgctgatttctccgctcactaagccgcaaaacggagtgataaattgtgccgctgaagagggtattcaaatgtaatttatattatttattatgcacttttatggcatttctcgtacgtgggttcttgaggccaacccccatcatttgagggcattaaagcggccaagaagatgggccgcaggtcacttaacctgacctgtgacttaaaactctggcggctgagccgtgaaaaaaccttcgcttaggtaaatgaaagacgaatacgatacgttacgttgcgacgatgatacagaccaccaccacgaatcaaccgaattcattgagcgaaacactacaacaactactacttgttgccaccgaccttcaattggccaataaagccatttatcggagatcccagccaaaccgatccgaatcgtcggtaggtaaaagttgtccatgtgtaacccaccgactttttgggtgcgtgagaaactataacattcgagtgtgcgtcttgagaaaaaaaaaaaaaaaacaactgaaaacctgaaaacccgcatggaaattacgtgtgtgtgtgtgaatgaggaaaacacacctatgtatccgctcgaatgtccggtgttcgccgcgggaaaaaagatggaaaagtagtcagttgtagagcgtcagcggcacgtcctgaaaatcgtagttcagcgctgattaggagggaaattggcggaaaataccgcacgtgattcccaacaaaagcaggaaaacctgactggcggcatgagtcatgctcggaaaacacgacatgtcagccaggacgcggaatattggttgggattgggaatcatacagtgaggctttccttgcaaaaactattacgtttcttatatatttccttgttataattataataaattcataaattataatttttgaaaaaattttgtatttcaaaattttattctctttcaaaagataaatttactaaataatatttatttaaggctgagtcaatttttgcatgacttaagccaaagagatatcagtctctacttttttgtacattagtaataatataaaattatcacatacgacaaatatatatattttattgaagtaatgcaagtaatgaataatgcattgtttaagaaaaaaaattaacgaatttaatctgtaagagttgagtaaacttagtaatacccagtacccaaaacaatactatgtgatctaaaaatgtttttagaacccaagttttgtaggttccgaatttaagggagtccaaggcgcgagaaccagaagttaagtgtccatgaagattgaaagataaacacttttcaccctgggtttttccgacgccctttagaatgtgttctacatagggaggattggctgtagccgaaaggtagacggagagggatatcgaaggaggtggagcgagagagagacagcagcaagtgctgctcaaactgctcgccagtggctctcaaagcgtgggcggttgccttacgttgtttgctttttcgcatttcatgctcatttcggtgttcagtgctcattgagtctagcccacgttcggttcgcggtccgctggtcaaactcatgatagtaaaaaaaaaaacaaaaacgaaaacagccgaaaacacaagacacaaaacacaagtaagccggaaagaaactggcgagaagaaagtgtgcagaattcacaagtagccgttatataagtggatttaattatctgattcggtaataaaagcagattcaagacaaaggggaaacccaaatgataaacaaacaaatttatggcggatataaacaaaatttttatgcgtttcaaatcaaacacgattgctgtctacgtgctctttggccaacttacatactgtttcggtttgattagtcaaaagttcactgattatgtgctcgctcgataaatgatattgcactcgccgcggctcactgaaaaaattctaataattttctaacacaccttatgccatggcattgtttttttcaattgcaggttttgcgttttcccttttgccaccaacagctaattgcattaaaataaaaccaacaagttgttctgctgggcgtaaatcattgtgtcgttgtcgctgacactcgaatacttatagccagatgctgaagcagcagcagcagcagcagcagcagcgacaataacaccagtaatcagcacaactatcgacgacaatggcagacatcggacatcagaatgcgaggcgtcagtgattaaaagcagtcggagaggccagccagccatccaaccagccagccaggcagccccattggcaccacgagcaaaaagcagctgaatcatcagaactcggaggagtagtggagtactagtttcgcgcatctcctactacaagccagcagaatgagctccaagagcagaccttcatcggcggcgatgttagttaatgcgatacccatgatactgctgatcaccttatccggcctgacgatcgtggcaggttggatgcccgacgtgaagcctgatttgcaaacaagtatgtggcagtagttggaatccttattcttcaatctaactttataactatttgtttatttgtgtcatttgtttgggtttttgctttccggtcttgttgctgctggtttatcaatgacaaaagcgaggctgttcaagctaagctccgattttccaagctgcttatcaggcggaattttcgcaatgccagcagcaacaagcgctagcatttcctctgaatcgagttaaacagaaattaaaatgaaattgtgcaagatctcaaaaaaaaaaaaaaaaaaaacacgagtaaacgcacaagttatataatcccagcagtcaataacatttcactttgcttctttctttctttgcagaacaagacaaagtcctagcccattttataggcaactcgacggactatttcaagattttggaccacaacgatgagtttgttctagttggtgccaagtgagtgaatttctttaacattcttttacgatccctttgatttctggcaagcaataaaaaagttcccgctaccgagcaagctacctgtgcgcaaataaacttggcacgaacacgtttaaatatttataaaaacacaattatacagcgtccgattcggaataattagctcgccatttggcattactttactctaccgatttattggccgcttggcttggtattcgtttttcattagtggcaagtgcaaatctagcatttctcattccctttccgggaagtcgaagtgatttggcattggcgagatacaaaggtctggaataaataacacttgctcagtttcatccatataattatattgctcatgaacaaagttaagtcagaaggcattattttttttatcacgtttcaacgaagtctggtatatacatttattaactgaaaaatattaaatgcataggtttttcgataatgtacattttataattaccatttacatgagagccacgcaaactaccatttgggtgactaataatcagctatcggcgatctgaaatggaccgacaaatgcaaaccagctttcgatctatcatatttttcttgcgccccagacgtgctggtgccataaagaacatagcaacaaattagcagcaacaataattagccacttaaaacgctgaattatacaattgtgtacaagttctaattatttgcacacaggcaaccttgggatatgattgtcggcggggcgtaaaaacagatgcggtcaaaataatagtagtgtgctcttgaaaaagctctaatgcaaagtgaagaaataataataccctgggctgtcgctaatgaaaaaacacgttgtttattaattgtaaaacttgctaacaagtgtttactttttaagcttttgattacttaaataaaatgaaatgtcgcaaaatcgttgcttaaggctaaggctgtattaacaaatgtatttgagccaaagaaagtaaggtactttgcttacacatctatcaatagttcttattcaaaactattactttaaccggcactgttcagtcaaacatttgtatgctcctgtcacgaagctctcaactcacgggttttttgtcgtttatttttggtcaccgtacttggctggcttccattccatttcacattctgggcaggcacacgccatcggcgtattaattctcgcatttgtttattcaattgttctctatctcgatttgcagggacgtcatctacaatgtgagcctaaatggcctgaaggagattgcgcgtctggagtggcacagcacggatgcggaccgggagctgtgtgccctaaaggggaagcacgagtgggattgccataactaccttcgcgtctatgcactgcgtcccaatggcgaggtgctgctctgcggcaccaattcgtataagccgcgctgtcgtcactacacgccggtggaagtgtcatccgaggaggccggctctgctggtcacgcccatgccatgcgctacgaagtcagccgagatgtggaggcccagggcctgtgcccctacagccccgcccacaatagcacgtacgccttcgccgacgggcatttgtacagcgccaccgtggcggacttttcgggtggagatcctctcatctacagggagaacctgcgtaccgaacaatatgatctcaagcaactcaaccagccggactttgttggcgccatcgagcgcaacggttacgtgctgttcttcttccgcgaactctcaatggaagtcatgaactttggcaaggccgtttattcgcgcgtcgccagggtttgcaagaacgatagaggtggtccctacagtcacggcaagagttggacttccttccttaaggcgcgactcaactgctcggtgcccggcgagtttccgttctattttgacgaaatccgtaagttttaatagacgttttggatattctttacaaaaattataatctcaattgttgcaaactccatttacagaggccattagtccgattgtggagagcggatccaagtcactgatttatgctgtcttcacaacctctgtgaatgccattcctggctcggccgtatgcgcatttaacgtagacgatatactggccgcctttgatggagagttcaagtcgcagaaagattcacagtcccattggctgccagtggagcgtgagcaagtgccgaaaccacgtccaggacagtgcgttgaggactctagaactctgaccagcatcgcggttaatttcattaagaaccatcccttgatggaggaggctgtgccagcagtgcacggtcgtccgctgctgaccaaggtgaatctgcaccaccgacttactgcgatcgcagtgcatccgcaggtaaagtccctaagtggagcttactacgatgttatatacagtggcaccgatgacggcaaggtgaccaagttcatcaatatactgagcactcacccgaactcaactgttgatcgcctgaagacagtggttatatcagagatgcaggtccttccacttggaacgccaattagggaattggtgatctccacttcgaaaaactcgttggttgtggttagcgatggcagcttggttagcgtgcccctgcaccactgctctcacattgtcgactgtctgggctgcttaagtctccaggatcccatttgcgcctgggacttacagacacacgaatgcaagaacctggctacgagtcagcacaagttcggaacaaagacttatttgcaaagcttgaatagcaccaagaaagccgctgccttgctatgtcctcatattccccgagatgcacccggtgcggaaacagtaagctttgttaccatggctccaccgccaacagaggagcagaagcttttgtactccaatgtgggctcgtcgcagggcaatcagccaagcttggaacaacagccaactggtggcgatgactttggtttgaacaagatcacccttacgtccatggatcccgacgatattatgccgaatttgaacggttagtactaatatttattttcctaggaatattgtggtttaatattcgcatttcgttgacagatccccaaaagtctacggccagtgtagatgaaatcaaatatgcttcaacgcccagcttcatgctacttacaactatcgttttctttaccttccttgtgggtggaatcgcaggaatatgctgtgtgaaggctaagagccgcctgatggaggcccaaatggatgaaagtcaccgcaatcatttcggcaagccaatgtaagttttatcttggaagatgcaaatccatattggacaattctaattaaatggttttgacaggcaatttaaacatcaaaatactggcaaagacatcaacctgttaatgggctccaatgcctatacgaccacacaaaaaacacctaatctggatttagaaaaggatcgcagtcatgagtgcaaaaactccacggaacatttggaaaaagagctgccctgcaaaacgtcaacgctgacaaaagtgaaacgcacttacatctagtggccttgtgagggcagccaactgcaaaattagtcgaatttctatactctaaaacatattttcgttgtttatgttgctgttagttatagtaaccccccacccaatttgcgaataatgtaaacgacagtctcggatgcgtttgaaacgcatccgaaagataggaagcagagctgttgcgtcttttttacttagcttgtattgtaatttaatttgatgtaaaatttgcgtaagcttagtttctttgtcaaaatttagttaaatttattgacaacgtagtgtgcgggctgccgcagcctggagctaacccgaagcattccgcattcccctgacgtcgacctttgctgtccaaaataggagtgccggctcttggctacgcagcccgattgtgtcgccccttatgtgtactcttaatgtataatctttaagtgcaaatattagagctgtacaaatttaatcacatatcatgcataccgaaatcgaacccgaagcggaccagccccaattatttctcgaaattcaatcgaatattcaacaagtattttgttagactgaatgattaattattctatatgagtttgttttgtggagaactaacagaatgcgacagagactttaaagctctatgctttgtggctaacaaaagcgtaaaattgtatctaacataagctctataaggaattgaacatagaatgtaattaaaagtacgaactaggctaagaaacgaagaaaacttctatgaggctgtttgataagaactgacaccgcagcccccacatcatcagatggaaaaacgcacaagaaagcgaaaataaatgaacactgcaacaacagcaagccttataaatagtataaaatcgtgtcgaatctaggccttaacgctaaacttgtaagctttggatggaaataatgagcttggttggcaatcaacgtaaatcagcattttaataattttatgtttaatttctaagctgttgtccgtcccactaaagaagttgcataaatacaatgtacaatggcaattttatttttaaaacgtgtaaaatgcaattttcatcgtaattaatatatttttatacgtatatgtacgcctaatgtctaaatcttaacataagaaagtcttaaaaatggaaaatcccgataaaagctatatataaaatatttttaaatcttacaaaaaaaaacgtaatgtaatgatttctcatattgtgatagattttattgaaattttagaaagatgaaatgatatgccttttggttgaaaaacaatgatatatatgacgaacgagtctgattgcatgcatgataatattgcgtaggaatgggtcttccactcggaggatcaagaaccagagaaaacccttcatggtgtttagtttttattactgtgtatgtccttgtaatgtgtatattgttgtatacatccgataagcaattcgtaaatctaataaagtcgtcatttttttcataactcaatgtggtcttttaataggttcggatctatgaaacattgaatttttacagcaaatatggtttggttatatttattgaaatcaatcatttttccaataaaggctaatttcaaaatttgaatagtttacgataaagcctttcgcgccgaaaaatgatcgataacttctgatatggctctacaatacatcagcctcgtgattttctgaataagattcaacggtcacaccaggcactacacttttggcgtgttgcacatttcagtgtttaattaaagtaaaaagcccaggtcgcggttatataacaaaatgaacagcctaaggacagcaaccatgcgatttgccgctctggccagctccagtgccggatctctcggcaagcgcgatttcacccgcagcctgtggcacatgaccaaaaagccggtgacagccggaggatccgatcatgtaaccgtgttgaatctccacaagcccagcattaattgcacgtgcggctgcaacgtgcacaccaaatgtaagttaactcaacaaattcttacatgggcggtccatgccgccggttacataacctcaaacgttgggtgacgaaatgttgaccaaaacacagaaaattaaacgctttgtttatatccaggtgagcgggaactggtggagttcctcaccgaggagatagtggccgagcgcaaggttcaaaagggcaagacggtgccaagcaccctggatggattcgccgtaaaactgaccggcgccgatgtggagctcaccaagcagacggataaggaaaaggtggtggtcagcttcaatgtgaaccatacggtggacagcgaggaggagcccgaaatcaaccccaatgctgacaagccggatctcggtgaaatgagaagcaagccccagttcgaggtggacatcataaagggcaactctacgctgtcctttacctgcagcttccttcaaggcgaagctcaggagggcgagtacagtgagtactttgacagaaatcgttttga

SEQ ID NO: 13913 - DNA, 4254 bp, DROSOPHILA
ccgtcgatcagtgaagttgtatacacttttttcgtgttccgtgtttttcgcttaatttgatcgtttatttaaatgtttttatgaattttggttttgcgttttcccttttgccaccaacagctaattgcattaaaataaaaccaacaagttgttctgctgggcgtaaatcattgtgtcgttgtcgctgacactcgaatacttatagccagatgctgaagcagcagcagcagcagcagcagcagcgacaataacaccagtaatcagcacaactatcgacgacaatggcagacatcggacatcagaatgcgaggcgtcagtgattaaaagcagtcggagaggccagccagccatccaaccagccagccaggcagccccattggcaccacgagcaaaaagcagctgaatcatcagaactcggaggagtagtggagtactagtttcgcgcatctcctactacaagccagcagaatgagctccaagagcagaccttcatcggcggcgatgttagttaatgcgatacccatgatactgctgatcaccttatccggcctgacgatcgtggcaggttggatgcccgacgtgaagcctgatttgcaaacaaaacaagacaaagtcctagcccattttataggcaactcgacggactatttcaagattttggaccacaacgatgagtttgttctagttggtgccaaggacgtcatctacaatgtgagcctaaatggcctgaaggagattgcgcgtctggagtggcacagcacggatgcggaccgggagctgtgtgccctaaaggggaagcacgagtgggattgccataactaccttcgcgtctatgcactgcgtcccaatggcgaggtgctgctctgcggcaccaattcgtataagccgcgctgtcgtcactacacgccggtggaagtgtcatccgaggaggccggctctgctggtcacgcccatgccatgcgctacgaagtcagccgagatgtggaggcccagggcctgtgcccctacagccccgcccacaatagcacgtacgccttcgccgacgggcatttgtacagcgccaccgtggcggacttttcgggtggagatcctctcatctacagggagaacctgcgtaccgaacaatatgatctcaagcaactcaaccagccggactttgttggcgccatcgagcgcaacggttacgtgctgttcttcttccgcgaactctcaatggaagtcatgaactttggcaaggccgtttattcgcgcgtcgccagggtttgcaagaacgatagaggtggtccctacagtcacggcaagagttggacttccttccttaaggcgcgactcaactgctcggtgcccggcgagtttccgttctattttgacgaaatccaggccattagtccgattgtggagagcggatccaagtcactgatttatgctgtcttcacaacctctgtgaatgccattcctggctcggccgtatgcgcatttaacgtagacgatatactggccgcctttgatggagagttcaagtcgcagaaagattcacagtcccattggctgccagtggagcgtgagcaagtgccgaaaccacgtccaggacagtgcgttgaggactctagaactctgaccagcatcgcggttaatttcattaagaaccatcccttgatggaggaggctgtgccagcagtgcacggtcgtccgctgctgaccaaggtgaatctgcaccaccgacttactgcgatcgcagtgcatccgcaggtaaagtccctaagtggagcttactacgatgttatatacagtggcaccgatgacggcaaggtgaccaagttcatcaatatactgagcactcacccgaactcaactgttgatcgcctgaagacagtggttatatcagagatgcaggtccttccacttggaacgccaattagggaattggtgatctccacttcgaaaaactcgttggttgtggttagcgatggcagcttggttagcgtgcccctgcaccactgctctcacattgtcgactgtctgggctgcttaagtctccaggatcccatttgcgcctgggacttacagacacacgaatgcaagaacctggctacgagtcagcacaagttcggaacaaagacttatttgcaaagcttgaatagcaccaagaaagccgctgccttgctatgtcctcatattccccgagatgcacccggtgcggaaacagtaagctttgttaccatggctccaccgccaacagaggagcagaagcttttgtactccaatgtgggctcgtcgcagggcaatcagccaagcttggaacaacagccaactggtggcgatgactttggtttgaacaagatcacccttacgtccatggatcccgacgatattatgccgaatttgaacgatccccaaaagtctacggccagtgtagatgaaatcaaatatgcttcaacgcccagcttcatgctacttacaactatcgttttctttaccttccttgtgggtggaatcgcaggaatatgctgtgtgaaggctaagagccgcctgatggaggcccaaatggatgaaagtcaccgcaatcatttcggcaagccaatgcaatttaaacatcaaaatactggcaaagacatcaacctgttaatgggctccaatgcctatacgaccacacaaaaaacacctaatctggatttagaaaaggatcgcagtcatgagtgcaaaaactccacggaacatttggaaaaagagctgccctgcaaaacgtcaacgctgacaaaagtgaaacgcacttacatctagtggccttgtgagggcagccaactgcaaaattagtcgaatttctatactctaaaacatattttcgttgtttatgttgctgttagttatagtaaccccccacccaatttgcgaataatgtaaacgacagtctcggatgcgtttgaaacgcatccgaaagataggaagcagagctgttgcgtcttttttacttagcttgtattgtaatttaatttgatgtaaaatttgcgtaagcttagtttctttgtcaaaatttagttaaatttattgacaacgtagtgtgcgggctgccgcagcctggagctaacccgaagcattccgcattcccctgacgtcgacctttgctgtccaaaataggagtgccggctcttggctacgcagcccgattgtgtcgccccttatgtgtactcttaatgtataatctttaagtgcaaatattagagctgtacaaatttaatcacatatcatgcataccgaaatcgaacccgaagcggaccagccccaattatttctcgaaattcaatcgaatattcaacaagtattttgttagactgaatgattaattattctatatgagtttgttttgtggagaactaacagaatgcgacagagactttaaagctctatgctttgtggctaacaaaagcgtaaaattgtatctaacataagctctataaggaattgaacatagaatgtaattaaaagtacgaactaggctaagaaacgaagaaaacttctatgaggctgtttgataagaactgacaccgcagcccccacatcatcagatggaaaaacgcacaagaaagcgaaaataaatgaacactgcaacaacagcaagccttataaatagtataaaatcgtgtcgaatctaggccttaacgctaaacttgtaagctttggatggaaataatgagcttggttggcaatcaacgtaaatcagcattttaataattttatgtttaatttctaagctgttgtccgtcccactaaagaagttgcataaatacaatgtacaatggcaattttatttttaaaacgtgtaaaatgcaattttcatcgtaattaatatatttttatacgtatatgtacgcctaatgtctaaatcttaacataagaaagtcttaaaaatggaaaatcccgataaaagctatatataaaatatttttaaatcttacaaaaaaaaacgtaatgtaatgatttctcatattgtgatagattttattgaaattttagaaagatgaaatgatatgccttttggttgaaaaacaatgatatatatgacgaacgagtctgattgcatgcatgataatattgcgtaggaatgggtcttccactcggaggatcaagaaccagagaaaacccttcatggtgtttagtttttattactgtgtatgtccttgtaatgtgtatattgttgtatacatccgataagcaattcgtaaatctaataaagtcgtcatttttttcataactcaa

SEQ ID NO: 13914 - protein, 770 aa, DROSOPHILA
MSSKSRPSSAAMLVNAIPMILLITLSGLTIVAGWMPDVKPDLQTKQDKVLAHFIGNSTDYFKILDHNDEFVLVGAKDVIYNVSLNGLKEIARLEWHSTDADRELCALKGKHEWDCHNYLRVYALRPNGEVLLCGTNSYKPRCRHYTPVEVSSEEAGSAGHAHAMRYEVSRDVEAQGLCPYSPAHNSTYAFADGHLYSATVADFSGGDPLIYRENLRTEQYDLKQLNQPDFVGAIERNGYVLFFFRELSMEVMNFGKAVYSRVARVCKNDRGGPYSHGKSWTSFLKARLNCSVPGEFPFYFDEIQAISPIVESGSKSLIYAVFTTSVNAIPGSAVCAFNVDDILAAFDGEFKSQKDSQSHWLPVEREQVPKPRPGQCVEDSRTLTSIAVNFIKNHPLMEEAVPAVHGRPLLTKVNLHHRLTAIAVHPQVKSLSGAYYDVIYSGTDDGKVTKFINILSTHPNSTVDRLKTVVISEMQVLPLGTPIRELVISTSKNSLVVVSDGSLVSVPLHHCSHIVDCLGCLSLQDPICAWDLQTHECKNLATSQHKFGTKTYLQSLNSTKKAAALLCPHIPRDAPGAETVSFVTMAPPPTEEQKLLYSNVGSSQGNQPSLEQQPTGGDDFGLNKITLTSMDPDDIMPNLNDPQKSTASVDEIKYASTPSFMLLTTIVFFTFLVGGIAGICCVKAKSRLMEAQMDESHRNHFGKPMQFKHQNTGKDINLLMGSNAYTTTQKTPNLDLEKDRSHECKNSTEHLEKELPCKTSTLTKVKRTYI

SEQ ID NO: 13915 - DNA, 2744 bp, DROSOPHILA
aaagccaaattctcgaccggttcatggcgccgcgatttattcttgaccggggcaaaactgcccggaattcgattggggaaaatgctgcaaaactatcaaacccgtttccaaaaaaaaagtcagagcccgtccaaaaatgttctgatggtcattaaagtcgaacacaatgtgatgcattctttgagttccgcctacgaaacgataaaatcttaatctatgcgaactccattgatagttaatggtttgttgttgctttctgtttgtcgccttttttgctatcgaaagtgggtctagaatttgaagtgactttttagtttgaggttcaaagtcaaaaagaatgtcggaagcttgctttgaactctgggcaaacctgttttaaatagtctgggaattccatacaagtcccgtatataagagccagaatatttgcgtccagtcagtttaaaatctcatttaaacggagaagaagaacgtacaagcaatcaaacaatatgaaaaatgctgtgtttggatagaaggatatcatcatcaaaagttctgctgatacttttctgtaatccatacaaaataatcgtttgatagtgttttgtcatcttaagctaagcgaatgaaagtgaagggttttaacgttaaattttattttccttatttttgaaaactataaattttcttcagttggagttcaactgatgtgttcatgtgtcattcattcagaggcgttcataaaataagcatttaagtttttttcatccaaaacattttttttttcaaatgaatgaaaatatgaatatatatatattaatgaatatatatgtaggaaaataaagtgtaaaatacaataagttgtttggatttgtttcggctaaaaatccgtcttaagtgttctgtttacggaatcgcccaaaaaaatcaaatcagattacaacaattatttttttttatttatggaataagacaacatgataactaggcaacaaaatcaacatcctgtaaatggcacttaaacacggaagcgacggaagatgttggcgggcaggtagcttggtcctggagcactggcagcggtgctctcgcgtggagccggctgggaggcgaagttcagggtagaggcaacacctccattctgggactgactggatcctcccaactgatcgtactgaccctgaatggcactctgggcgttggcagcatcctcgggagtgcggtacttgacgaagtgcacctcgggcttgttgttgttgttgttgcggatggagttcagcttgttggccagatcaccgatatcagcctgcttgttcaggacatagatggcggtctcctgctgggcagcctgcttggccagagccagagcggcatcctccagaccgctgttctcgggtcccttgatgaagaccacgcggagtcccttgttcacggcgttggcaacacggtcggaagcagatgggtcgtagaagtcaccctcgtcggcggtgtaagtgaagaattccttctcgagttgggcctgaggagcagcgtagttgggagcagcagcagattgagatccttccagggcatcagcaatggatgagggaccgggggcaaaggatgcactaggagcaggcgcgaaagcgggtgcatcgctgctggccgatccagatggctggaagctcaatccggagggagagtgggccaccggttggtaattgtagccaagtttatcggccgtggccaaggcaataaagcaaaggacgacgaaggaacgcatgttgactgtttggatggcaaagatgattggttactgacttatcgagtcgaaattttggcttttataggtgcaatattcagttcttcggctgcagtatggtgcgatatgaattatgaacagctcaaatttgccttaaaaatgcataaataagagattaaaatgttaaatttataatataattttatgattcgtcacactgctgctgcggttgcaaatttttgcatggctttgtttttactggctctgcggaaagcggcatgcaaattatgagctaaccagaattggccagtgaggaggttcatagtccgactcggattgccaaatcagatggcgccaagtaatttattaagagaccaattatcgaattatctgatttggcgctgacaaggcgcagtggtgcagtttttaattggcaaccggcctaggcgatcagaaaccatgtatatatattaagtaaagatggctgctatatttagcgatgagttcgattcttcacttccggcggatggaaggtcgcctccacccgcaacattagcataaagcagctaaacacagcgaccaagacgacaagacaaagccgctgaataaggcaataataatttggcgaatcgttaaaatatttatttttggcagcggtaacgcgactaggcgcgcctcatttgcatgtgaaacggcctgtcaaacgttttgtttgctctccggccgatttaggtgacacttctcatcccgggcgaactgggaatgggtttggatttgtgatacacatgtgatacatgagtaacaaggcatccatctaaatagccccaaatgaggtttacgatgctcttgatgctctgtccgcggctttttatagccagattttattgatttcaacgataaagctacatgaaaataccaaaatggcaaggttggcccacaacactggccaaaagcggcgccgaagaatacgcgaattattgattaaggcagcatattgaatttaatatgaattttatggcgc

SEQ ID NO: 13916 - DNA, 744 bp, DROSOPHILA
atgcgttccttcgtcgtcctttgctttattgccttggccacggccgataaacttggctacaattaccaaccggtggcccactctccctccggattgagcttccagccatctggatcggccagcagcgatgcacccgctttcgcgcctgctcctagtgcatcctttgcccccggtccctcatccattgctgatgccctggaaggatctcaatctgctgctgctcccaactacgctgctcctcaggcccaactcgagaaggaattcttcacttacaccgccgacgagggtgacttctacgacccatctgcttccgaccgtgttgccaacgccgtgaacaagggactccgcgtggtcttcatcaagggacccgagaacagcggtctggaggatgccgctctggctctggccaagcaggctgcccagcaggagaccgccatctatgtcctgaacaagcaggctgatatcggtgatctggccaacaagctgaactccatccgcaacaacaacaacaacaagcccgaggtgcacttcgtcaagtaccgcactcccgaggatgctgccaacgcccagagtgccattcagggtcagtacgatcagttgggaggatccagtcagtcccagaatggaggtgttgcctctaccctgaacttcgcctcccagccggctccacgcgagagcaccgctgccagtgctccaggaccaagctacctgcccgccaacatcttccgtcgcttccgtgtttaa

SEQ ID NO: 13917 - protein, 247 aa, DROSOPHILA
MRSFVVLCFIALATADKLGYNYQPVAHSPSGLSFQPSGSASSDAPAFAPAPSASFAPGPSSIADALEGSQSAAAPNYAAPQAQLEKEFFTYTADEGDFYDPSASDRVANAVNKGLRVVFIKGPENSGLEDAALALAKQAAQQETAIYVLNKQADIGDLANKLNSIRNNNNNKPEVHFVKYRTPEDAANAQSAIQGQYDQLGGSSQSQNGGVASTLNFASQPAPRESTAASAPGPSYLPANIFRRFRV

SEQ ID NO: 13918 - DNA, 2405 bp, DROSOPHILA
gctccacgccccgctggagcatgggcttaaagcgcagggtcaacgggaagggtaccttggtggtgacgaagcccgaaaacatccagttgatccagccaccgatcacgaccatgggcagcacgttaataaagtttcccttgaccatgtcggtgagcatggcggatgagttttgggctacaggcgcccgtttctgagtcttgaagtagccggtctcctcgttgttgaagtagttcttacgcatggagaagctctgggcgctgagatacttgccgttctcgcgtagcaagcgtgcccggatcattgcctggctgtgaacggaatggtaggtgtcactaaaaggtgcctcgctgcactttgctcactctcacctgtcctggatttgggtgatctcggccttcttctgcgtggatatcagtatagagacgtagtggcgcacaatgcccaccaggaacgtgatcagcacgatgggcaggaacacccacacgcggatgtccggatcaatcagcagctccgtcatattttaattgatctgtgagattttcctgtttttcggcccaattttcacccaactggctcaattggattggggatgacagtcgattatttatccgataaatgtgacaggtcacgttcggaacatttatcgatagcttatttcacttttaaaaacataggaacacttatttaattgaacacattaagtgaataagtgattaattacctgtgatttgtacccaaatccagtatattcaaatgcatgtaagctgatatatttacgataatatatgtttttacacaatattcacagggaataccccaattatgtgaacaaatcacaggaattcgatgtataagtaaattttcgtgtcatcgattcccgacatgaatgcgacaactctgcagaccgagaatgtaaattttgatcgaatcgaatttgttggactgctgcaaagacgccaagtgaaaaccgagatttgctgaacaaaaggaacacattgccatggaggccaagaccgacgcacccatctcaccagcgcccacaacaaatccgccggcagaagctggcaaggagccaaatgcaagcagcaatgcgcaagcaaacccgaccgctgcgccgggagctcctccatccggagccattgccgttggccagtccacaaatccagtggcgcagcagcaacagcagccggcggtggccaagaagcccagtagcgagacaaacaacatgcccacgcgacagtacctcgaccagacggtggcgccggttctgctccacggaatgcaggccctggctcgcgaacggcccacggatcccatacagttcctggcctcctacctactaaagcatagcaacgggtgcgacgagaacaacgcctccgccgccgccgtggacaacaactcctaagccctccatcctacctacctcccatttgtccccctccttagttgtataattgaacagtgaataaataataaacgtttaaagttagaatgtaatcgcaaaacacacaaatgtactaggattgctaagttgttataggatagccccatggatccagtttcgagttgagcagctccagggaggcgtccgcgatcttggccagaagctctgccagcttgtgcttcgtatagactttgtacaactgccgattctcgctggatatttcatctgccaggcgcacgcaacccgcaaagtctcccgacttgaacatcacttcgttcagaaacagggcgatctcaggaatgcagatggagcgcaatttctccatctgcagtaggcgatgatcccagctcagctgcacggcgttctcgggcagcttggcgatgaacggatccaccagccaacccttgtccgggaacatgagcacattgtacaggagttcgatggtttctgcagggaaagaatgcgggttatatgccaaaagatctcattaatgggtatgcgatccacttacgcttggcctgctccttaaccttgtgctcccagcgcacgacttccgatcggtgagcctgctccttgcgctcactcgccatgcgctccgtgaagttgtcctgcgaggaagctgcgtgtgaagtctgtggcttcttgggcctgttctgctgcaggcggttccattcgacgaaactgtcgacgccagacagatacgccttgtagcagagatactccttcaggcagcactcctcacgcggtggtatgttgtccaccgagccgtacaagctgactagttgctgcactatgtcggccggcaccatgcggaaggtctggcgcatgcactccaccttgctgctggccagataggtgcgtatcatggcgttggcctgccacagcaactcaccgcgctgctccggcaaatggattagccactccaatgctgagatcttgcgctgatcgattgcagagatct

SEQ ID NO: 13919 - DNA, 405 bp, DROSOPHILA
atggaggccaagaccgacgcacccatctcaccagcgcccacaacaaatccgccggcagaagctggcaaggagccaaatgcaagcagcaatgcgcaagcaaacccgaccgctgcgccgggagctcctccatccggagccattgccgttggccagtccacaaatccagtggcgcagcagcaacagcagccggcggtggccaagaagcccagtagcgagacaaacaacatgcccacgcgacagtacctcgaccagacggtggcgccggttctgctccacggaatgcaggccctggctcgcgaacggcccacggatcccatacagttcctggcctcctacctactaaagcatagcaacgggtgcgacgagaacaacgcctccgccgccgccgtggacaacaactcctaa

SEQ ID NO: 13920 - protein, 134 aa, DROSOPHILA [sequence omitted]

SEQ ID NO: 13921 - DNA, 3148 bp, DROSOPHILA
ttaattgcaattaattaattaattaattcaatcgtaaaatgagtaacctagagcatattacgctggaaatggataaagtgccactaggagataataaaactttggtgagaaatacagtgagttaaagtttcattatcattaaactgggggaaggtaaacaaatttaaaaaaaccggtgatttatttactttacggatagatcgttaaaatgtctatttacctgtacaaaaaacttatatatgtatatagtttcgcactgcttgttaatttttgtgtaaactgcggagaatttcatacaatttttcgtgaaaattaatagctcaggcggaaaaaacccgtcacttaattttagaaataaattcatagttctgcattttttaagatatacgattttaaaaattcatattaaattgctgaactatgagtatttttactaagtttttaagcaaacaatcatagctagagtagcttaatgtttgctgtatgtatcatttgtctaattttttagctaaataaaagagaaatctcataaatctgtcgttttgctgcagggaaaatctatttctgtgactcatagcaactggcagacttaaaaaatatttttcaattgcaacattttcttgcaaatagagcatgatcatagaatttagcccagttacttaatattactactttcttatcgtttgaaatactattttatttatgaaaaaaatcacgtttgtcgcaattttcaaagcatttgtgtccctgaagcttatcgttttttttgtgttcgaagttactgaacagttgtaaaacatattgcaagtacataatcctacagataaaaactacttagcatataattgcattaatcaaaacttgcacagaacagaagctgtgcgccgtttggctaaatgaatttgcattttgagacaacaatggatttgcaagcaaagttgttaatattccggaaatgattttattgaaattttacaggaaaatatcagcaaacacagctatggcggtgcaatcgacggacggacacgtaatactcttcgagtgcccagagcaggttcgtatgccaacttattcgtttatcttcaaaaagaaacaaaaagttagaacatttttctgtgcttgtctatgttttttaattgtgcttgtgactaatgctgcttaaaaccgcgctctttaaactatttgggtaaatcacaattgatggtgtaagtagcttaagctggtggtaatcgattttaagtgacttaataatttgcttcatttgtagttcccgaaaccgatgatgatgacaacgacgatcgtccctttgttaaagatggcaatgataatcccggcgtggatgacggtcttttttcaactgttggaggcaacggaggcaacggcggcaatgtgaatgtaaacgttcccaatggaggaagacgacccagtttctcctttccgggatacaatggacccggttttgtgacgatcaacggcgtggagacacccatacccgatgtgaatgcatatcagcacaagaagaccctggctcagggaatgatggacctggcacttctctccgcgaatgcaaatcaattgcgttatgttctggagacgagctcacaacatccttacttttatcccagtctgctgttcatctcactcagcattatattccaggtaaatttctataggtgcaaataatgcatatatttgtaaaatcaagcttaaatatccaatgaacgcaagatttgataagtaaattccacacatgtataacttacatttctaaactatcagaatattcttaagatgataagaaaattcattaaaaacaaatatatacaaagtaatcaaaggttttagcccatttattgtagtataaaaacaaagtagtttatcttaaccagatttcactgttttgcttaataaccatatttttgatgacacacactcataatttctttgtcatttcagattgctgtgggcgtgggccttatattgaatggccagtataacatcaaaaacggtcacgatatctgccgggcgaacaggatcaataattatacagttagcggcatttttatagtcactgtggtcaatgttctaatatcagcctttactgtggacagagatactgtgcctgctttacccgccaatacaacatagtttaacttgtattttaaatagactttagtattatgaacacacagatgcatctttagataatactcacattgttcaaaccttgttaaatttcactcagcgactcatttttctaaacgcaacaatgaattgtgataaataaaatcccacgagcatttctcgcttatttaaataactgaaatgctgtttttcttacttttgggcgttttaagtaagaaatgaataaactttcttaaatgttataagatacgttcacattaatattaaatacttataaaccagttgttctttggatattctttgttattaatattaaattctaataactcaaatgcaattctatttatactatttaaatcaatttttggcgccaaactatcgtttagttgcgatagtttacgtagtggcatttcacagcactgtgttatagcctcgacacttcacagcactgggcaacagctgttacaaaataaagtcgtgcggaaaattaagcattttcggctaaaagtctattgcaaacatggccaagatcattaaggcggtaagttcaaggaactcaagtgaagcacctgctcgagaacctacaaaagagaaatgaccgactaatccccgcttgagtttcgcggcgtttcttcaattgttattgttatgtcatcgcttccttctgcagtccacaggtttgactggactcgccgtgtccaccaatccacaccacacgctgagtgctctgtatggcaagattctgcgggcggtgtccaagatgccacaggacgccagctaccgcaagtacacggagcaactggtcaagcagcgcgccgattctgtggcccaagtaagattatttggaaactttgctaatttgggtttaccaagtggatggtaccttcatcaaagcatatgtagcacctatatagaccgtgcaaccaagatacagatccttacacttgttatttgtattaaagactgttattttcttgatcatcctccaatttcctttttttta

SEQ ID NO: 13922 - DNA, 591 bp, DROSOPHILA
atggcggtgcaatcgacggacggacacgtaatactcttcgagtgcccagagcaggttcttcccgaaaccgatgatgatgacaacgacgatcgtccctttgttaaagatggcaatgataatcccggcgtggatgacggtcttttttcaactgttggaggcaacggaggcaacggcggcaatgtgaatgtaaacgttcccaatggaggaagacgacccagtttctcctttccgggatacaatggacccggttttcacaagaagaccctggctcagggaatgatggacctggcacttctctccgcgaatgcaaatcaattgcgttatgttctggagacgagctcacaacatccttacttttatcccagtctgctgttcatctcactcagcattatattccagattgctgtgggcgtgggccttatattgaatggccagtataacatcaaaaacggtcacgatatctgccgggcgaacaggatcaataattatacagttagcggcatttttatagtcactgtggtcaatgttctaatatcagcctttactgtggacagagatactgtgcctgctttacccgccaatacaacatag

SEQ ID NO: 13923 - protein, 196 aa, DROSOPHILA
MAVQSTDGHVILFECPEQVLPETDDDDNDDRPFVKDGNDNPGVDDGLFSTVGGNGGNGGNVNVNVPNGGRRPSFSFPGYNGPGFHKKTLAQGMMDLALLSANANQLRYVLETSSQHPYFYPSLLFISLSIIFQIAVGVGLILNGQYNIKNGHDICRANRINNYTVSGIFIVTVVNVLISAFTVDRDTVPALPANTT

SEQ ID NO: 13924 - DNA, 9048 bp, DROSOPHILA
gcgccaccacgcggctgataaccgccgccgcgtccctgatagcccattccaccacgggatccacgcattcccctcggaggacccgacatcatgccctgcatgggcggtcctccgcccattccgctgccgccgcctccgcgcatgccacccataaagtgtccacgaccgccacgaccacgtccgcgatcgaagccaccgcgcataggcgctccaccgccccgtccacggaaaccgcctccacgtggaccgcccatcgatggcgaggacactgagcctccttccatgctcctctctcgctgttctcgtacactagatcacacgcactaccacttgcactggtattcttcgcactcggacgcggattttaagactgctgaagccggaggaagaagaagaagcagcgttaggatgccgcagattgacgattcgaggaactattgctagcgactaatcgtttctattgatgcttactggtcacttggtcactcggcgcactttcaacagtagcttatcttaaataacttatttaacttaacattattcggtgtgcgaagcgcgttggtcttcattcagtgaaaaaatatggcggcgactattgatttttgttgcagcgctgcccactcgtcgctcttttgcgccagtgttgtcatccttcagcgacaatatagctatgaaaacttgttattataattttccaagagttaatatacaaaacaggttaatacgtaatgaattaatttatagttcaaacaaatagagtctagtccataaacatgcattaaagatatattcaaactccggagggaatgagtttaagcaaattttagttggaatggtgatcgctagtagttagtttagaattgatggaaacacttaagatgattattgcttaatgatttaagaaactgctccactctcattcaaaaaagcaaattaaaacattgagcagtcccagcacaagtaactaatctgtaggtaatttgcaattcacggaccacggccacacttggcactgggaaaaatggaaaacacaagataaaacgtgaaccctttggtcgaaattcggtggtcacaatctggtatctggtgaaaagggacgacaggcgagtgcgacaggatgccgggcaaggtgggggtgaagattaaggcggcgcgcaacctgcccgtgatggacaaaagcagcgaaaccacggacgccttcgtggagatcaaactggcctcggtgacccacaagacggatgtcttccgcaagagtttgaatcccacctggaataccgattggtgaggtctgaccattcaatagctccatatattgtaacatttgctttctgataggttccgttttgaggtggacgacgctgagctccaggatgagcccctgcaaatccgcctgatggactacgacacgtactctgcgaacgatgcgattggaaaggtcaacatcagtttgaatcctctgtgcctggagagctctagtcaagcggtgcacggcaagggtaccgtgttatccggctggattcctgttttcgacactatgcacggtattcgcggcgagatcaatgtgattgtgaaggttgacctgttctcggacgtcaacaagttccgtcagagctcctgcggcatccccttctttcactgtataagcagacaaatattctctaaagaaatggtctattaattatccttttatctccaacagctcagtgtgtgccatttggctaccgcgcccaagtgattcatggctttgtcgaggaattggtggtgaatgacgatccggagtatcagtggatcgacaaaatacgcacaccgcgtgcttccaacgaggctcgccaggtggtgtttctcaagttgtcgggtcaggtgcagaggagaatgggcctaaaggctattaatatgggtgctaatgcagtcatcggctatacccagtgcttcgatttggagggcgacgtgggtgtggtagcccgaggcattggaacggctgtgacgctgatcaaggacaccagcacaagccaaccaaatagtgcggatgtggcactgatcgaagagtgagtatttggtggcactagtcgctgtctgattactcataacttattaattcttttgctatttactatactcttgcaaagcaattgtcatattttagctgtccgattacatgattacataagtctattaacaatatctatatccatgtctgtgctagtacaattttttcttatcaggctgcaaaagtatttgaaacttcggttcccgaagccaacctacccttgattgtacaaacaatttgtttagcatccgtagctgaaagtaggtgctagtagaaaacgaacttaaatattttctaaagcgaattttttcttcttttgaacgttcttccccacaccgaaatctctgcgacgatgttcatccctcaatatcttaactttcgctccttgtcgtatcgtattgcacgttccaatcgttgtcgttgtttcgttgttgtgtcgtgtttatgtttataaaacatttacgtaccaccatatctaaatacggctagactgacacaaaagtatctagacttcctcaattgtgcgggcgcaagcaactcaagtttgccgctttccggccgcacgccccaatatcgtctcaatatctatagggagcccagctcgtcggcgccctcgtctgcagcagcggcggcagcagcaacgatgttttacttggagagtgccagcagcgacaccgaggatgcggaactaatgcagaatctcataaggcaagaggacgagcgtggcgatcgaaatcgcgagaaaaaactacgacaccgtatgcggcgtttaacgctctcttcgagtaagatttttagtcagaaatacgccacacttatccgacggattgaaccgaagataccggagaatgctacgcagtcgttgagcagcatctttggaggggccacagcagccacctcgagtttcaggcggcggcgcaaatctcgtttcgccgcatcgacttccaagtcctcgattccccctttcataacgagatccattagtagcgattcaaatgtccgtcccggtcgcatgcccatcaagagtttccttactgtgcccgggttgatggagtatcaagagaacactcgctcggcacctgatttgcccggggatgagtttcaagcaaggactcgaccaacatctaattactcaactgaatcggaagactctctgcagttagatttggaaataggtccacctgagagcaatgccgaagattccccggaagaggaggaggatctacaagataattggattaagccaggagagactcgtagctgcgagaacagtcagcaggatttggggcctagccaccacaatctgctcgacgaccttaaaggcttctcacgtcgcctgcaaaaaatgatgcatctgagccccaaaagtagcgacatagagaagaagcttccgtttgtgccctcgctggaacgcaagccatactatagctcacaaccggaactgcctagctgctccaatgattgtctggtatccaacctcagcggatcctcgtcaatgctgcaattgaactttctccccagttacgggaagactatgcaacgcagtgcgtcgttgaatcatctagtggctcccgatactcctgttccgcccaacacgctgctgctgaaggcgcccgaactgcgcgtctgcccatctacacccactcctacccagtccaatctagtggtcttcgattacaataactccccctgtcttacccaattagatcaatctgtaaatatctctaatagtactaaccatagtaaccacaataatgaatcatcattgcttgctccatttgccattcgacaacaacaaccaccacgcgtaattagatccagctccgagctccaacagcagccctgttccacaggagcagccgcaagcactggaccgtccaacatacccacaacggtggagggtagcagtcccaatttaaaacgcttcgcctcgccggtgagcagcagtcgccttaagttgacgcccagtccctcgaaaagtggcatctcggcgacaaccaatgcggatagcgcatccacttctacagcctcaacggcaacgacaatggtgccggccaccgtcggcgagatctgtcgcagatcctccgactccgaccttagtgtcacgcccaaaggtatgtaagggagccagctaatgaaagcagccctgttttcgagtatgattaaactaaagtttatcggaaacatggctgtttagggatacttattccctttagtttatatctaggcttagactatagactgtaagcatctaagcaccagtggctgtcaatatttgtgtgtttgctgtcaacgtgcgtctttttctgaccgtctcgtctctgagtaaccataaacgtatctttcaacgttctatctttgcgtccgctgccacatctcgctaacaggcatagcctttacgttccaccggaagcgtaagtagatgctccgcctaatctcagtgtcctttctcgatgtacctctgtgtgtctgtgcgtgctcctttctgtatcttcacatcctgcactttaagcaggttattgctcttctgtatcgccaagtcttgaatgcttcatccgatctaatttatccttacatgatacactacaccatcattacgtgtgccatagatgtgggacttgatgtggtctgaggatctgagttgataggttttaatttgatttgatgttttcaaaattgaattcttcaatcacccccatatttgatatttgtgggttatattttaaatataataattattttgattaattatcataatcaagttttgattgaaaattatattggcccatattttcaatgttttctgtcatatctccaacacttcatacgggtctaagattttccgctgtaaatataaatgtaatcactatgtgtaagaaccacatatgcaagtccaaatgcgcatgaaatgctcatagtactttcggaaccctttttaattcacaggaaactccatatgtgtggccagtgagcgtttggtggccgccacggcgatgatgcgtttaacgcaaccgacggtgggagccaagccaggaactgcggccgacagtctggatatgttggagtatcccttcctgacaatgacaaaatacccgacaggattcattcttcatttgggcgcaacggtcgcggcacgttccgtaaaactactagagcgtgtgcccaatccggacgagccggaagtccgagacagctggtggacggagctgcgaatggagatccgatcgcatgcccgttccctgggctgtaatgtagtgctaggttatgcggagaccacaaccatatcgtgagtatatataatacgaataatctattatattgaaatccctgtgcccacctgctaagataagagtaattaataccctatctttgctttttagtgacgatgtctgcgttttatctgccactggaacggcggccgtgattaacatggtgtttaatcgatctgtatcgcaaaccgatatctttaccatgtcaaaagcaaccgccagcgttgcggccatgacgaattccgtggaggacggaaatggaagcaccgccggggatacgagcattggcaaggacagcggttccctgggcaccggaaacagttcgggtggtaaacgttacggactgcccccactcaatggaccccggaatgcctgtgccatctgccacataccctacaacctaagctcggttccgtttaatgtgaagatgaagaagtgcgcggtgtgccgcaagggaagagttccggatgtactgctggctacacttgaagtgcctgaatttatgcaggttaccggaagaggttgcttcatgcaggcccaagtggtgcgcgccaaaagagatctgcgtgcggagctgaacgccaaagagatatcggatggtctgcccttcctggagtacgaacttcatcgagtgctgatcaacaagctgaaggccaagggcatgaatgccatttttgggctacgcacgcaagttgccatcggcgagcgtatgatagcgctgatagccacgggaacggctctatttctcacagctttaccggtgccgcaggtaccaaagatcgtggcaggcaactcgtggaccgacaagcaaaagctaaatgagttgcagaagaaattacaagaaacgtttgaacggaaccaggagatctatcagctgaaaagcttggacccggatttggcagccaatgtcggaggagtaccttccacaggagcctctggcgataaacaatcagatacagacgactctgatgaagaggagatgaacgagatcgatctgaactgtggcaacaaggagttgtgtgtcctggaagtggacgatatcgaagacttggaaatcatatcgctgttaatggagccatatccgccggagggcttccatgtggtaaatacgcagcaggtgccgggcatgctggaaatggatacggttaagaatctgcagatgttcacacaagtgtggcgcgcccgactcgaggtgggccaaagtgtaaacggcttccctaaacactttcagaggtaggtctaaacttcatactgggatcagcacataaaaacatttgccttcccagactgttgcagaccatatacttcaagctacgcactatgataccctgtgctatctgcgatcttcgcttccgactagatctgccagagacggtaaggaaaatgctaggactttgatcaagaatgattaaattacttcgttctctgcaggatcaaattcaattgctagtcactggcatggccatgggcctaagcgatgccaacagaatgaagtaccgcggacgtggacgcccggctcagcagcagcaggcacctcaacagcagaacggatatcatgatggcacggtgcacgccactcaatctcagccagagttaaacggaaaacgaatgctgcaagaggaggattacatatttccgctggacgaggatcagatggtggacacacccacgccaaccagcaccgctattccgccattcggaatgagctcattcaaaatgcgaaaaacttcaccatcacgtcttaacaatctcgtttcgggattgccttcaaccggagttaagccattgaacgttggatctgttcaacgtagccgttatgtaagaacattaaatattaatgatgtctttatattaatattatatttccttgacagtttccgctgcgagatcgttatggagtggatgtgacgccactaagtttcatacctggtggtcgtatagataaatatttgggcaacctaaactttttctttattcgggagagcacgtcgatccgggaaaatggtggcatcagcggatttgtccatggcttcattaccgaactgttggctgtggtgagagcacacatcgcttcgctgggcggaaatgccatggtctctttttacatcaccgaacttatgttgttcgataatcagcacaagaatcaggtaaggcaaacacaatgatctacttaccttaaagtttttatactgaaatcttgtattcttagggccagtgcctgattagcatcggaggcgatgctgtctatgtgagctaccatgccgatgactgatataaaaacttgcggggcatatagcgcatgttttacgcgaatcgtcccaaaagcgtatactctctattttcttccgcttagctagaactatcagctctgcccagcaactggagttaaactgaagttaaactaattcacgtttacttaacaattttacagcatctgtagatggattctttatgcaatatttgaactgtgaggaatcgttctaatcctaacttagtagtgctaattttttcggtcttgttacttgtttgctggatgtttttagcgttaaatcaattgcaatttctgtacatagttgatgtttattgaatattgaatttagaacgagtgcgagacacaagtataatatcgatatatacaattgttgcaaccacaaacatgacacatatactcgtaccactagatatccaattttggcgcgtaaaatacaatacatacaatattatggaaatacaacaattgctcaactaaatgtatttgattcgattagtttggtgtagtggagagcagcacaaacatgacccacagatgtagtagggccacgtagacgatcacagagacccgcatcatgggatagcgacgcagaaacgttcccacccgaatacccatggagtccgcctggcgaagggctcgcttgaagcgtcgtgccacacgattatcgaatggacttggatgcatgagaagcgggaattgtgctttgactaggtagaactcatatttatgtaatttctggtactcgcagaatgttagacttaccatcatctgtgctgttgagcatagtatggcgggagctgcccctttggctctccatttccaccaagtgcatgttttgctgtagctgcgtctgtgccttttcgtgctgtagtcgcagggcatttctctcactcgtaactctttccagaagactttgacgttcgaccagtgattgggttaaagcctttagccgagtctcgtaatcgctcttggctcccgtgttggcttcctcgctcaatcgctgacgcatctgctgaagctgctgctcccgctcctggagtcgagtggcggcagcagccatttggttactaagttgctgccgcagtgaggccagttcctgcgtgagcactcgctgatcggattcggaggtcacactgtgttcccttgcctgtcgcaactcctttgctagtgtttcctcgcgttggcgggcagagcttagttccacctgtcgttgtctttcctgggaaacgtaatcgtccagctgcaagcgcgccttttgcagttcctcgttggcatgctctagttcttgcttaagtgactcgtgttcaatttgcagaaaacgcgtttcactgtccttggacaccaggtttggatctgcgccctcctccgtgggcttcgccttcaactctgcgatgagggaatcctttgcttgcagagctcgctgagccttgatacggtattcctgaagctcctggcgctgc

SEQ ID NO: 13925 - DNA, 3928 bp, DROSOPHILA
ccacacttggcactgggaaaaatggaaaacacaagataaaacgtgaaccctttggtcgaaattcggtggtcacaatctggtatctggtgaaaagggacgacaggcgagtgcgacaggatgccgggcaaggtgggggtgaagattaaggcggcgcgcaacctgcccgtgatggacaaaagcagcgaaaccacggacgccttcgtggagatcaaactggcctcggtgacccacaagacggatgtcttccgcaagagtttgaatcccacctggaataccgattggttccgttttgaggtggacgacgctgagctccaggatgagcccctgcaaatccgcctgatggactacgacacgtactctgcgaacgatgcgattggaaaggtcaacatcagtttgaatcctctgtgcctggagagctctagtcaagcggtgcacggcaagggtaccgtgttatccggctggattcctgttttcgacactatgcacggtattcgcggcgagatcaatgtgattgtgaaggttgacctgttctcggacgtcaacaagttccctcagtgtgtgccatttggctaccgcgcccaagtgattcatggctttgtcgaggaattggtggtgaatgacgatccggagtatcagtggatcgacaaaatacgcacaccgcgtgcttccaacgaggctcgccaggtggtgtttctcaagttgtcgggtcaggtgcagaggagaatgggcctaaaggctattaatatgggtgctaatgcagtcatcggctatacccagtgcttcgatttggagggcgacgtgggtgtggtagcccgaggcattggaacggctgtgacgctgatcaaggacaccagcacaagccaaccaaatagtgcggatgtggcactgatcgaagaatccagctccgagctccaacagcagccctgttccacaggagcagccgcaagcactggaccgtccaacatacccacaacggtggagggtagcagtcccaatttaaaacgcttcgcctcgccggtgagcagcagtcgccttaagttgacgcccagtccctcgaaaagtggcatctcggcgacaaccaatgcggatagcgcatccacttctacagcctcaacggcaacgacaatggtgccggccaccgtcggcgagatctgtcgcagatcctccgactccgaccttagtgtcacgcccaaaggaaactccatatgtgtggccagtgagcgtttggtggccgccacggcgatgatgcgtttaacgcaaccgacggtgggagccaagccaggaactgcggccgacagtctggatatgttggagtatcccttcctgacaatgacaaaatacccgacaggattcattcttcatttgggcgcaacggtcgcggcacgttccgtaaaactactagagcgtgtgcccaatccggacgagccggaagtccgagacagctggtggacggagctgcgaatggagatccgatcgcatgcccgttccctgggctgtaatgtagtgctaggttatgcggagaccacaaccatatctgacgatgtctgcgttttatctgccactggaacggcggccgtgattaacatggtgtttaatcgatctgtatcgcaaaccgatatctttaccatgtcaaaagcaaccgccagcgttgcggccatgacgaattccgtggaggacggaaatggaagcaccgccggggatacgagcattggcaaggacagcggttccctgggcaccggaaacagttcgggtggtaaacgttacggactgcccccactcaatggaccccggaatgcctgtgccatctgccacataccctacaacctaagctcggttccgtttaatgtgaagatgaagaagtgcgcggtgtgccgcaagggaagagttccggatgtactgctggctacacttgaagtgcctgaatttatgcaggttaccggaagaggttgcttcatgcaggcccaagtggtgcgcgccaaaagagatctgcgtgcggagctgaacgccaaagagatatcggatggtctgcccttcctggagtacgaacttcatcgagtgctgatcaacaagctgaaggccaagggcatgaatgccatttttgggctacgcacgcaagttgccatcggcgagcgtatgatagcgctgatagccacgggaacggctctatttctcacagctttaccggtgccgcaggtaccaaagatcgtggcaggcaactcgtggaccgacaagcaaaagctaaatgagttgcagaagaaattacaagaaacgtttgaacggaaccaggagatctatcagctgaaaagcttggacccggatttggcagccaatgtcggaggagtaccttccacaggagcctctggcgataaacaatcagatacagacgactctgatgaagaggagatgaacgagatcgatctgaactgtggcaacaaggagttgtgtgtcctggaagtggacgatatcgaagacttggaaatcatatcgctgttaatggagccatatccgccggagggcttccatgtggtaaatacgcagcaggtgccgggcatgctggaaatggatacggttaagaatctgcagatgttcacacaagtgtggcgcgcccgactcgaggtgggccaaagtgtaaacggcttccctaaacactttcagagactgttgcagaccatatacttcaagctacgcactatgataccctgtgctatctgcgatcttcgcttccgactagatctgccagagacggatcaaattcaattgctagtcactggcatggccatgggcctaagcgatgccaacagaatgaagtaccgcggacgtggacgcccggctcagcagcagcaggcacctcaacagcagaacggatatcatgatggcacggtgcacgccactcaatctcagccagagttaaacggaaaacgaatgctgcaagaggaggattacatatttccgctggacgaggatcagatggtggacacacccacgccaaccagcaccgctattccgccattcggaatgagctcattcaaaatgcgaaaaacttcaccatcacgtcttaacaatctcgtttcgggattgccttcaaccggagttaagccattgaacgttggatctgttcaacgtagccgttattttccgctgcgagatcgttatggagtggatgtgacgccactaagtttcatacctggtggtcgtatagataaatatttgggcaacctaaactttttctttattcgggagagcacgtcgatccgggaaaatggtggcatcagcggatttgtccatggcttcattaccgaactgttggctgtggtgagagcacacatcgcttcgctgggcggaaatgccatggtctctttttacatcaccgaacttatgttgttcgataatcagcacaagaatcagggccagtgcctgattagcatcggaggcgatgctgtctatgtgagctaccatgccgatgactgatataaaaacttgcggggcatatagcgcatgttttacgcgaatcgtcccaaaagcgtatactctctattttcttccgcttagctagaactatcagctctgcccagcaactggagttaaactgaagttaaactaattcacgtttacttaacaattttacagcatctgtagatggattctttatgcaatatttgaactgtgaggaatcgttctaatcctaacttagtagtgctaattttttcggtcttgttacttgtttgctggatgtttttagcgttaaatcaattgcaatttctgtacatagttgatgtttattgaatattgaatttagaacgagtgcgagacacaagtataatatcgatatatacaattgttgcaaccacaaacatgacacatatactcgtaccactagatatccaattttggcgcgtaaaatacaatacatacaatattatggaaatac

SEQ ID NO: 13926 - protein, 1116 aa, DROSOPHILA
MPGKVGVKIKAARNLPVMDKSSETTDAFVEIKLASVTHKTDVFRKSLNPTWNTDWFRFEVDDAELQDEPLQIRLMDYDTYSANDAIGKVNISLNPLCLESSSQAVHGKGTVLSGWIPVFDTMHGIRGEINVIVKVDLFSDVNKFPQCVPFGYRAQVIHGFVEELVVNDDPEYQWIDKIRTPRASNEARQVVFLKLSGQVQRRMGLKAINMGANAVIGYTQCFDLEGDVGVVARGIGTAVTLIKDTSTSQPNSADVALIEESSSELQQQPCSTGAAASTGPSNIPTTVEGSSPNLKRFASPVSSSRLKLTPSPSKSGISATTNADSASTSTASTATTMVPATVGEICRRSSDSDLSVTPKGNSICVASERLVAATAMMRLTQPTVGAKPGTAADSLDMLEYPFLTMTKYPTGFILHLGATVAARSVKLLERVPNPDEPEVRDSWWTELRMEIRSHARSLGCNVVLGYAETTTISDDVCVLSATGTAAVINMVFNRSVSQTDIFTMSKATASVAAMTNSVEDGNGSTAGDTSIGKDSGSLGTGNSSGGKRYGLPPLNGPRNACAICHIPYNLSSVPFNVKMKKCAVCRKGRVPDVLLATLEVPEFMQVTGRGCFMQAQVVRAKRDLRAELNAKEISDGLPFLEYELHRVLINKLKAKGMNAIFGLRTQVAIGERMIALIATGTALFLTALPVPQVPKIVAGNSWTDKQKLNELQKKLQETFERNQEIYQLKSLDPDLAANVGGVPSTGASGDKQSDTDDSDEEEMNEIDLNCGNKELCVLEVDDIEDLEIISLLMEPYPPEGFHVVNTQQVPGMLEMDTVKNLQMFTQVWRARLEVGQSVNGFPKHFQRLLQTIYFKLRTMIPCAICDLRFRLDLPETDQIQLLVTGMAMGLSDANRMKYRGRGRPAQQQQAPQQQNGYHDGTVHATQSQPELNGKRMLQEEDYIFPLDEDQMVDTPTPTSTAIPPFGMSSFKMRKTSPSRLNNLVSGLPSTGVKPLNVGSVQRSRYFPLRDRYGVDVTPLSFIPGGRIDKYLGNLNFFFIRESTSIRENGGISGFVHGFITELLAVVRAHIASLGGNAMVSFYITELMLFDNQHKNQGQCLISIGGDAVYVSYHADD

SEQ ID NO: 13927 - DNA, 2778 bp, DROSOPHILA
aagctgcatgctgctgttgaatgcggctatcaggtccgcattccagttgttctgtttgaggaatctcagtagataacgcaccatgcggcgggtgagcatcaggaatttgtccatgcgccactgatctatgccaaagtactcctggcacattgtgcgcataaacgcactaaagtaggccagactgcaggccgtattaccgccgaagctgtccaccatttgagccaacttctcggccagctcctcctgcaccagcggcttatccgacatccacatggtgtagtacaatcccttccagatgcgcatgaagtcgtcctcgttgaagggaaaggagctaccggcacgcgccttgaaccacttgcgcaaaatgcggatctggcgattacgctccaccacatcgttgcaggcaagagcacgtataattttcacctcctgggcgaccaccatcagctccttggccaccttcggctgtgaagcgtcctcctcctgctcgacctggatttcggccgcctcggcgttgcgcttaactggcttcttgcgcgtcaccattatccggctaattcaacttttagttgcgaaaaataagtgagctgtgtatattgaatacggtacggcacgaccgcacgtgttgccgttcgatgttgccagatgttgaaacgacattttctccaaatttcgtccaacagctctaaatgcatgagctgtactgaaaatgacaacaaaaactcaagctaatgaaataattttcaaagaataaaataaagaaaaaaagaataataaaaagaatatttaaattgctagttttgatacttcatgaaacgcttgctttatacattttaatacaattttatatatttttagccatttataggttgttattttatagctaccagcgctgacttctttacggaaagtggcaactctcttccacagctgataattcggtctgctttttgtaaattttgcttgtccagcaaatttagttaaataattcaaagaaatcatgcccgtggtgaacgtgtcggctgccgaggagtaccagaagtacattaatgcggataagacgaccgtagctctattcgccgccgaatgggcagagcaatgcggtcaggtgaaagacgcgctggaggagctggccaagattactggcgaaaaactgcagttcatcagcctaaacgctgaacaatttcccgagatttccatgaaacatcaggtacgctcgtatttattttatgaaaatataacagtagttcctcattcatttgcgatgccaccagatcgaggccgtgcccacagtcatattcttcgccaagggctccgccgttgaccgtgtcgatggtgtagacatcgccgccataagcgccaaatccaaaaagttggccgaaaacgcaagcagcgcggcggcaacaggacaaacgttggaggaacgcctaaaggccctaatcaatacagctccgctgatgatattcatgaagggcgaccgaaatggaccgcgttgcggattctccaagcagctcatcggcattgtgaacgaaaccaagtatgcaaattgatcatcagttgtatttgatttcaagttataaacgaaaatatccttcgatagcttgccgtacgagacatttgacatcctcggcgacgaagaagtgcgtcaaggcctgaaaacctactccgactggcccacatatccccaggtttacgtcaagggtgaacttatcggcggactcgatattattaaggaactgctggcgaacaatgagctcgagtccacgctaaagggctaattccatcggattgcatctactcctacagacaccataaaccagaaacaaatttttagctagatccttagactttttaatggtttaataaaggatttttgctacattctggtattattttattcatcgaaatttttaataacaattgtattaaagcaaatgtgctataggtcatccataagacatcttacacgggcttcaatggtgtcaccataaatgtttacaaacttaacgacataaatatagctagaaatttgtaagaacttttttatacaccagccctggtttatctggtattttgcgtaccttcattttgtaaacagctgtttcggcgtcggcatcttgcacattattttcgcaatattatttatattattgaaaatacccattaactataaacttatatccaaatctttaaatggctgagggtaataccgctggcggagaggaccaaaagctgacggacatctttctaaagggctggaacatattcgacgagctagaagttaccgaactgcccttcaatggcagcgaatttcaggtgtgtaatattgaagatcttcatatatatgtaataaaaaccagcattgaacgtttaccacaacgtttagaacaaagtgaagactgcaatgggccttttcgagcaggccaccgtcattgtgaaccaggttagcatgttcagtgccaacgagttgatcgacgaggtgtccacggaatcgctaccattcatgctgctcccttactttctgggcaagcttaccactaagatcaacagccccaataacacacactccatagagctgggcgagatttacttcaaggaccacctgcagcgttgccaggagtatgatctctgtgcagcgcccaaatctcaggtggctaaggcggatagccaagcggaaaaaagcgagcagcgcgagctggtagaggcagccttcaatagaaacgacaaaatagcccagtatcgccggatgaaggagattgacgagtatatggccagaat

SEQ ID NO: 13928 - DNA, 651 bp, DROSOPHILA
atgcccgtggtgaacgtgtcggctgccgaggagtaccagaagtacattaatgcggataagacgaccgtagctctattcgccgccgaatgggcagagcaatgcggtcaggtgaaagacgcgctggaggagctggccaagattactggcgaaaaactgcagttcatcagcctaaacgctgaacaatttcccgagatttccatgaaacatcagatcgaggccgtgcccacagtcatattcttcgccaagggctccgccgttgaccgtgtcgatggtgtagacatcgccgccataagcgccaaatccaaaaagttggccgaaaacgcaagcagcgcggcggcaacaggacaaacgttggaggaacgcctaaaggccctaatcaatacagctccgctgatgatattcatgaagggcgaccgaaatggaccgcgttgcggattctccaagcagctcatcggcattgtgaacgaaaccaacttgccgtacgagacatttgacatcctcggcgacgaagaagtgcgtcaaggcctgaaaacctactccgactggcccacatatccccaggtttacgtcaagggtgaacttatcggcggactcgatattattaaggaactgctggcgaacaatgagctcgagtccacgctaaagggctaa

SEQ ID NO: 13929 - protein, 216 aa, DROSOPHILA
MPVVNVSAAEEYQKYINADKTTVALFAAEWAEQCGQVKDALEELAKITGEKLQFISLNAEQFPEISMKHQIEAVPTVIFFAKGSAVDRVDGVDIAAISAKSKKLAENASSAAATGQTLEERLKALINTAPLMIFMKGDRNGPRCGFSKQLIGIVNETNLPYETFDILGDEEVRQGLKTYSDWPTYPQVYVKGELIGGLDIIKELLANNELESTLKG

SEQ ID NO: 13930 - DNA, 2893 bp, DROSOPHILA
accttaaacaaacaaacatgcccaccactggtcttgaataacatatgcattccacaagccgacgaggtaacatatctgggagttcatctggacaggcggctcacttggcgcaaacatatagaagccaaatcgaaacatcttaaacttaaagcaaggaacctccactggctcataaatgctcgctctccacttagtctggagttcaaagctcttctatacaactccgtcttaaaacctatctggacttatggctccgagctgtggggcaacgcatccagaagtaacatagacattattcagcgagcacagtcaagaattctgagaattatcactggagcgccgtggtaccttcggaacgaaaacatacacagagacctaaaaatcaaattagtaatcgaagtaatagctgagaaaaaaacgaagtataacgaaaagctgaccacccatacaaatcccctcgcaagaaaactaatccgagtatgcagtcaaagccggctgcaccgcaacgacctcccagcccagcaataaacttattagggcattaatgaaaaaaaaaaactatcactaagtgaaagttaattaagttagattaagatttgaacacttattgttagtctcttaacacaaagggaagattcaataaataataaaaattaataaaaaaaaaaaaaaattgtgtcgcttggcaatttaatgaattttaatgagaacttactcgccgaatgccagtaacagcttggttctgcattcattttcatttgtctgttttgtgatgatttttgattttagacaaaagcatatgtacaagacgatatggattgttactataaccgacgaccctcaaactgggaacataagttctcttttgatctatattgagtaaagaaatttataaatgaagatctacgtttccgaaattccccctatagagctataaaacttttgaattttttagaaatgatttttatttttaagcgaaattgtagttcctgactccttcctagatgccagtgttagtcttgatccagtccaggtagctggtcacacgagtgaaggcagcggggtagcccttctcgcaaccggcagaggcaccgaatgaggtcagaccgatctgctcgctggacgacttgaggaccagaggaccgccggagtcaccgttgcaggtggacttggcgtcggtggtggccacgcagagggttgagtcggtcacgaccgaggtgccgtaggtttgggcgcacttggtgttggtgatcacagtcaggtcgacatactgaagattggtagccacaccactggaggtgtcactggtgcgtccccatccggaggcgacagcgacgtcaccgacgaaggtcgagtaggagttggagatgcttggcagcttgacggcggagatcctgctgctggaggaggtggcggggatcttgatcagggagatgtcgttgcgcaggttagcgctgttccagccggagtggatgatgatgtcggagctggacacggtgtgggtgatctcggcggaggtgcgcacggtggcgcccaagtagacggtcacggactgaactctgcgataaatcaaacatacaattggttaggacattggttccaagatattttcggcattccttcaagggacactcacccatcggtacagtgagcagcggtcaggacccaggtgctgccgatcagagaaccaccgcaccaggcgctggacagagcactcagcttcagggaaagtcccacctggtaggggaactggccgacggcggcgttgcttcctccggtgatgcgacctccaatgtcgccaacgacgggcatctcgcggctgcgatggcgcagctccggctcggggaaagcggaggcggccacagccagggcaaggatgatcaggaacttcatcttgggaattgttgcttgttcagttaagggaactcaactgtttggccaaggaccagctggggtcttttatactggccaagtcgcgtctgcgattgggttgcaattcagaaatagagctgtcccgattagataggaccactaaagtcggttcgaactaccttatctgttgagattttgtgccgaagatatgaatgaatgaacttcagccacacggtcgccaaaattactttcccaatccaagagtattaatcccgatacggatctaatcagggctatgggcttcgagtggatttccagatcgagccgctgcgataccaaaggcctagcatggggttgctaattaatttgattagttttacacatacgcgatatatacataactatatattgcgatacaaaattggcaaaggtttgctttgctcttcagcgtatcttataattcccatggtagtcgagtgctatcttatctcctgtctatagggtgagaagccgtaagcccacagtttagttgggtttgtttaccttcgataaaggtcaaggagtaggacgtgagttggtcaagactgcttaaacttcataggaaatcataccgccgtctaacaattgcgtatctggactctctctttgattacaaacacgcaaatttcagttgttttcgcaaccgcagccttctttatcagcgaaagccgcgtgattttatgacgcgttcaaccgaccacatcactgcggttaatagccaattcagatggccaattgaaggcgattagcgggaggaggcgctgcggtctgtacccaatatgccctcaccaaaaacggacactcaacccaatgatttcaatttcagtggcgattcatcagcaatttccatggcaatgtaatttttcttttgtgcccttattgagctccccaaattgacttgctcttctgcaatgccgaaatgtttattgttatttatcggtaacaattttcattcaagagaaaacaaccacacataaaatgg

SEQ ID NO: 13931 - DNA, 816 bp, DROSOPHILA
atgaagttcctgatcatccttgccctggctgtggccgcctccgctttccccgagccggagctgcgccatcgcagccgcgagatgcccgtcgttggcgacattggaggtcgcatcaccggaggaagcaacgccgccgtcggccagttcccctaccaggtgggactttccctgaagctgagtgctctgtccagcgcctggtgcggtggttctctgatcggcagcacctgggtcctgaccgctgctcactgtaccgatggagttcagtccgtgaccgtctacttgggcgccaccgtgcgcacctccgccgagatcacccacaccgtgtccagctccgacatcatcatccactccggctggaacagcgctaacctgcgcaacgacatctccctgatcaagatccccgccacctcctccagcagcaggatctccgccgtcaagctgccaagcatctccaactcctactcgaccttcgtcggtgacgtcgctgtcgcctccggatggggacgcaccagtgacacctccagtggtgtggctaccaatcttcagtatgtcgacctgactgtgatcaccaacaccaagtgcgcccaaacctacggcacctcggtcgtgaccgactcaaccctctgcgtggccaccaccgacgccaagtccacctgcaacggtgactccggcggtcctctggtcctcaagtcgtccagcgagcagatcggtctgacctcattcggtgcctctgccggttgcgagaagggctaccccgctgccttcactcgtgtgaccagctacctggactggatcaagactaacactggcatctag

SEQ ID NO: 13932 - protein, 271 aa, DROSOPHILA
MKFLIILALAVAASAFPEPELRHRSREMPVVGDIGGRITGGSNAAVGQFPYQVGLSLKLSALSSAWCGGSLIGSTWVLTAAHCTDGVQSVTVYLGATVRTSAEITHTVSSSDIIIHSGWNSANLRNDISLIKIPATSSSSRISAVKLPSISNSYSTFVGDVAVASGWGRTSDTSSGVATNLQYVDLTVITNTKCAQTYGTSVVTDSTLCVATTDAKSTCNGDSGGPLVLKSSSEQIGLTSFGASAGCEKGYPAAFTRVTSYLDWIKTNTGI

SEQ ID NO: 13933 - DNA, 2690 bp, DROSOPHILA
cttggcgagggctagggcagcgttctccagaccacggttctcgggtcccttgatgaagacaacgcgcagtcccttgtttacggatccagcaacacgctccagttcttgtggctcatcgaagtcctgctcgttggcggagtaggtgaagaactccttctggagctcagcagcgggagcgggggcgttgtaggagactggagcggccagagcgtcgccacctcctagaccaccgagtccaccaagaccgccaagaccggaatcaatagagccaccaccgatggaaccaccaagggaaccacctccaatggaaccgcctccgatagagccaccaccaatgaggcctcctccaatggatcctcctccaatggagcctcctccaatcgaaccacctccaatggatccacctccaatgctgccacttccaggagcaaaggacagtccggagctggagtgtcccacgggctggtagttgtagccgagcttatcggcgcaggcgactgccaccaggcacattacctacaggattcaagggttatccgttagttgtgaattcgtcttaagtcctggctacaccacttacgatgaaggcgcgcatctttagttttgggtttgaggttctcttggttcggagcacaaattgcttctgcctatgaccacggcggcggtaactatatatactaacccaacttcgaagctggcggcgcagtttttcgaagacaaagcgctgatgctgctaaatgttttgtccgcctacaaagtaggcagcgaacggcttttgttcgggctcgcagagcaattcagctttgcataaatgttattataaggaaaagctattaaaaaacaaacaaattgcaatggccgatgacaaagtcagaaacttcgaagatctagattaaaaatagatatataaatctaagcgtatttgtttttatcgattttcgttttttattcaattacatttatacaacacatttaacaactgtcggttttcgttcggtccttaacggatgcgcaggcgacgcaggatgttggcgggcaggtaggagttgctcgtggcggcggctggtggggagtagttggggccacgacgagcgggaaccacgggggcagcggaggcgaagttgatggcgttggcaactcctccgttgatggactggctggatcctcccaggttatcgtactgcgactggatggcacgctgggcattggccgcatcctcgggagtcctgtacttgacgaagtgcacctcaggacgctggttggagttctggcgggcggcattgaatttctgggccagatctccaatgtcggtctgcttgttcaagacatagatggcggtcctctgctcggcagcctgcttggcgagggccagagcagcgttctccaggccacggttttcgggtcccttgatgaagaccacgcggagtcccttgttcacggagccggcgatcttctgggcggccagaggatcctcgaactggctctcgtcagcctcgaaggtgtagtactccttgttcagttcgctggagaccgagtagtccgggctgctggcagcaccatcgtaggagtcgccaacactgcttccggagtaactgggaacattatcggaggcggctccggtaaatcccgctccgtagttgtactgggcgcatgcggcaccaatcaggcagaaagcgatgaggaaacgcatggtgaaggtttggttttgtaggctgggtgtgcttaacaggcaaaggccaagactgaatcctgagactgaggtgagcagcttatatacccatctggcgtagttagaaccgacttagaactataaccgacaccattcccgtcgggttgctacataactcaactagttttttatgcaaagcggtgcgcttatgaaatgattatgcaaactatcctaaaattctcgccaatacatccagtcggcgacccccgactttctgcccaattgcaaaagccaaattctcgaccggttcatggcgccgcgatttattcttgaccggggcaaaactgcccggaattcgattggggaaaatgctgcaaaactatcaaacccgtttccaaaaaaaaagtcagagcccgtccaaaaatgttctgatggtcattaaagtcgaacacaatgtgatgcattctttgagttccgcctacgaaacgataaaatcttaatctatgcgaactccattgatagttaatggtttgttgttgctttctgtttgtcgccttttttgctatcgaaagtgggtctagaatttgaagtgactttttagtttgaggttcaaagtcaaaaagaatgtcggaagcttgctttgaactctgggcaaacctgttttaaatagtctgggaattccatacaagtcccgtatataagagccagaatatttgcgtccagtcagtttaaaatctcatttaaacggagaagaagaacgtacaagcaatcaaacaatatgaaaaatgctgtgtttggatagaaggatatcatcatcaaaagttctgctgatacttttctgtaatccatacaaaataatcgtttgatagtgttttgtcatcttaagctaagcgaatgaaagtgaagggttttaacgttaaattttattttccttatttttgaaaactataaattttcttcagttggagttcaactgatgtgttcatgtgtcattcattcagaggcgttcataaaataagca

SEQ ID NO: 13934 - DNA, 690 bp, DROSOPHILA
atgcgtttcctcatcgctttctgcctgattggtgccgcatgcgcccagtacaactacggagcgggatttaccggagccgcctccgataatgttcccagttactccggaagcagtgttggcgactcctacgatggtgctgccagcagcccggactactcggtctccagcgaactgaacaaggagtactacaccttcgaggctgacgagagccagttcgaggatcctctggccgcccagaagatcgccggctccgtgaacaagggactccgcgtggtcttcatcaagggacccgaaaaccgtggcctggagaacgctgctctggccctcgccaagcaggctgccgagcagaggaccgccatctatgtcttgaacaagcagaccgacattggagatctggcccagaaattcaatgccgcccgccagaactccaaccagcgtcctgaggtgcacttcgtcaagtacaggactcccgaggatgcggccaatgcccagcgtgccatccagtcgcagtacgataacctgggaggatccagccagtccatcaacggaggagttgccaacgccatcaacttcgcctccgctgcccccgtggttcccgctcgtcgtggccccaactactccccaccagccgccgccacgagcaactcctacctgcccgccaacatcctgcgtcgcctgcgcatccgttaa

SEQ ID NO: 13935 - protein, 229 aa, DROSOPHILA
MRFLIAFCLIGAACAQYNYGAGFTGAASDNVPSYSGSSVGDSYDGAASSPDYSVSSELNKEYYTFEADESQFEDPLAAQKIAGSVNKGLRVVFIKGPENRGLENAALALAKQAAEQRTAIYVLNKQTDIGDLAQKFNAARQNSNQRPEVHFVKYRTPEDAANAQRAIQSQYDNLGGSSQSINGGVANAINFASAAPVVPARRGPNYSPPAAATSNSYLPANILRRLRIR

SEQ ID NO: 13936 - DNA, 2731 bp, DROSOPHILA
tcttcggcaaggctaaaagcttgttttatgtaggacatctgcacttggtttttccgactgaatgacaatcgtttagtcattataatcgttttcgacacatctgtttagttctgatttatggacatgatgcaagcgctaaatttagcaagtcgtctaatgagatgtttgaaatgccgcccccagttcattgattctttattttcgcatatattactaatgaaataaaaaatttaacttgagagtggtgaaaacgatatgtttatatttaatttaacttttttgtcgtaaaaacattttgcctacatttaaaatatgcggaaatattttattttattcttttcccagtacttcgtaggataatattttggttatgacaaatattaaacgtcaaggtcatcgggaagctgccttgggtaatatagcttaccaaattcttaatgagttttaaaggtcttttgctttgtattaagttaatagcgttgcacctttttaagaataaattcaaattaaaagtcattaccaaactttttgtgcaataaaaacaggtcgaaaaatctcaccaaagactgaaataattttctaaaagcccaacttgtaactccactcatgttgtcatcggaaggtatacactattgtttactacaccaccatccaatataaaatatcatagaatgtttgtattcagatttttgtatattatttatcaatagatttcaacaataagatttaacaagaacagtcaacgccttcatctcgaagtcgttaaaatatttacaaacgacgacggaagatggaagtgggcaggtaagcgttctcagggatctgagcattagccttctggacgggaccagcggaggcgaagttcagggcgggtgccacaccaccgttgtgggcctgagaggatcctcccaattggtcgtactgcgactggatggcgcgctgggcgttggcagcatcctcgggagtgcggtacttgacgaagtgcacctcgggcttgttgttattgttgttgcggatggcgttcagtttctgggcaagatctccaatatcggcctgcttgttcaggacatagatggcggtctcctgctgggcagcctgcttggcgagggctagggcagcgttctccagaccacggttctcgggtcccttgatgaagacaacgcgcagtcccttgtttacggatccagcaacacgctccagttcttgtggctcatcgaagtcctgctcgttggcggagtaggtgaagaactccttctggagctcagcagcgggagcgggggcgttgtaggagactggagcggccagagcgtcgccacctcctagaccaccgagtccaccaagaccgccaagaccggaatcaatagagccaccaccgatggaaccaccaagggaaccacctccaatggaaccgcctccgatagagccaccaccaatgaggcctcctccaatggatcctcctccaatggagcctcctccaatcgaaccacctccaatggatccacctccaatgctgccacttccaggagcaaaggacagtccggagctggagtgtcccacgggctggtagttgtagccgagcttatcggcgcaggcgactgccaccaggcacattacctacaggattcaagggttatccgttagttgtgaattcgtcttaagtcctggctacaccacttacgatgaaggcgcgcatctttagttttgggtttgaggttctcttggttcggagcacaaattgcttctgcctatgaccacggcggcggtaactatatatactaacccaacttcgaagctggcggcgcagtttttcgaagacaaagcgctgatgctgctaaatgttttgtccgcctacaaagtaggcagcgaacggcttttgttcgggctcgcagagcaattcagctttgcataaatgttattataaggaaaagctattaaaaaacaaacaaattgcaatggccgatgacaaagtcagaaacttcgaagatctagattaaaaatagatatataaatctaagcgtatttgtttttatcgattttcgttttttattcaattacatttatacaacacatttaacaactgtcggttttcgttcggtccttaacggatgcgcaggcgacgcaggatgttggcgggcaggtaggagttgctcgtggcggcggctggtggggagtagttggggccacgacgagcgggaaccacgggggcagcggaggcgaagttgatggcgttggcaactcctccgttgatggactggctggatcctcccaggttatcgtactgcgactggatggcacgctgggcattggccgcatcctcgggagtcctgtacttgacgaagtgcacctcaggacgctggttggagttctggcgggcggcattgaatttctgggccagatctccaatgtcggtctgcttgttcaagacatagatggcggtcctctgctcggcagcctgcttggcgagggccagagcagcgttctccaggccacggttttcgggtcccttgatgaagaccacgcggagtcccttgttcacggagccggcgatcttctgggcggccagaggatcctcgaactggctctcgtcagcctcgaaggtgtagtactccttgttcagttcgctggagaccgagtagtccgggctgctggcagcaccatcgtaggagtcgccaacactgcttccggagtaactgggaacattatcggaggcggctccggtaaatcccgctcc

SEQ ID NO: 13937 - DNA, 566 bp, DROSOPHILA
tgctccgaaccaagagaacctcaaacccaaaactaaagatgcgcgccttcatcgtaatgtgcctggtggcagtcgcctgcgccgataagctcggctacaactaccagcccgtgggacactccagctccggactgtcctttgctcctggaagtggcagcattggaggtggatccattggaggtggttcgattggaggaggctccattggaggaggatccattggaggaggcctcattggtggtggctctatcggaggcggttccattggaggtggttcccttggtggttccatcggtggtggctctattgattccggtcttggcggtcttggtggactcggtggtctaggaggtggcgacgctctggccgctccagtctcctacaacgcccccgctcccgctgctgagctccagaaggagttcttcacctactccgccaacgagcaggacttcgatgagccacaagaactggagcgtgttgctggatccgtaaacaagggactgcgcgttgtcttcatcaagggacccgagaaccgtgaaactgaacgccatccgcaacaacaataa

SEQ ID NO: 13938 - protein, 175 aa, DROSOPHILA
MRAFIVMCLVAVACADKLGYNYQPVGHSSSGLSFAPGSGSIGGGSIGGGSIGGGSIGGGSIGGGLIGGGSIGGGSIGGGSLGGSIGGGSIDSGLGGLGGLGGLGGGDALAAPVSYNAPAPAAELQKEFFTYSANEQDFDEPQELERVAGSVNKGLRVVFIKGPENRETERHPQQQ

SEQ ID NO: 13939 - DNA, 4076 bp, DROSOPHILA
acgcccctgccacatgaacttatcgataacttgaggcagctgttgctcactttgttttgtgtaaataattggatgcggagaaaaacgtattattattgccataccttctctagtctttcgctttaacaaattttccatgtcggacgacatcaagaagtatttagacggcctgctgcaaaagtaaatattccacaggaaaggctgttcccaatatgattaacttataatttttcccccattccccgatttacacaaaagggtcagcgggctgtacgttattcagattacggatcgcgacggagtgcccctcctgcgggttagccaggagaagaacgtggacttcgccctgatgccctcgttcatacccacattcaccaccgcctgcgatcaggccagcaaactgggattgggcagaaacaagaccatcatctccatgtactccaattaccaggtggtccagatgaacaagctgccgctcatcctgacctttgtgggcgcggagaactgtaacacgggacacattctcgcactggagcaccaggtcgatggctatttggaggacattaaacaggctgtcaccgaggcctaaagttagtctaccttgtaatatgcatatttttaatatttactaaatgtttatacatacatactttattgagaacagaatgagtttttaaaaatctcaactcaccattgtactattccgggaatttatttcatatcctgcgaagggtgatctcaaagatgaacaaagttccgagtcctccgttttggcaacaatatcaaatatgcaaactattgacactttatttaaaatgaaaaattcttgctgcctaaaatgtgtacattcaattaaatttcttcatatagtttctcaattataatatacttttccctataccttgaaatcgtctgtgctcaagtatcacgaaagtaaaatatttgtatgtttgagctcaaggaaaccgactttaaatcaacattttcattcagtgatgttatctgttttaaaaatactaggtgtttacactttattcagaatgaaacttgatgtactttttgcttaaatgcatatactgagttaattagctacaattcttgatggttttcctgctgcagtttgggaatgatctcgacaaaattgatattctcctttaaaactaaaatacaatccccaaatctctggtctacgcatgccaagcattcacatttctctgcggctcatcctcatcgtcgattgttgaacatttcagagttcgtcgtgcagattctccgattcggactggaaagcttcgctgtcgcaggcggcgggagtttcgaattcaaagtagtattcacagcgattgggctcgctgacggcagtgattttgggttccagggcacaactaatgttgatgatggccgaacggtttggaccattccagcaggcagcaccattggtgtacttttgttgggaatattgctttggctctccactccatttgtcccagcgacccagcgtggtttcaggcccaccgctcctcgacttctgggaggcccgatcgaagggacaaagggtgtacacatactcccgatcttcgaaattgtagcactggccatcgtgcacggcccactcctcggtcaggccgtagcccttgttgttctggtcgtcgatctcgttaacctcctgctgaatctcgcgcaggctgcgctccacttcctcgagagcatttcgcgcctcattggcctgctggatcaaacgctgcgtctccggatcgtagttaggtggcgtggcttcttccgcatccggagaggcttcgccaacgcccacatcgggttcctcatcatcgtactgatcctcctcaccctcttcgtcggcttcaatatcatcatcgccggcgagttcagcttgttctggaataggaagaaaaagaaatcagaactcaaagagtaagaaatagtattcctattatcattaccttcgcttagctttggtggagtgggctggatcgactcggtggtgacctctggctgctgggcaacttcctccggctgcggcggctggaacagaccctcggccagcatttgcagagacttaatacgcggccaggccagcgttacgaaagcatctagatccactcgttcgcgctcgtccaggaagtacttggcctcctccacagttaccacgccgttgcgatctctgtccagattcatgtcgaccatcagttcggtaacttcgacgaagccatctttgttggtgtcgtagcgcacaaaggtgagcgtggcctcttggcgcatctgttgcggctcccgctccgcctgtgcggtgtcagcatccacctcgcgctgttgctccttaaagatttcaatggcttctgcctctagagcctcagcggtttgcttgagctgctccttttcggcgcgcagcagttcctgttccttgcgtcgttgatctagctcaaggcggcgcgcctctcgctcggccctcatctgcttgccacgggtaatcatctcctgtcgccgctcagctccacgtttgtgcagctccgctgcattccgcctttggacagccgccgctgctccgagttccaagcaggtattcgggcaaccgaccgtctctgactcgtcactgccatcgcagcagtcacagatgccgtcctgcacctgcgaactgggtatatttaccggctggtggcctttgttcacacaatggaactggccctgcggacaggccgcagtgccaggttcatcgcttccatccgcacagtcgcagtaatcgtcgttgatgtgggagaagggtatggtgcggctgccatccaagcaggtccaactgttttcgcccgcccgaggttggtacagtgaagccttggccagcggaacacccagcggacgtggaacttcgctggcagagcctacgttggtggccaccagggccagcaggagcggtattagcagcacttggctaagttgcaagctttgcattttggctgtgctcagtactactcctaattaatcttctaatttgagttgcctcccgagtgctgtaaatcttacgtggaatttgctatggttttttacgaatcgtaaaatgccggtgcagcactatcgatggcaatagagacaactatcgatagcaacgggcagtggcgggatttgaaatggccgaagggatttcgtttgtatgaccgacacggggaaattggtttgcttattttaatttgattaaattccttgaaaatttcacgtattatgttatgatgcagaattactttcgcgctggtttttagcacctgaccactgcactgctgaccaactgtcttttcggcagtgtggcaacgctgccaaatcagctgccggtttgttatttaacaaaagtggaggatcatagagcccataaaataatggagttcctgactaaagtgtgggccaaagaggcaacagcgcccgaggcaatagaagccatcaccggcgcagcgcaagaaaaacaaaatgcaaagactgaaaaagcatctgccagtaaggagacgagcaccgaagaaaccaccactgctcaaaaggattggggctacgacctttatccggagcgaaggggcgaaaccttcaagcccaaatggacacgagtcctgttcggcttggaggggcaggagaacattgatcgtttcaagtgcgaggagaatgtgtactggtgtgtcaaaaatggtccgctggtcaaactgatgatgggagcactgaaaagttccggttgtcccatcgatctgcgccgacacatctcatgcgaggtgtgcgaccccacagtcaccggcggttacgatcccaagctcaaccagatcgtggtctgccagaatatggccaggaacaagagcatggtccatggagtgctaacgcacgagatgattcacatgttcgactactgcaataacgacatggacttccgcaacgtggaccacctggcctgcacagagatcagggcggcaaacctggcgcattgctccttcttgagcgccatgttccaaggagatgcctcgccatttaatgtcaaggaagcgcatcaggtggctttcttatatatttttattaaccaaatgcttaagaaactg

SEQ ID NO: 13940 - DNA, 2011 bp, DROSOPHILA
caccggcattttacgattcgtaaaaaaccatagcaaattccacgtaagatttacagcactcgggaggcaactcaaattagaagattaattaggagtagtactgagcacagccaaaatgcaaagcttgcaacttagccaagtgctgctaataccgctcctgctggccctggtggccaccaacgtaggctctgccagcgaagttccacgtccgctgggtgttccgctggccaaggcttcactgtaccaacctcgggcgggcgaaaacagttggacctgcttggatggcagccgcaccatacccttctcccacatcaacgacgattactgcgactgtgcggatggaagcgatgaacctggcactgcggcctgtccgcagggccagttccattgtgtgaacaaaggccaccagccggtaaatatacccagttcgcaggtgcaggacggcatctgtgactgctgcgatggcagtgacgagtcagagacggtcggttgcccgaatacctgcttggaactcggagcagcggcggctgtccaaaggcggaatgcagcggagctgcacaaacgtggagctgagcggcgacaggagatgattacccgtggcaagcagatgagggccgagcgagaggcgcgccgccttgagctagatcaacgacgcaaggaacaggaactgctgcgcgccgaaaaggagcagctcaagcaaaccgctgaggctctagaggcagaagccattgaaatctttaaggagcaacagcgcgaggtggatgctgacaccgcacaggcggagcgggagccgcaacagatgcgccaagaggccacgctcacctttgtgcgctacgacaccaacaaagatggcttcgtcgaagttaccgaactgatggtcgacatgaatctggacagagatcgcaacggcgtggtaactgtggaggaggccaagtacttcctggacgagcgcgaacgagtggatctagatgctttcgtaacgctggcctggccgcgtattaagtctctgcaaatgctggccgagggtctgttccagccgccgcagccggaggaagttgcccagcagccagaggtcaccaccgagtcgatccagcccactccaccaaagctaagcgaagaacaagctgaactcgccggcgatgatgatattgaagccgacgaagagggtgaggaggatcagtacgatgatgaggaacccgatgtgggcgttggcgaagcctctccggatgcggaagaagccacgccacctaactacgatccggagacgcagcgtttgatccagcaggccaatgaggcgcgaaatgctctcgaggaagtggagcgcagcctgcgcgagattcagcaggaggttaacgagatcgacgaccagaacaacaagggctacggcctgaccgaggagtgggccgtgcacgatggccagtgctacaatttcgaagatcgggagtatgtgtacaccctttgtcccttcgatcgggcctcccagaagtcgaggagcggtgggcctgaaaccacgctgggtcgctgggacaaatggagtggagagccaaagcaatattcccaacaaaagtacaccaatggtgctgcctgctggaatggtccaaaccgttcggccatcatcaacattagttgtgccctggaacccaaaatcactgccgtcagcgagcccaatcgctgtgaatactactttgaattcgaaactcccgccgcctgcgacagcgaagctttccagtccgaatcggagaatctgcacgacgaactctgaaatgttcaacaatcgacgatgaggatgagccgcagagaaatgtgaatgcttggcatgcgtagaccagagatttggggattgtattttagttttaaaggagaatatcaattttgtcgagatcattcccaaactgcagcaggaaaaccatcaagaattgtagctaattaactcagtatatgcatttaagcaaaaagtacatcaagtttcattctgaataaagtgtaaacacctagtatttttaaaacagat

SEQ ID NO: 13941 - protein, 548 aa, DROSOPHILA
MQSLQLSQVLLIPLLLALVATNVGSASEVPRPLGVPLAKASLYQPRAGENSWTCLDGSRTIPFSHINDDYCDCADGSDEPGTAACPQGQFHCVNKGHQPVNIPSSQVQDGICDCCDGSDESETVGCPNTCLELGAAAAVQRRNAAELHKRGAERRQEMITRGKQMRAEREARRLELDQRRKEQELLRAEKEQLKQTAEALEAEAIEIFKEQQREVDADTAQAEREPQQMRQEATLTFVRYDTNKDGFVEVTELMVDMNLDRDRNGVVTVEEAKYFLDERERVDLDAFVTLAWPRIKSLQMLAEGLFQPPQPEEVAQQPEVTTESIQPTPPKLSEEQAELAGDDDIEADEEGEEDQYDDEEPDVGVGEASPDAEEATPPNYDPETQRLIQQANEARNALEEVERSLREIQQEVNEIDDQNNKGYGLTEEWAVHDGQCYNFEDREYVYTLCPFDRASQKSRSGGPETTLGRWDKWSGEPKQYSQQKYTNGAACWNGPNRSAIINISCALEPKITAVSEPNRCEYYFEFETPAACDSEAFQSESENLHDEL

SEQ ID NO: 13942 - DNA, 3559 bp, DROSOPHILA
gaagtggtagtgctgggtggagggagggagtcggtttccaactggaagtacgaccaaaaactgaccttctccttcgactccttcgctgctttcaattgacggacgagatcgccttgcactttgatttgctccagaatctgctcacgcgtatcactcatattccgtgctcgatggccaaaaatgaaaaacggcaaacggttgacagtccactgcaaaaggcgggcgcgcggcgtttcaatcgtctcgaatcgacacggcgatttatgctgtcttttccagctttcagctgctttttctgcgctgctggccaaaaaaaaaattcgcacgcggtggtcaatgtgaccgttcgtcgcgtggtgggaaaacgtgcgctagtgcgaactcaaaccgtggttgataactgggctggcggacatgtaaagtgtataatttataatttattaacaacaatcaacacacgaatgctggccactgttagtaatattaactgcactacaatttattagctaattttatcgtttttttttttttttaaataaaaatgttcatgtcacttgattgcgtaaagttgatcttgtttgttttttgttttaaacaagttcaaataagttaaaataagttgattcgattacagcacaaacttatctatcctaaaatcattaaatagaatattttttgtcaaaactacatatattacaaatcatcaattaaaaaaaatatatttttttttaaatagcaaatcctgaaatattttaagaagcgttttttgtttaaattgttgtttattgttaaattgtttaaaaatcgaaaaattcgaaatgaaatataagattggaaaaatgttttttacttcaacatttaaaatttccctgcccagcaggcgatgtgcttagtttcattggtatatatttaagcatcacccttagattcagtattccttcgacaccgactgactacaaactgaaattaaaaaaatagcattgaaaattaataagacacgctacacatacacaaacacacacgcacaccacacacgagatgaacaagccgcaaaagcccatcaaggtgaagcgcgccaagcggaccggatgctccaggattcagccgcaggaattcgtggaggctcaggtggagaacgcgcgcagggcggtggagcgcaagctgatctacctgtccgagtcgaacagagccagtgcatccactcgggcggccaagcgaagcacggctggcgcaggcggaggagcagggcgggaaggatcgagcatggctggccatgcccatggtgagcgtcgcaggcgcagcaagaggagtctgctacacgctccagctcaggaagagaccgacgaggaggagagttcgccgctggagaagacgaacaactacgataacagaagacgcagcagttgcaatcgtaagttacaaatacatttgcatatcgtcgatttgggatgcacctttctatatgatcttgggtattattcaagctagagacaccaaatttggtatacaatacgttattggttattagaactctttaaaatcttgaaacagcagtatatatttatcatcattacatatatcatctacttaagacccttctttctatatgatcttggtgcttagttaggcaagagacaccaaatttggtgtacagtactttattggtttattatactcatataaatcacgaaacataagtttcaagtgcaatttattttaaaacaacgattacaattgtaggttattaaatataatcgatttggacacctgttatctatatgatcttgggccttattaaagctactaacaccaaatttggtatatagtacttaactgattaatatagtatattaaaagtgatattaatttaagatctcatattgagttaaccaattctccattctccattctccaacagtattgctatctcctcgtcgcaatggcctcacgccccggaactacgaggccgaggccgaggcagcggaaatggaagccattatggccgcacagcaagcctccaacggaacgacgaagcccgatcatgatgaaggagatggcggggagtatcagggcggaccgtttggccgactgcagctgaagccgctgggcagctatgccacggaccagcagctgcccagctactcgtgcggcgtgtgcggtgccaagtttcacatccgatcgctgctgggcgcccaccggcacacccacgacgatgacttcaaggtgcgcttccgtgcacggcgaccgcgggagagcagaaccaccctgaccaccgtccatttgtgcaagtactgcgatcgctccttcgacctggaacgcacgctgcacatccatctgctgagctactgcaagaagataccgccgcagcagcgccgcaagctggccttcacggaactggcgcacgagaagaaggcgccgttgcccaactttcagcgggcgcagcagccggttcaccaccagggaaacagtgccaccaaccagcaggatcagatgacccagcaggaaaaacttcagaagattatcatgcgcgagtcggcagtgcacgagcgctggcgctagtcgtcctcattaccaatcttcaccagaaactggatgcagaaccaacgcttgcttccaaacaccagaagaatccattgaaacgaaaggaaaattgtcaagtgcagggcgtatgcagctcaactgtatttgatttgtttaccaggatcatcaaaatttgtggaattgaaggcaaaattattagaagtatgaattgagcacaatgacacgattagtgggagactcacctgttctgaagaccgaaacacacactggcgttgaatagtcacattccacaaacgacggtcaattaaaactaaattaagagtccccagcacgttgatgcaaatgtattgaatataattaaatatttgaactaaacagaagatttacttgcaatgaattgtcatttcttagatacttggcggaaaggtaaaagaatcataatccattgaggctttaaaagcataataagatactaaaatgggtatatatatttttaaatttatcgaaaaaatcgatgagaaatcgcttcctctctagtccactatctaatatgtaaagaagaatgatatcgatgtattacagaagcgcttcgatacccagctcgagcaatcgatacgatagctgtgcatcgatacattcgctcaatgaagctgactgcacgcacgtccgttgcgtcaccggcgctaccttgccttaccgtttaccgttcaccgttcaccgttccgttccgtgccgagctttggcggtcaagctcaaagtttctgtgcgctatctctttcgcgcttgcggcggcggcggtggcgttggcggtagtgggtcgtgtgcagggaatacaagataggcgatgagcggcaactcgggcggatcgaagccatcagtcgatcgcaacaggtgctggtggtcacaggcgggagctgccggaatcgaacggaatcttgttgggactgtctgtcgtcggtggcctttggagaacatagaagagcacatctgtccgctgttgttcatatataattttttc

SEQ ID NO: 13943 - DNA, 1052 bp, DROSOPHILA
ctacacatacacaaacacacacgcacaccacacacgagatgaacaagccgcaaaagcccatcaaggtgaagcgcgccaagcggaccggatgctccaggattcagccgcaggaattcgtggaggctcaggtggagaacgcgcgcagggcggtggagcgcaagctgatctacctgtccgagtcgaacagagccagtgcatccactcgggcggccaagcgaagcacggctggcgcaggcggaggagcagggcgggaaggatcgagcatggctggccatgcccatggtgagcgtcgcaggcgcagcaagaggagtctgctacacgctccagctcaggaagagaccgacgaggaggagagttcgccgctggagaagacgaacaactacgataacagaagacgcagcagttgcaatctattgctatctcctcgtcgcaatggcctcacgccccggaactacgaggccgaggccgaggcagcggaaatggaagccattatggccgcacagcaagcctccaacggaacgacgaagcccgatcatgatgaaggagatggcggggagtatcagggcggaccgtttggccgactgcagctgaagccgctgggcagctatgccacggaccagcagctgcccagctactcgtgcggcgtgtgcggtgccaagtttcacatccgatcgctgctgggcgcccaccggcacacccacgacgatgacttcaaggtgcgcttccgtgcacggcgaccgcgggagagcagaaccaccctgaccaccgtccatttgtgcaagtactgcgatcgctccttcgacctggaacgcacgctgcacatccatctgctgagctactgcaagaagataccgccgcagcagcgccgcaagctggccttcacggaactggcgcacgagaagaaggcgccgttgcccaactttcagcgggcgcagcagccggttcaccaccagggaaacagtgccaccaaccagcaggatcagatgacccagcaggaaaaacttcagaagattatcatgcgcgagtcggcagtgcacgagcgctggcgctag

SEQ ID NO: 13944 - protein, 337 aa, DROSOPHILA
MNKPQKPIKVKRAKRTGCSRIQPQEFVEAQVENARRAVERKLIYLSESNRASASTRAAKRSTAGAGGGAGREGSSMAGHAHGERRRRSKRSLLHAPAQEETDEEESSPLEKTNNYDNRRRSSCNLLLSPRRNGLTPRNYEAEAEAAEMEAIMAAQQASNGTTKPDHDEGDGGEYQGGPFGRLQLKPLGSYATDQQLPSYSCGVCGAKFHIRSLLGAHRHTHDDDFKVRFRARRPRESRTTLTTVHLCKYCDRSFDLERTLHIHLLSYCKKIPPQQRRKLAFTELAHEKKAPLPNFQRAQQPVHHQGNSATNQQDQMTQQEKLQKIIMRESAVHERWR

SEQ ID NO: 13945 - DNA, 5413 bp, DROSOPHILA
attaaatattttagatataacaaattctgctacttaatgttgaccgtgtacaaataaatcccaatgatcaggccgtagagaccgagcacctcggcgaaaataaggatcaggatcatgccgataaagaggcgtggctgcagggcaatgtgccgcacgcccacttcgccgacttcacccactgcatatccggcagccagtccagcaaatcccaccgaaagtccagcggccaggtgtacatagccggtgggcagcgagtatttgggagcaggcgctagttccccagataggagcacggataccaccagaccgtatatggcaatgatgcccgccatgaccaccggaatgatggacttcatcaccagctcgggacgcatcaccgctgtggcggcgattccagttccggaaacagcagttccgtaggccgctccagcggaggtcagcacactggagaatacgacgcccatcacgccatagaacggggagtacggcggatagcgatccagcacgattggcgatatactggtttccttcagcttgagactttcaatcagccccggcacgtccaccgaatttgatccgttatacactggcagatagtaatccatttccattttggtagcctttttcgtatttacttgaaaaggaacgatccacgttgcttgctttctggattttccaacttgttagtctgactagcctgtagtttggcaagaaagaaaatccaaggggaacgagatgagcagtttatatttaatattaatattatttaagatgttagggctcaattcaataattttagcaacttgttaagtgaaattaaacactaataataaaacttgcttagatttaggcactcgaaattaaattaaatattattaaatgtttaaaaccttcgaaagatgtaacaatcgattgcggtttgaatttgaagctgcgcggtttatcggtcatcatgctggcgacgtgcacgaaacgcttgcatgacgatatgctgccgtccaatcgtgcaagggccgcccaacataaaacatttttcttttatttgttgtacgcacggcgaagacgcttgcaattgcgattttggctctgcagaattgcgattgggcgatgcgctgcattcgctcgagtcgcagctcctggcagtcgcagctaaccagacaacgggtcggaggacggtacgcgattccggcgacccacggaaccgagcagccaaattcaaaaacaagcgagcaccgaaaacaggaagcaagttattcgcatttcgctggcggcgcataaaatggaacgcagtggacgaatgtggacgagagccctgagagaaacacaaaagcacggaacctgagcaacagcacacaccagtgatataatagtagtctacggaacccctgatccacggcacttcgcatctaatctcacccaaggtacggcattgatttttctccccgcaaacgcgcatttttattatagagaaaatgttcacacgctcgtcgcttgtgttccttgtgatttttgttgtttgatttgcacagccttttggcaagatggccgtgcagctgaaacagagctaccaccacctgcccctgacgatcacgccaatcctgcagcagacgcacctcctgccgcaacaggcacccaatccaccccagcagcaaccgcagcagccacagccgccggatctcaccttccactgcatgtgctgtgcggagttcttcgtccatccgctggcgctgtaccagcacatgaacaccctgcacccccatgagccgggcaatggacagcaagagcaggagagcccgggcgacgagagcgaggactacagctggatattcgagccggtgtgcgagctggcggaggatggcagcgactcgtcggatgggagcgcctcctcgggctccgacagctcctcgtcgtcggacgacgacgatgacgatgacgacgacgacagcagcagctccagttcgagttccagcaactcgagctcatcaagcagctcggtgccgaccaccagcaactccaatacccagcagagccaggagtcagtgcagccacttcacggcctggttgccggtccgggctacaatgagttccagctgcagatgacagatccgcgggagtccacctccatattcatggtgcagcccgaccgtaagcgtcacgcccttgcagcagctactaccaccggcacccactgttagcccgggattgggcctgcaatcgacgcccatcaagcggcggcgcggaaggcggagcaacatcggtgcacccgtgatggatccagcgttgaatggcaaccagaaatgcttccagtgcacgcactgcgaggcgagctttcccaacgccggcgatctgtccaagcacgtgcgctcgcacatcaccaacaagccgttccagtgctccatctgccagaagacattcacgcacatcggcagcctgaacacgcacatccgcatccacagcggcgagaagccgtacaagtgcgagctctgcccgaaggccttcacgcagtccagcagcctgatggtgcacatgcgctcgcattcggtgcgcaagccgcatcagtgtgtgcagtgcgacaagggattcatcaactacagctcgctgctgctgcaccagaagacgcacatcgcgcccacggagacgttcatctgtccggagtgcgagcgcgaattcaaggcggaggcgctgctcgacgagcacatgcgcatgcatacgcaggagctggtgtaccagtgcgccatctgccgcgaggccttccgcgccagctcggagctggtacagcacatgaagaaccacatgggcgagaagccattcacctgctcgctgtgcgaccgctcgttcacgcagtcgggtagcctgaacatccacatgcgcatccataccggcgaaaagccgttccagtgcaagctatgcgacaagtgcttcacacaggcctccagtctgagtgttcacatgaagatccatgcgggcgagaagccctacccgtgtcccatatgcggcaagtcgtacagccagcaggcgtacctcaacaagcacatccaggcgcaccagatggcttcggccgcctccgcatccacgtcgcctggcctgctggtcgccaagcagccgcacgaaacactcgtttgcattgtctgcggatcgttgcatgcggatgccactgcactggccagccatgtgcacagccagcacgcagcgctgctggacacgatgaagcagtccggaatgaacacggcgccgggcggagcgattccagacgtcaagtgcagtgcagaggagcagcaagcctatgtggagcgggttcagtgcgtcctgcagcagatgaaccatcagcagcagcatcaacagcaccagcaacaacctccgcaacaacaacagcaacatccgcaacaacaacagcagcagcatctgcaacaacagccgcatcagatgcagctaccgcagcagcccaagttgccagccatggactccaccggcgaggacgaagaagagcccgacgaagcggaggaaccgccggatgaggaggaggaacaagatgaaccagaggagccggcggaggtgaaaacggaagtgctggcagcagaggacgctctcaccaatccgggctatcccattctcgggctgcaggaggaacagatcctgctagactctgacatgtactacgaggacttcggcgacatggacgtgggctgtcaggaggaggtgttcggcgactttgtcgtcaacgaggaggaggtttacaccgatgcgctcatctagatctaggtactaagatttggccatagtttacgaaagtaattcatatttacattgaaaggcacgacagttcttaactacgtttggatcacaaaatgtgctgaccgcactttttttatacacttaattttgtttaatgatgtcgtgtggtattacagagaagacatttgtcggaagtgttccaaaagtacttaactcacagtttatcgttgttaggttaccatgtaggattcccagagcacacaacaaaccttcaaagtttcaactcggtacgcgaaagatcagttacttatctattaaccatggaaccaccaagaaccttttttttttttactaatcataagatcaaaagcgattttgtgagcattcccagtacaacttgtggcacattttgggcaaccgaaagcgaaattccagttttgtatctcatatcacacgaagcccacacgactaaagaagattgtccaggaaatggacgtattgtatttgcatagtatcttacaaagatattacattttgttagtattaagccctactttatgctgctcattttacatcccaagggatatacccttacccaagttggagccacaacgactccaactattccacgtcgcgtatttcccagaatcgcctgaagagattacattaatcgttatatttaagcacgcagacttgtcttttttgggtaaggcttttgatttattcactgttctaacagtggaactctggtaagaggtacaggatcataatggtttttattgtattcatttgtgtggactcttaaatcctagtgaaatttcccgctgcagaagcgcccatcttgtcaggttcattcaaatccagtgtgggatccgtctccaccactccgaacatcccaggcagtagatagccaccggtcagcggatagcccggatccagttgctcgggcggagcgatgagcacatcgtcaccctggtagacgtagggcaatcggatgatccagtaggcgctctgtgagaggcgaggcggtactatgctgcccatggtgaaggtgtaccttcccacgcacaccttgggatccacgatgatgttgaccggcgccttgggcgtcaccacatggatgcgcatcagctgcgccagaaagttgttctgggatcggcagggacagggataatagagcggcatgttgttgtggactaccatgctgcaggtttcgcgttcgatgtctgctccaccgcgcagcacgcgatctggggcgcacatcatgaaccggtgtccgcgggagcactcgtactccatgccgacgaatattttgagcgaaagcctgtcgccctgcttcttccaccgctgctgcttctttccgtgatgctgctgctggtattgctgcttgggcgcgtgaactagacgcaactggacgtcccagggcagcaggaaattggcgccggacaagaagccgctctggaagtgctcctgcagcccggtattgtggctataaatggaactgggacccacgcaggccagggaccaacttgggaagagcggcagcaggccaaagttgctgacagtgtggaccaagcccggcagatactcagttgtggacgtggaaacggcatgggctggaccggcgtcttcgcgagcctccttcttcgctggctcctggagctcaaccacgagttcgtta

SEQ ID NO: 13946 - DNA, 3305 bp, DROSOPHILA
aatcgtgcaagggccgcccaacataaaacatttttcttttatttgttgtacgcacggcgaagacgcttgcaattgcgattttggctctgcagaattgcgattgggcgatgcgctgcattcgctcgagtcgcagctcctggcagtcgcagctaaccagacaacgggtcggaggacggtacgcgattccggcgacccacggaaccgagcagccaaattcaaaaacaagcgagcaccgaaaacaggaagcaagttattcgcatttcgctggcggcgcataaaatggaacgcagtggacgaatgtggacgagagccctgagagaaacacaaaagcacggaacctgagcaacagcacacaccagtgatataatagtagtctacggaacccctgatccacggcacttcgcatctaatctcacccaagccttttggcaagatggccgtgcagctgaaacagagctaccaccacctgcccctgacgatcacgccaatcctgcagcagacgcacctcctgccgcaacaggcacccaatccaccccagcagcaaccgcagcagccacagccgccggatctcaccttccactgcatgtgctgtgcggagttcttcgtccatccgctggcgctgtaccagcacatgaacaccctgcacccccatgagccgggcaatggacagcaagagcaggagagcccgggcgacgagagcgaggactacagctggatattcgagccggtgtgcgagctggcggaggatggcagcgactcgtcggatgggagcgcctcctcgggctccgacagctcctcgtcgtcggacgacgacgatgacgatgacgacgacgacagcagcagctccagttcgagttccagcaactcgagctcatcaagcagctcggtgccgaccaccagcaactccaatacccagcagagccaggagtcagtgcagccacttcacggcctggttgccggtccgggctacaatgagttccagctgcagatgacagatccgcgggagtccacctccatattcatggtgcagcccgaccgtaagcgtcacgcccttgcagcagctactaccaccggcacccactgttagcccgggattgggcctgcaatcgacgcccatcaagcggcggcgcggaaggcggagcaacatcggtgcacccgtgatggatccagcgttgaatggcaaccagaaatgcttccagtgcacgcactgcgaggcgagctttcccaacgccggcgatctgtccaagcacgtgcgctcgcacatcaccaacaagccgttccagtgctccatctgccagaagacattcacgcacatcggcagcctgaacacgcacatccgcatccacagcggcgagaagccgtacaagtgcgagctctgcccgaaggccttcacgcagtccagcagcctgatggtgcacatgcgctcgcattcggtgcgcaagccgcatcagtgtgtgcagtgcgacaagggattcatcaactacagctcgctgctgctgcaccagaagacgcacatcgcgcccacggagacgttcatctgtccggagtgcgagcgcgaattcaaggcggaggcgctgctcgacgagcacatgcgcatgcatacgcaggagctggtgtaccagtgcgccatctgccgcgaggccttccgcgccagctcggagctggtacagcacatgaagaaccacatgggcgagaagccattcacctgctcgctgtgcgaccgctcgttcacgcagtcgggtagcctgaacatccacatgcgcatccataccggcgaaaagccgttccagtgcaagctatgcgacaagtgcttcacacaggcctccagtctgagtgttcacatgaagatccatgcgggcgagaagccctacccgtgtcccatatgcggcaagtcgtacagccagcaggcgtacctcaacaagcacatccaggcgcaccagatggcttcggccgcctccgcatccacgtcgcctggcctgctggtcgccaagcagccgcacgaaacactcgtttgcattgtctgcggatcgttgcatgcggatgccactgcactggccagccatgtgcacagccagcacgcagcgctgctggacacgatgaagcagtccggaatgaacacggcgccgggcggagcgattccagacgtcaagtgcagtgcagaggagcagcaagcctatgtggagcgggttcagtgcgtcctgcagcagatgaaccatcagcagcagcatcaacagcaccagcaacaacctccgcaacaacaacagcaacatccgcaacaacaacagcagcagcatctgcaacaacagccgcatcagatgcagctaccgcagcagcccaagttgccagccatggactccaccggcgaggacgaagaagagcccgacgaagcggaggaaccgccggatgaggaggaggaacaagatgaaccagaggagccggcggaggtgaaaacggaagtgctggcagcagaggacgctctcaccaatccgggctatcccattctcgggctgcaggaggaacagatcctgctagactctgacatgtactacgaggacttcggcgacatggacgtgggctgtcaggaggaggtgttcggcgactttgtcgtcaacgaggaggaggtttacaccgatgcgctcatctagatctaggtactaagatttggccatagtttacgaaagtaattcatatttacattgaaaggcacgacagttcttaactacgtttggatcacaaaatgtgctgaccgcactttttttatacacttaattttgtttaatgatgtcgtgtggtattacagagaagacatttgtcggaagtgttccaaaagtacttaactcacagtttatcgttgttaggttaccatgtaggattcccagagcacacaacaaaccttcaaagtttcaactcggtacgcgaaagatcagttacttatctattaaccatggaaccaccaagaaccttttttttttttactaatcataagatcaaaagcgattttgtgagcattcccagtacaacttgtggcacattttgggcaaccgaaagcgaaattccagttttgtatctcatatcacacgaagcccacacgactaaagaagattgtccaggaaatggacgtattgtatttgcatagtatcttacaaagatattacattttgttagtattaagccctactttatgctgctcattttacatcccaagggatatacccttacccaagttggagccacaacgactccaactattccacgtcgcgtatttcccagaatcgcctgaagagattacattaatcgttatattt

SEQ ID NO: 13947 - protein, 167 aa, DROSOPHILA
MCCAEFFVHPLALYQHMNTLHPHEPGNGQQEQESPGDESEDYSWIFEPVCELAEDGSDSSDGSASSGSDSSSSSDDDDDDDDDDSSSSSSSSSNSSSSSSSVPTTSNSNTQQSQESVQPLHGLVAGPGYNEFQLQMTDPRESTSIFMVQPDRKRHALAAATTTGTHC

SEQ ID NO: 13948 - DNA, 2781 bp, DROSOPHILA
tgggctcggagttgcagatcttatggtcacggagtggggattggggtaaatgggtcgcatttgaaagtgattgtctggcggagacattaagcggtaaattgcaatcacttgtaatgattaatataatagctcttacaaatttgacaatgctaagatgtgttttaatcattacatgtgccgccacatgatgttttccattttcctagtgtctactaatttcttttgcattttagttttaggatgatgaaataccaaattaattgtcatgtaacttttttttttttttgacaaaacccatcaaatcctgtttgggccatcaattttaagtggctaataggatgacacaccaactgagcaccttaaccccatctcgttggcttgccgccgcattaagcctgatggattatggtcactttggtaacggatattcgccagcttccgcatgcaaaggccataaacaatcgccggtggctaagtggccaaacggaccggaccaggagcgaacccgggccaatgaacatgcacaatgcgatgcacacacatatggccatggccaaatccacactgttgccacactgagcgtggttaatgaaccccaagtcacagttgccctcccccgatccatcccccaatgccattgcatgcttcaattgtaattatgttgttgttgttttcactgatgttgcagttgctgttgcagtgaagcgaaaaggaaagtgcgcgaaagtcccactcgaatgtgagttcgaacaccagctgggtgcaccgcaaaaagaggatcgatttcaatttgatataaagtatcaaaacggctttgagttaaataattaagcttgtttcttttttgcaaattgatttaaactggttacttttagctgatcactgggtttcatagatatctgttgatctatttgtttcacatatctttttcattaatacttcttcatatccgcacctcattatttgtttgaaaaatggacatattgttttacgtgtactgttaacttacgtcatcgtattcctcctcctcgttttgctgctgcagcgacaacttgtgctgtcctttgccgaggatcgaagtggaaggagcctggtaggaggactgctgaatcctgcgtggtggctgaggagcagcctgggcaggtggacggtaggcggcctgctgaggctgatattgctgtgaaaaggttgtagatccaacaatatagacatctagattatttgtacagtaagtaagcaaacccacctgataatccctgaccgatggagccacgtatccctgttgctgctgtgcccggatctgctccgccaccgtatccttgatcctgatctgctggccagagttcacgtactgctgcgtctgctccgagttctgctcgaaaatgggcgtgccatcgtggggctgagcctgctgttgctgctgctgttgctgcagctgctggtagtactgcctcaagtaggcgggatccacgccctgttgtccactgaccaccacgccgcagatggccaaagtggccgtcaccaaaaggagttgcatgttgctaagggtttactggatactagatcacacttggacgacggaacgcgggcacttgtattcaaattcaaacgctaactgaaacctcgacggagccacaattgtatctgcgctggctgcgaatccaaattgcacttttatatcggcaaacgacaaacgacgagcggcaagccaaacgacggctctctcacgctcttattggccataatgcgactctcttggctgatttacaacagctgtttttttgggtggccaaaagaccccaactcggttgtcacttccgttcgaatcacagttcctctaccctcgacctgggccattgttaaaggttttttccctactttttttttgtaaccctacgtgatctcggccaacagctgttaacttggccaaaaaaaaaaaaaagaggaagctgactagcattggaaaactttcccgaatttatcattgcaacagctatgcactcacacactttcgagggcatgcagtgcccacgagcaaatgtaaattgcatttgcagtttactccttcgacatgcatgtctatataatatagctatatctatattccacgcaattctcttgatggcttcccattagataatcatgcccaattaatcgcttggctcttggagaagaagaggtcaatgcgatcggaggagggccacacccgagtcaaaaatcgaacccagcaagtgcattgttgctgacccaaattcgactaaacgtttttctatgtatccatctatctgtgaatagctagctatctatatatgtatctgcctatctgtatctgaatcagacgttgcgtttgcgttgcggttgaatgggttcaagcgatcttcgatgtcgccgattgccaaatcttctctttttttttctgcactcccaagccctttgcatatacgatctttgcgatcatgtgatggtggcattaagccccataagtcctcctacaacatttgatacgtgattacaattgccacagagcactcttttgcgtatggttcatgagatacgccctgaatttgcatcgattcgcagtcgacaaggtcgtttcgggggagtcgaaaacggggcattaaatgtggggctgaccgtttaatgggatcgcgctgacattgtaacagctttgaaataaagcaaaatagtacacaatcgaaagaaaaaccaaccacatttgtggcttacttagccgtgaagtgaaagtacattatgtgttgcagacgattgttatgcacatta

SEQ ID NO: 13949 - DNA, 781 bp, DROSOPHILA
aaaaacagctgttgtaaatcagccaagagagtcgcattatggccaataagagcgtgagagagccgtcgtttggcttgccgctcgtcgtttgtcgtttgccgatataaaagtgcaatttggattcgcagccagcgcagatacaattgtggctccgtcgaggtttcagttagcgtttgaatttgaatacaagtgcccgcgttccgtcgtccaagtgtgatctagtatccagtaaacccttagcaacatgcaactccttttggtgacggccactttggccatctgcggcgtggtggtcagtggacaacagggcgtggatcccgcctacttgaggcagtactaccagcagctgcagcaacagcagcagcaacagcaggctcagccccacgatggcacgcccattttcgagcagaactcggagcagacgcagcagtacgtgaactctggccagcagatcaggatcaaggatacggtggcggagcagatccgggcacagcagcaacagggatacgtggctccatcggtcagggattatcaggtgggtttgcttacttactgtacaaataatctagatgtctatattgttggatctacaaccttttcacagcaatatcagcctcagcaggccgcctaccgtccacctgcccaggctgctcctcagccaccacgcaggattcagcagtcctcctaccaggctccttccacttcgatcctcggcaaaggacagcacaagttgtcgctgcagcagcaaaacgaggaggaggaatacgatgacgtaagttaa

SEQ ID NO: 13950 - protein, 178 aa, DROSOPHILA
MQLLLVTATLAICGVVVSGQQGVDPAYLRQYYQQLQQQQQQQQAQPHDGTPIFEQNSEQTQQYVNSGQQIRIKDTVAEQIRAQQQQGYVAPSVRDYQVGLLTYCTNNLDVYIVGSTTFSQQYQPQQAAYRPPAQAAPQPPRRIQQSSYQAPSTSILGKGQHKLSLQQQNEEEEYDDVS

SEQ ID NO: 13951 - DNA, 6226 bp, DROSOPHILA
tgcgggtgcgggtggggtcccatggcccattcattatacgcaccggcagaggagtgtcataaatattcccatcatcgtttattcggcgtcccatcaaatggccacaaatgaaaacctgttgatgtgcccgcatagaaagcgatacgctgcaacgcacacacacacacacacacacaacacaacaccacacagcgcaacacacactcccacttgacatctttgggacgtcagttgtaattgaagaagctctttttatccttcgttttttagcaacaaaacgaaggaggcgctgtgtcgccataaatattcatgaagcactaaaagggttctcctccggatcctaagcatcctgctgtggagtcgcattcaggatggagctgtgggcataggtacatcggtggttggtaagtggcgagaatcgtatttgtgtttggtcaattgccacccggtgacaaagaaatgcaatatgcaatatgctgtcgtcagtcgttccatttgctccattgtaagtgtgcggagtgtttaattttaaatgccccaaggagtgcgtgtacctgaatttgaatgagtacaaggctcggtttccccaggggatcgacaatggtctccgccattgtcggatggtgggagtcagagcaaacaatcgcgcatgtgtgccctaaacttggggtttctcctcactcacccacacacacacacgcacacacacattacgctcgcttacacttacacttatactaacacgtaccccgctaagtaggcaacacacttttcggccacttccgttgcacaaacgacagtcgacaagcggatatccatatccccctgccattgtgtgcgtgcgcagccggcattcctgtccacacacacacacacacacacacacctaaacgaagcacccttcgtggacacatggatggccgttcgggcgtcgattcgcttccgttttgatttataagcgaccgccgcgccgggctgcgtatcattagcagttgatcaacaggtttgcgcacagccaacagccaggacaggacatccagttgccacgctcctcgaaatctgtttcacaccggtcaagtgagagcgctataattgaattgcactcgtgcccgtaaattcacttaaaaacgctatttcatgtcgaaaaaaattctataaaagagtgcgcagcaaacccgaaataaaattgtaaaacgctggccacagtttccgctggcctcaataataattcgtacgctaaaatcgcgaggagatatatagtcaggtaagtggttcgttcgatattcaatatgctcgtaactcgatttgaggctttgaagccccaggaaatgaactgcaaagtgaattctagtggttcattttctagtttaattttaatttttttttcgggaatttattaaatatttttcaattgcagttctaaacattttccttttaaattaatttcgaataagcagacaaagccagccttttcaaagataaagatcatttttaaataacaaattagtatctgaagaatgaatacttcgaggaatgtgttacaaatatttatttatgaaattaacttacctttttttatgtgcttaaaaaatttaaaataaaaataagtgaacttgaaaattgcgattgatatattaatccatctcattaataaaacattgggttttgtgaatggcgtgagcccactttaatttttgttaattaatgaaaaatgtataaaggtcacttattttttcgaaaagttttcattttgtgaacattttaatgtgtgcccttttgactattcattaaaacccaatgacgcgattatttttaatatttgcatcacatttcgttcgttcacaaattcaaatgtaaaaaggttacaaaattttaaaaatagtctgcttcctctgaaaagtagaagattcatcaacgtaaatttatttgcgaaacttggccaaattatgcagaactcccttgccaaacaaacccattggaaattgaagtgacaaaatacgggtgtcccacggctaacctgcttgagacgagcagcatatttactcttttgcggatattttgtttatttacgacttttcgttaatgtccatgtccccgggaatacttcgattcacactcagcggcaacaggcgacgagttcttgagcagagtgtcgtgggtgttgtgggcaggaaacctatttaaacaaaatacttattggtgaatgccatcctttggcaaatatttgcgccagctatttatcgagacatgcgaaaaataggcgagctgccgaattcgatttgcatggagctgtttaattttggcgcgaaaatttgcttgccacttgccacacttgagggagtcgccaatagggacgaaggatatctcttccgtcctgacaccacatgaattatttggcaacaggctggcaaattaataatggagcaacgcaagtcaactaccaaattcgaaggaatgtcagccacaagggccataaatattttcagttaatttcaattacaagttcacccggcacgtttgcctgccccttgacccccaaaccccatccaatcctatcctcgctgcggggtggttggggtgtggtcataaaattcgatgcgtgctctatcatcgcggtggctatatattataatttggcgcaaagccgctaaaactttcatctgggcggcgtcaatcaatcaacgacaagagcacaaattaagtccgggcgaagccggaaaaaaagcggccaactccgcactcggacaatcagtcaggagtccttggtctttggccaggagctaggggatacatccgtatgcggagtatagtcgcatccagcaaccggttggcccaccgccgacgcttctcaattagtccgccaatctaagcgggcggccagctacatcatttaatcaggcgaccttccagataagataccatgtccacgttctttctgccccccagtggctccgattttagtgggctttgtatagttgattcccggccgatgactttccatgttggcgccaaccagctgctgccgattcgcaatgaccataaaatcggacggggattacggcaaatttgctaattccaatagaaacggggcagttaagggattagatttgtccattagggatggttgtaggcaagttttggggtacttcaatatacacgtattttgatagctcatcacgaatatgtgctagcatttcgtatagccacgttgaaaatcattaaaaaaggaataataggaaagcaattatcagctttatttatagatcgatattcactattaaagttttacaaggacttttaacctaatagtatttatttgaggctcatgaggcatgaacactacaataaaactaaccgaccacttatagtaagggatttaataatatcaaattcattatgcatgtggactgcgaaaatacgcaataacgaaagcataatacgccaacgtttccgccttcttggagagtccttataacaggatgtggctttgttgacagctaatgctagaatgtatgcaaatcaatatggtggcggtgctcatgcgaacgcatagggaaaactactttggcaggaagtgcaaacaaacgagcgctgctctttccacccacatccaccacccacagccactgaattttccgtgaattttcctccggcttttgtctagtctgtcgattggccgcaagtgcaatcgcaaggcacttaagccagtgcgtaaacagcaccataatcttgactgcggggcagcgtatcaacgttttaaggcatcattatcgactgcgattctcccttctccggttgccaatcatctctgcacattggctttctgccccatgaaaccccccccccccccattgtttggcctactggcattccgaagtcagcccaatgaaatgcctacaactcagtagccccgctggttgctacctctgaaaggacattaatagaccataaattgtaactgttatgcgctgctgccttttaacgcagcggtcggcagacggcatgagctcagttatcctgccgaaggtgggtaccacccaattccgcccacccggtggcccccaccgctttcaattagagaggttatttagctaaatcgctacgcttgttcccgctcgcttgttgttcttgcgcgtgttccagtaattccgaggcgcgggcggaaatgattgccacaggactctccaggacttccccggtcccccagggagcagtcgagtggcgtcggcagcgacttaattgagcattccgcgagtgcggttgtgctggctcatcaggatcggcctttcgtcaggcatttattcattcatatttacacctttgcactgagaggaatttcgatcgaatttaattttgaattaaagctaagttccttttatgttttaatggtataataatttacctatttgtatcttaaatttcatatagtttttgttttgagtttcaaaattggtttcaagcaatattttaaaaggtcttcatgaaaggtcctttttcagaagcttacacttcattattaaactattaaacgtttatctttataatgttaattatatttttttatatttttaatttaacatttccacagctatggctcacactaagacgcggagaacttacggctttctgatggtgctcctcatcctgggcagcgcttgcggtaatttggtggccagtggtagtgctggcagtccaccctctaatgaaccaggaggcggaggcctgtccgaacaggtggtactggaccaacttagcgagagcgacctgtacggcaacaataagcgcgcctggcagtcgctgcagagctcgtggggcaagcggtcctccagcggagacgtcagcgatccggacatctacatgaccggccactttgttccgctggtaatcacggatggcacgaacaccatcgattgggacaccttcgagcggctggccagtggacaatccgcacagcagcagcagcaacagccgctccagcagcaatcgcaatctggcgaggatttcgatgatctcgcaggcgagccggatgtggaaaagcgggcctggaagagcatgaacgtcgcttggggaaagaggaggcaggcgcagggctggaacaagttcaggggcgcctggggtaagcgcgaacccacatggaacaacctgaagggcatgtggggcaaacgcgaccagtggcagaagctccacggcggctggggcaagcgctcccagttgcccagcaactaatctcgcagagaatcgccgtagcacaggaaaacttaaccagactaactaatccacctgtatctaaccgtatatagcatgtgtgtttcctccgcgatgggtttccgttcttagtgtccatgtcgcactaggttgtccggagtttctcccggtcccgtgccactgaaagtcaattccgaaaatgtatgaaagcgctcgccagtcaccggatcctgatgaccggcgatccgtatcgccgcctcgatcatccagtattatacgcattacatacatatatgtcggtatgtctagtcaactatgtatctactctagcacctagtctccacgtatacaagaggaactttcggaagaatatcgctttaatttagaaacgttaactaagttaatgaattgtgcatatatctttatacttaaatatacatcaatacataccaaatggcaactattaatacgaaatacaaatacgttgaaagtattcgaaatgagtatcgattttatggcttgtttgggttggataattgaaattaaaatcattttataaaatcagtctgatttgcatgcttaatctcaggcggatggacaaactgaaggacaatgccataccctttcattctaagggcataaaactagttactatatgaacgtgtgtttcaatttcatggacttataaaatcaaaagcagcaagcgtggattttatatctactgagttttaattcaagcttgcagcaatttcaaagaacgccagttaaaatgaatctctcaagtattagccggaaggacttgacgtgtttcggagtgaccacatgtgtcgttatggtgtgcttcgttctggtctcaatcttctcgggattcatgcacgagccccagagattcaagacgatgttggtaaccatcgtcctggtcttctttttccaatatcttatcctggagcccattcgtttcttcattcagagcatcgattatgccacctggccgcaggaggatccgccctatagagcggag

SEQ ID NO: 13952 - DNA, 902 bp, DROSOPHILA
caggtttgcgcacagccaacagccaggacaggacatccagttgccacgctcctcgaaatctgtttcacaccggtcaagtgagagcgctataattgaattgcactcgtgcccgtaaattcacttaaaaacgctatttcatgtcgaaaaaaattctataaaagagtgcgcagcaaacccgaaataaaattgtaaaacgctggccacagtttccgctggcctcaataataattcgtacgctaaaatcgcgaggagatatatagtcagctatggctcacactaagacgcggagaacttacggctttctgatggtgctcctcatcctgggcagcgcttgcggtaatttggtggccagtggtagtgctggcagtccaccctctaatgaaccaggaggcggaggcctgtccgaacaggtggtactggaccaacttagcgagagcgacctgtacggcaacaataagcgcgcctggcagtcgctgcagagctcgtggggcaagcggtcctccagcggagacgtcagcgatccggacatctacatgaccggccactttgttccgctggtaatcacggatggcacgaacaccatcgattgggacaccttcgagcggctggccagtggacaatccgcacagcagcagcagcaacagccgctccagcagcaatcgcaatctggcgaggatttcgatgatctcgcaggcgagccggatgtggaaaagcgggcctggaagagcatgaacgtcgcttggggaaagaggaggcaggcgcagggctggaacaagttcaggggcgcctggggtaagcgcgaacccacatggaacaacctgaagggcatgtggggcaaacgcgaccagtggcagaagctccacggcggctggggcaagcgctcccagttgcccagcaactaa

SEQ ID NO: 13953 - protein, 211 aa, DROSOPHILA
MAHTKTRRTYGFLMVLLILGSACGNLVASGSAGSPPSNEPGGGGLSEQVVLDQLSESDLYGNNKRAWQSLQSSWGKRSSSGDVSDPDIYMTGHFVPLVITDGTNTIDWDTFERLASGQSAQQQQQQPLQQQSQSGEDFDDLAGEPDVEKRAWKSMNVAWGKRRQAQGWNKFRGAWGKREPTWNNLKGMWGKRDQWQKLHGGWGKRSQLPSN

SEQ ID NO: 13954 - DNA, 3074 bp, DROSOPHILA
taaggaattgaacatagaatgtaattaaaagtacgaactaggctaagaaacgaagaaaacttctatgaggctgtttgataagaactgacaccgcagcccccacatcatcagatggaaaaacgcacaagaaagcgaaaataaatgaacactgcaacaacagcaagccttataaatagtataaaatcgtgtcgaatctaggccttaacgctaaacttgtaagctttggatggaaataatgagcttggttggcaatcaacgtaaatcagcattttaataattttatgtttaatttctaagctgttgtccgtcccactaaagaagttgcataaatacaatgtacaatggcaattttatttttaaaacgtgtaaaatgcaattttcatcgtaattaatatatttttatacgtatatgtacgcctaatgtctaaatcttaacataagaaagtcttaaaaatggaaaatcccgataaaagctatatataaaatatttttaaatcttacaaaaaaaaacgtaatgtaatgatttctcatattgtgatagattttattgaaattttagaaagatgaaatgatatgccttttggttgaaaaacaatgatatatatgacgaacgagtctgattgcatgcatgataatattgcgtaggaatgggtcttccactcggaggatcaagaaccagagaaaacccttcatggtgtttagtttttattactgtgtatgtccttgtaatgtgtatattgttgtatacatccgataagcaattcgtaaatctaataaagtcgtcatttttttcataactcaatgtggtcttttaataggttcggatctatgaaacattgaatttttacagcaaatatggtttggttatatttattgaaatcaatcatttttccaataaaggctaatttcaaaatttgaatagtttacgataaagcctttcgcgccgaaaaatgatcgataacttctgatatggctctacaatacatcagcctcgtgattttctgaataagattcaacggtcacaccaggcactacacttttggcgtgttgcacatttcagtgtttaattaaagtaaaaagcccaggtcgcggttatataacaaaatgaacagcctaaggacagcaaccatgcgatttgccgctctggccagctccagtgccggatctctcggcaagcgcgatttcacccgcagcctgtggcacatgaccaaaaagccggtgacagccggaggatccgatcatgtaaccgtgttgaatctccacaagcccagcattaattgcacgtgcggctgcaacgtgcacaccaaatgtaagttaactcaacaaattcttacatgggcggtccatgccgccggttacataacctcaaacgttgggtgacgaaatgttgaccaaaacacagaaaattaaacgctttgtttatatccaggtgagcgggaactggtggagttcctcaccgaggagatagtggccgagcgcaaggttcaaaagggcaagacggtgccaagcaccctggatggattcgccgtaaaactgaccggcgccgatgtggagctcaccaagcagacggataaggaaaaggtggtggtcagcttcaatgtgaaccatacggtggacagcgaggaggagcccgaaatcaaccccaatgctgacaagccggatctcggtgaaatgagaagcaagccccagttcgaggtggacatcataaagggcaactctacgctgtcctttacctgcagcttccttcaaggcgaagctcaggagggcgagtacagtgagtactttgacagaaatcgttttgattcaccgataacacaggttttacctttcagacgatgtcttctccattgatgaaatggccatcttcgagggcgagtggaacgataaggtctacgccgtcgcaggcgacgtgcttgacggttacttgtacgacttgctgatcaacttgctggaggagaagggcatcagtcaggagtttgccgaaaaactgtcggacctagccactgcccatgagcacacttcctacattggtctgctggaaaagctctccaaattcactgccggtggcaagtgaatgttcgtcccacttaatcttaaagcataaagttgtgtaggtttttaagtttctattgtctgctgtcgcagtttcatcacctaaaacagtttttattagttgtgtttttggtttaactgtgacagtgaaacttagtttttaagccataaaacattcatacatgtttcagataaaactatagaaacggttgccaataattcacccttttcggcatcagcttcgctttggtttttaacaaatacaacgttaattccctagtttttttttttgtttattttctttctatggttgcatcgatttttcgtaaagattttcctgtgggttgagtttcgtgatcatttagaactgccggaaatatggcctgggatcgtagtcacttggtcggtatcctccccagtcctcgtggttcttgcaggcggcgcagatgaggagagcgaggagcacgaggattggcagcagttgcatcttgattaacggcaagttaactttagattgtggtgctgcagcttttaatgctcctctttataggtgagattgcctcaccttatcgttgaaatagtgacctttctcttggggaagtactccgatctgtttattgggcgatgggatttaccattaatgtacgacctatatgtgttattgtttcacaataagcaggattatcagcgtggaggccatgtaatgtcatactttgtcattaagatggattttatatatttcgttaaaaagcttttttttatacgaccaataataagaactgcgaccattacctaatcataggcttgtatatacttctaagaaactcaaagacggattctgtctgaatataacattttttatagttcgctacttgaacttatttataaaacattcactaaataatttacataaggatacgagtcatggaactaaaccaaagctgcttctggtacttggtagacctaggctgttcctccactctggtgtcggcgctgattaccggtgaggtcattgtgtcccg

SEQ ID NO: 13955 - DNA, 896 bp, DROSOPHILA
tctgaataagattcaacggtcacaccaggcactacacttttggcgtgttgcacatttcagtgtttaattaaagtaaaaagcccaggtcgcggttatataacaaaatgaacagcctaaggacagcaaccatgcgatttgccgctctggccagctccagtgccggatctctcggcaagcgcgatttcacccgcagcctgtggcacatgaccaaaaagccggtgacagccggaggatccgatcatgtaaccgtgttgaatctccacaagcccagcattaattgcacgtgcggctgcaacgtgcacaccaaatgtgagcgggaactggtggagttcctcaccgaggagatagtggccgagcgcaaggttcaaaagggcaagacggtgccaagcaccctggatggattcgccgtaaaactgaccggcgccgatgtggagctcaccaagcagacggataaggaaaaggtggtggtcagcttcaatgtgaaccatacggtggacagcgaggaggagcccgaaatcaaccccaatgctgacaagccggatctcggtgaaatgagaagcaagccccagttcgaggtggacatcataaagggcaactctacgctgtcctttacctgcagcttccttcaaggcgaagctcaggagggcgagtacaacgatgtcttctccattgatgaaatggccatcttcgagggcgagtggaacgataaggtctacgccgtcgcaggcgacgtgcttgacggttacttgtacgacttgctgatcaacttgctggaggagaagggcatcagtcaggagtttgccgaaaaactgtcggacctagccactgcccatgagcacacttcctacattggtctgctggaaaagctctccaaattcactgccggtggcaagtga

SEQ ID NO: 13956 - protein, 263 aa, DROSOPHILA
MNSLRTATMRFAALASSSAGSLGKRDFTRSLWHMTKKPVTAGGSDHVTVLNLHKPSINCTCGCNVHTKCERELVEFLTEEIVAERKVQKGKTVPSTLDGFAVKLTGADVELTKQTDKEKVVVSFNVNHTVDSEEEPEINPNADKPDLGEMRSKPQFEVDIIKGNSTLSFTCSFLQGEAQEGEYNDVFSIDEMAIFEGEWNDKVYAVAGDVLDGYLYDLLINLLEEKGISQEFAEKLSDLATAHEHTSYIGLLEKLSKFTAGGK

SEQ ID NO: 13957 - DNA, 6228 bp, DROSOPHILA
ggcccacgtcctgtatggcttcagttgctctttttcagtgctgttttatttttgttttttgtgtttttttttttttgcaccaggccttgcataattacaggcggcggctgcaacccaagttaataaacaattttcgcttcgtggggcgaaggaggtgcctccttggccgcgcattattcattaattactttttaattgcacgggcaatagctcaacttcgagcacaatattttttcgctttttctcgctcggtcctcggtgcgtatacttgatatattgtttggtatacttgtattttgggtgtttctttctaaggtttccccttgcgtcataggcgtatctactttgcatgtccctcggctcggcaggggggtattttactgagggtctgggccaactaaattaaattacccgccttttagagcgattgtcatgatgagtcacggccaaaagtgtgcaaattgagcctccgctgccttttttttagattttttttttcggaatgacgaaggctctgctaaaggtcgtgttgctacctgaatttttaaagatgtattaagaggggagaatgtggagctaactgttcaaatcgctgagatgaaacttaataaatttataggaaaaatatagaaaatcatcatcaccttttgactttttatatcagcaataccttgggacaattgtaagttcaatctttttatgttggctcttattaccatctgcaaagtcatgatgaaaagaccctttgagtatcctttccaatttccttttctatcataaaacccccacgtttcaactattcatacttagggatatttatttaaacggcttacaaatgccctgattacgtgctagaaatacttaaaaataagatcacaagaactctgttgcccaccaatgcaacatagcagcccacataaatctcatccgatgccgaaggatgctcttgggtgtgggaaattacccttgcccgtatccttcgagaatcgtgcaaattctatcacgtcagtgagaacctgtcaatgttgttgctcagcgcgttgttgtcctcgtcctcgttgtcctgctccttttggccattggcccaccgactgacagatggctgtctggtggcattaggtggcaatttgtaggcaataggcagccgaggagccagcgagacaattgccctcgcccggctgttcctcccaaacggcttggcatcgttcgtatccagatagaatttgccacgaatcctgtaaccagcattatcagttggatttgcagagattgagcggtttccaactactcacctgggatccgcccccatgcccatgaaggcggggccacctcctggttcacggcaaatgccgaacatatcggagggctcgcaacgctgggcgggaaatcctcgaggctgggctatgctctccacgaagtattcccaggcacgctggtgactgcagccaactgcaaaggaaattggagcaattagctgtaaggttttaaaatttaaaaatgtttaataggaaagttcttgaagttaaaaacaaataacttctctttgccaaacagacaataataaaatactaaaattaacatttatcaatttcatctaaatctctatctttatgtgtgaccaatgctcaccaatgattcccagccagttattggcaatattctgtttggcacaacccggctgcaggggtcgtccgccattcggatagaagtctgcatgacccatgggcgctggattgcccagaaggccaccgtcggtgtggatgacatccacgaacctagcgtcactgggactcaagcggcggttggagctgttgccctcgaaaagcggtagagctggatcgagggccgttatcctgggcagcttgatgccccactcctgcagctgcttgcccgcaaaaccggccacctcggcgcccagactgaagccaatcaagtggatgtacttcgctgggtaacccttgtccaccaggaatcgcaggaacctggccaaatagcgacccgacaccggcagattctcgacggcattcgagtaccagggcaccgctgtcatcgcgctccagtcgatgaggatgacattgtagttgcccctcctgagaaacgctgccgggggaaatcggacagggatggaagatggacagggtatatattgttgatttttttggtcgaggtggcaggaagtccccactcaccgtcctttagctcctggctgctctgccgttcgccggtggccgattccgagaagccgtgcagatagatggccagcgggtaattgaaattgaaattgctctgcgccagccgggcatcgtcgctcaggtggagcagttgtgcggaattgcggttccgactgcaaaaggtggacccatttttgatggcccctcaatatgcatgagctgggatgaaatgaagatgggtcgccgcttgcttacctggtgtacagcatgaactttatgtcctcgcgctctttaatggcacagcaagtggagcaggatccacgcggagcggcgctgtagaaaatcggtgaaccagctgggatatacaaaaaaaatacaatccaaataggaaattataaaagaaataagaagttattttgtcaaaagacttactgaaaggaaaccaattaacaaaatgtttgtaagcaaattgttctgcaacttcttacaacgtagccacaaaatgaaggcggaaatcgaatttgtcaagtggtaagcgcaagccaatttgttgagagcttggaatacaaaactaattgattcattagcttcattaacccacgcgtccaacaaccaggtagccgcagccataacataacaatccaaaaaaaagtaataacaaagatgaaaaccaaaagtcaaacaaaaacagtagcaaagaaatcgaaactggcctaacgaagaccaacttggccatgaacttggcgggagtaaatgaaatcgagtggaatggcatgtattgtggggccaacaaaaacacaagtggcagtagccactaggcagcacgtgacgcatacgccgcgtgttacgtagcagcggtggcaaaatgaaaacaagttttcatttccatcaggttttcgatgttcacacggccaagtgcttaatcagatcgattcgcgagtgggtggtgtctttaagaggcaacaccaccgtcagtgggtcaaccacattgggatgtcaatgacggctttttcgtactctctgttttgctacacatttttatcgtcagctgcgaatgcatacggataatacacttgattagatgccaactaacaatgacgttgaccttactcactgccggactcatttgcgattccgtccacttatcaccttccgttttgctcaataaaaaaccatatcaactttggaatggtcttctccccctgagtttctaattgttgaacaagtgctgataattaattcctaaatttaataaattatgctgtaagccaaacttgtatattatcatcgaagcgtgggtgtttaaataataataataaatggggtatgattattctgatggctatataataatgtctaagtgtataaatataatagacatcagaaaacattaatgcccgcagttaataagcaatttcaagttagagtgtctccaattcgcgtttctggtgctcttcgtggctttaatcgtactccaaatattatgaatgtagcttaaatatcttttatttatgtaaatgtggggtctgcattcatatatatatatttttttttgtacagagcggaagagtttgtcgcgcttatttatgaggaatgttttatagttgttgctgatatagccacttaataataattttcgtcttctttgttttgcttggattggctttgtttccacgttatttcacgacgtcatgccgtgcatttaatttgtatttctttttttttaattatcgcactgctggctttaatttaaatgtacgtgtggctggcacttaattagcagctttaagccatgatgatcgttatggttgcactaagaactttacgggtaccggctttatgattctagcgaagtgatttccagactgacattgaaaattgtgtggttcacgttattgagaatagcgttaagaactatttaagactataatgatctatataaaagcgaacataaagaggaagactgcacaagtctgttatgcgatatattgatgatttgtttggatagtaactatctctttagttcccaaccctttgttttttttttttttttgacaaccttctttcacagcccactggccatccaagctgacctaccccaagtcaaatattgccgatggtcaacaattgaatcttttgagtgcgcgtatcaacaaagacgttagcttgtttggcttacaagccgttccgccttgaacttatgtgcatagttacgccccaaccgcccacttgggacacgattttccagctgacattgaggcagaatcaatgctaatagatgccactttccgtttcagcctaagtttccactccacggcgatgtctcagcttacccagcagaaatgtaaatacattgcataatgtcgaggcagccgttagcaccatggcaaatacaataaattagtttaaatattgtttcaagttctgcgacggtttgcgttcaatgaaccgccgaatttgggcgtgcaattccaattcactttcgtacgcgaaaattaacattcaaatcggtttccgcatttgtttatgtatttctttgcctaatttagctaaaacatatcacgactacgatcgataaaaaaaacgctctgttctcaacgagctgccaatactgactgaacgatcggaactcccgatctgacgagctagactctctgtctcagtcgacggcgctgctgacgtctctgcttccttcgccggcaatctgataaacagaatttgcgcggccctaaaacgaaagactcagacagcaaactttagcgcgattgtaagccataatacgttccgtatttaaatgagttaatcaggcatgcaaaagccggccgagatcgtaaaacagttttcggtttcctgatcgtcgtgcgtccaacacccacccaccgccacccatttcatgccgggcattcgcaatgagtaggccacccaagtgatctttgccgggaaaaaggcaatccaaaagttcagccggatccatctgacaggcagctcaccttgaccagatgagactttccgtttcaattcacatatcacctctcgatcgcatccaacctccgacatccgacagccacaaaaggggcagatatatcttgaattaagataaatcgcttaagtcgttggtataagcaatcatgaatatgccgttacattattgggacttaagttccaactaatatgaaattcattttttctctagtgggagaacttatttttaactaatagttttaattaatttaaatgatcccaataaacagttattaaaattaacgaaggacagccactccttttagttgtactcaattttatctgacccattctttgtgaatcgaaaccctgttgtttgtgcagatcaattagtatggcgctgatttattcattaatcactccaaatatatgcaaggttttaaataaaattaaagatcttgattatcttagcatagtcgaatgctctgactatgcttcgattacttcgattacataatttgtgggcgtgcgatttcgcggcttttttcgccaacgtctcagctatcgatacgaatacgtcgaattcagtggcgacttaaagggtatatcataacaaacatacaaaatttaaatacaattatgcattcaatgctaataaaaaataaagaaaaaatatgtttctacgcgatgttttaaaatactattccattacgtacagcgtgaatatttaacttaaatccgaaaggtacaaagccattgaaatctttgtcatgacagcttgtcatggtagccaaaacgatgaccagtcaaccgtaaatccctcagctgttgatacagatggcaggagataattgcataaagattctttggacatttgtggttgccaatcgaacacttgattgatttgccattgcttgtaaagccacggaattccaattaaacgtatatctagctagcatatatgcaattaaaccgcagataccttcgatggcgaacaacttgcacggctttcgatgtgacattgaaaagccatcaagtgcaagggctcagagccgcacagtcaaggaaatatactttagccatgtattagccatgt

SEQ ID NO: 13958 - DNA, 1185 bp, DROSOPHILA
atgtcggaggttggatgcgatcgagaggtgatatgtgaattgaaacggaaagtctcatctggtcaagctggttcaccgattttctacagcgccgctccgcgtggatcctgctccacttgctgtgccattaaagagcgcgaggacataaagttcatgctgtacaccagtcggaaccgcaattccgcacaactgctccacctgagcgacgatgcccggctggcgcagagcaatttcaatttcaattacccgctggccatctatctgcacggcttctcggaatcggccaccggcgaacggcagagcagccaggagctaaaggacgcgtttctcaggaggggcaactacaatgtcatcctcatcgactggagcgcgatgacagcggtgccctggtactcgaatgccgtcgagaatctgccggtgtcgggtcgctatttggccaggttcctgcgattcctggtggacaagggttacccagcgaagtacatccacttgattggcttcagtctgggcgccgaggtggccggttttgcgggcaagcagctgcaggagtggggcatcaagctgcccaggataacggccctcgatccagctctaccgcttttcgagggcaacagctccaaccgccgcttgagtcccagtgacgctaggttcgtggatgtcatccacaccgacggtggccttctgggcaatccagcgcccatgggtcatgcagacttctatccgaatggcggacgacccctgcagccgggttgtgccaaacagaatattgccaataactggctgggaatcattgttggctgcagtcaccagcgtgcctgggaatacttcgtggagagcatagcccagcctcgaggatttcccgcccagcgttgcgagccctccgatatgttcggcatttgccgtgaaccaggaggtggccccgccttcatgggcatgggggcggatcccaggattcgtggcaaattctatctggatacgaacgatgccaagccgtttgggaggaacagccgggcgagggcaattgtctcgctggctcctcggctgcctattgcctacaaattgccacctaatgccaccagacagccatctgtcagtcggtgggccaatggccaaaaggagcaggacaacgaggacgaggacaacaacgcgctgagcaacaacattgacaggttctcactgacgtga

SEQ ID NO: 13959 - protein, 394 aa, DROSOPHILA
MSEVGCDREVICELKRKVSSGQAGSPIFYSAAPRGSCSTCCAIKEREDIKFMLYTSRNRNSAQLLHLSDDARLAQSNFNFNYPLAIYLHGFSESATGERQSSQELKDAFLRRGNYNVILIDWSAMTAVPWYSNAVENLPVSGRYLARFLRFLVDKGYPAKYIHLIGFSLGAEVAGFAGKQLQEWGIKLPRITALDPALPLFEGNSSNRRLSPSDARFVDVIHTDGGLLGNPAPMGHADFYPNGGRPLQPGCAKQNIANNWLGIIVGCSHQRAWEYFVESIAQPRGFPAQRCEPSDMFGICREPGGGPAFMGMGADPRIRGKFYLDTNDAKPFGRNSRARAIVSLAPRLPIAYKLPPNATRQPSVSRWANGQKEQDNEDEDNNALSNNIDRFSLT

SEQ ID NO: 13960 - DNA, 3558 bp, DROSOPHILA
cgacttcatgggtagcaacgatcttgatcttctaatataccatttacccaagtgtattaacgacatatcgctctctcttctcttctccatcaacattttgtactttccaaatcatgcagagattggcgtatttataattcgcggtaccaccgcaagtagagcggatacagtaccaaatacataaaatgaaacctatgctaatccagataaatatcataagtaataaagtcaacaacgagaaacactcgacattcggctgtcttcgacgtaactacatgcactctactaaccgaaggcgccaccaacgctacgatccgctcagctcagctccgcttcatcgccacaagtacttcgaacttcgaacagcagcaacaccacatctacgtgccgtgccggcagctcaagactatggccgcaagctacgtgtaaggccgcaccttcccatacacatctaactctctgtctgcatactcgcattttgacccgcccgaaagagcatcgcctgcctatccgtatagcatgtagaccgcaatctgcgagagccacactcgacgatataccaccacactacgcgacgcccaattggccatcgacgataatcaaaatttgaactatgttgctgctgctgttgctgcgccaccactgaacgacataatgcgcgaatcctacgaatccatcactcgcttgcccacatcatccattaatgctccctttgaccttctcttcctgttaataaattttcacttgcgttcgaattggcctgtgtacgaatgattattatgtataccttttgttttgtattgtgccttattctaattaatcgtttctgttaattaatgaacatttgtttctgctccgccagcagcatacatccacatccctatgccgccaatccgaggcgccaacaacgtgccgtaaaacattttcacacggaggacgaagcggccagctcctacaaggcggtcaagcgcggcaagaagaagtagtagaaacgtgatcatctgtatgccaacatcttccgcatcgcacactcaaaaacactaggaagcaaagcgttgggttctgttccatagcaggaaaaccaattcaaatattttttaacaaacacaattctttaccagttctgtcttatcctgcgtgagtcgaccagaatgcaacactaaaaaatgtacaacttcaagatgctattgatgtgcacgcaggatacagaacaacttgcttaaatttacttaaaacaaatgtgactattcaacgccgaaatcattacaacacacactctcagacctaatcgaaaaattcaatgaaagtaatggaatatatatgaaatcgtaattataagtttgaattatttgattaattctcaagtttttagattttgttagccactaagctttaaattatggatgccagttagcgtgcaaatgaacacaattgatttgaaggctccgaacgatagaaaacaacaattaccaattccccaaatacatgtaattcgtaaggcctaagtaaatgttaacgtgaatttaattaaatggtaattacattataatagtaaatccagtgttctacttatgcgacttatagagaattaaacgtattaactaactagtccaccatctccatttgcgtctcctcggattcccgccaaatgcgctgcaccatctctaccagctgcttccagagcgccgtcttacgcaggaagttggcaaggcagacgagaataaaggcccaagccaggcccaaatagtaatccgtctgcacaatgggtttattagacagcggctccatctctgcgcgagtgaggatgatcggatcaatggcctgcggattcacagtcttcatattggtgtgactcattatgaaactggcaaagctgctctttgtgtccttccacccgggctcgaatttgattagcggcctgccctggtggaatagcatcagtgtgggcagcgaaacgatgccgaattctgcattgaaacgaccaaactcataggcatccacataggcgatgggtagcgtgggaaagtaatggggcagcacgttgaccatcgaagccacacgagcgcactccaagctggatgcggtgcagaaatggacaagtacacagttgcccggctcgtggcgcttggtggcattgcccatgggcttaagcagattcactatatccttggcactgcgcattatcagcagttccggctcggatgctgtctcattctcgatatcccgctgcaggcacttcatcataataggtggctttcgaaccggaggcagctggtttaggtgcatgatgtgctcgtcatccggggcacatgtgtgtcgctccttcagcaaggtttcgaagctataatggcactggccccgcgaaactcccagggaatacaccgtcaaatttgagaagagcccgaaatactggagggcacttagtaatccggagagttccgcctggccctgcgcggcgcagagcactgtggaagtggtataatgttactgattgaagaactcgatataaataaataacgtacaaaatacaaacaagagattttggttcattatatcgttggttggacagctgttgaaatagttggctgttatatggcactcgtgaaatacctggaaacttcttaggtttggatataccgaatagcaaggtaaactgcttgaccttgtttttgtaagcagtgcccattaagttggtatttcatcgatgaaacattgacgatgtatcgaaaaacatcgatgcttatttttacatcgctacaataagtttatatttttaccttaccttattttcattttcgtctgcgctcgctggtgattcccttggtggcattacatcattggtggatccattcggatccaatttagaagcgccacgatgacggagctgggcatggagctggagagcgttcgcctggcgacatttggggaatggcccctgaatgccccagtttccgcggaggatctggtcgccaatggtttctttgccacgggaaactggctggaggccgagtgccatttctgccacgtgcgcatcgaccgctgggaatacggcgatcaagtggcggagcgccatcgccgctcctcgcccatctgctccatggttctggctcccaatcactgcggcaatgttcccaggagccaggagagcgacaacgagggaaacagcgtagtggacagcccggagtcctgctcttgtcccgatctcttgttggaggccaatcgcttggtaactttcaaggactggccggtgagtaccctgagctggtgtcgctcgcttctggtgattcaccatagcgggtcattgtaatcactatagtttcagtttcaagctcactataagtgcatatgtaagtatgattgcgtagttaaaaagtagcgtaaatgaggccaggaaaatcccggtcgaaagtatcaatgatatttttgtatacaaacaagaaatgtcttgttagctgcctcaattcagctgaatgttgattgataatcctacgaaattaagctttaattaagatatacaaaaatcattatgaacttcaaatgaagttattgtatactgta

SEQ ID NO: 13961 - DNA, 1501 bp, DROSOPHILA
acgatataatgaaccaaaatctcttgtttgtatttttgctctgcgccgcgcagggccaggcggaactctccggattactaagtgccctccagtatttcgggctcttctcaaatttgacggtgtattccctgggagtttcgcggggccagtgccattatagcttcgaaaccttgctgaaggagcgacacacatgtgccccggatgacgagcacatcatgcacctaaaccagctgcctccggttcgaaagccacctattatgatgaagtgcctgcagcgggatatcgagaatgagacagcatccgagccggaactgctgataatgcgcagtgccaaggatatagtgaatctgcttaagcccatgggcaatgccaccaagcgccacgagccgggcaactgtgtacttgtccatttctgcaccgcatccagcttggagtgcgctcgtgtggcttcgatggtcaacgtgctgccccattactttcccacgctacccatcgcctatgtggatgcctatgagtttggtcgtttcaatgcagaattcggcatcgtttcgctgcccacactgatgctattccaccagggcaggccgctaatcaaattcgagcccgggtggaaggacacaaagagcagctttgccagtttcataatgagtcacaccaatatgaagactgtgaatccgcaggccattgatccgatcatcctcactcgcgcagagatggagccgctgtctaataaacccattgtgcagacggattactatttgggcctggcttgggcctttattctcgtctgccttgccaacttcctgcgtaagacggcgctctggaagcagctggtagagatggtgcagcgcatttggcgggaatccgaggagacgcaaatggagatggtggactagttagttaatacgtttaattctctataagtcgcataagtagaacactggatttactattataatgtaattaccatttaattaaattcacgttaacatttacttaggccttacgaattacatgtatttggggaattggtaattgttgttttctatcgttcggagccttcaaatcaattgtgttcatttgcacgctaactggcatccataatttaaagcttagtggctaacaaaatctaaaaacttgagaattaatcaaataattcaaacttataattacgatttcatatatattccattactttcattgaatttttcgattaggtctgagagtgtgtgttgtaatgatttcggcgttgaatagtcacatttgttttaagtaaatttaagcaagttgttctgtatcctgcgtgcacatcaatagcatcttgaagttgtacattttttagtgttgcattctggtcgactcacgcaggataagacagaactggtaaagaattgtgtttgttaaaaaatatttgaattggttttcctgctatggaacagaacccaacgctttgcttcctagtgtttttgagtgtgcgatgcggaagatgttggcatacaga

SEQ ID NO: 13962 - protein, 295 aa, DROSOPHILA
MNQNLLFVFLLCAAQGQAELSGLLSALQYFGLFSNLTVYSLGVSRGQCHYSFETLLKERHTCAPDDEHIMHLNQLPPVRKPPIMMKCLQRDIENETASEPELLIMRSAKDIVNLLKPMGNATKRHEPGNCVLVHFCTASSLECARVASMVNVLPHYFPTLPIAYVDAYEFGRFNAEFGIVSLPTLMLFHQGRPLIKFEPGWKDTKSSFASFIMSHTNMKTVNPQAIDPIILTRAEMEPLSNKPIVQTDYYLGLAWAFILVCLANFLRKTALWKQLVEMVQRIWRESEETQMEMVD

SEQ ID NO: 13963 - DNA, 8942 bp, DROSOPHILA
cttaagttaagtgaagggaatacaacaattattgtgatttatatttttagatacgaagactctcagggatgccagttggtcaacgaactgagtgaaaatcaacaaaaaattgaagctatggaggtagatgagttcgagttggatttaccatctaccacgaagcccaagaccgtggtaactactagtgtgccgacaacctttcctcgggtgtacaaaacagccaaagccaaatgctcggctcgtggggcaggatctagtggtcaacagagtggctacaataacagggcagtccgttcaatgatgcagccgtcaaagggctcacccacgacttcacattttcggactattgcagttggttgccaccaccaagctggatcggctgcccctcgaaagctgcaaatggattcgtgcccaaccggggctgcccgcaagcaaaataggttgactgaagcaaaatcaaaaatttaccagccatctggcagttcgcaacgactttcaacaggtcgcgatacaaaactaggaaaatctggtacaaacgtacaaaaacccaagttaaatcatatgtgagttaaaatttgtgatcattaaatgcttacagatctacttcaaactaccttgaaagaagaacttttaatagtctattattatgtgcctgtaaactgtctattttatattttctattcctttatatctttagttgcaagtcaggaaaaatgtctacggccagcaggattgccatgtctaatccaaagcaaaccaatggcaacccacagcgaatgatgccaagaagcacaaacgcctcaatgatgcgacagtccgaggtcaagcgggtaaaccctctcgcaactccaatttcacaaataatataatatatatatatactccattgtagcgcatgagtttgatgcgcgccgacagtgattcggatctgctatacaacgaatatctcttcaagtgatttgcaataagttatatggatttgttgcttccctttcaaaaattagtttttccaatccaaaaatacctaggttatgttaaaattaaaattgaaaccaagactgggaaaaatttaaagaaagtgtaatttttatacttaccggtgatgagtccatgatcatcttaactacatcggctccaaacttttctttgtattgtttggcaagtcgctcagagatttcgctgagtgatgttagcttgggctccttgtacacaaactcgatggcatgatcttcttcaaagtacatctaaaaatagcattaaatttaatattaattttaagggtattctgtagattactcactaatccataaaatacaacacggtaaaagcgacccaacattctctttcctgaccgattcacttcaactattttattataggcttgcgtgagatgctcatagcagtgtgccaggtcctggtaactacgatctctttcgtacatgggcaggatgagtttgtagagctctccaaggcactcaaatctttcagcgcgatccaagaagtcagcacatagcttaagctgctccagtagcatttgttcggtgtactgggaatcctgagcaccggcatccagtttgagaccttgctcatctaggggtatatttgtagatatctttccgaatgcagtggatgaccaactaagagtgcaaccaccttttaatcggagatattcgcacattaaagcagcaatgtggagatggcaacaggcagcctccgacagattcccattctgctcgtgatttctggccattgtcactaaccaagtatgacgaagctctggtgtggaggcatacgaattggccagggaatactgcagttccagcaatctttcaggatccatatgatgagcctgcatttgggcagtggccataagtacagtacgcactcgacgcgttaggtctttaacctccataggaaagcctgtgcccttcatcgccttatcgctattcgcatagctattgatgatcgacaagctttcttggaatctagcattgttcaatccaattacgttgccaatcatctgcgatactgagataataacttgcaagtgtacgcgagttagagcctttcggccactgaattcgaagttactgcgcatgagaagatataaaacagcacaagattcgtggcgaatctctactaggcgactatcgcaggccttaaggagctcatataccatctgaccacacaacatggcatttcctttgaaaagagccactgcatagttgttaataaatgctcgcagagcagcaaagacgtgtttggagagcctttctgattgacccaactgcaggaatcttaggtaaactctggccaccttgggcaggactaaactatcggccaaaagttgtctgaactgcagaacatacagacctaagcagtccaaaataatcatgcccacttcggtggccaaattcgattcatagagagccaactgatttctagctagggtatcgatgtcctctaataggtgttcccgggtttgattcagggttccacttgatggctgctgttcctgactgccgttttccaaacccgtgggtggttgagtcctagctggaagagtgttagccttggccaaacgtccctgacgggtttctgtagttatcactacacttttcttgcccacatatcgaaattgcagcaggcagagatccaaaatggagagaaactgcagcgtctcggattcattgcaattttgccaccaaccaatcatttgctcttgtgaaaggtgtttgatgatgaaaagaaagcccaggagaagatccttgctttccacagaactgaacttatcgcagcgggacaggatctgtgcatgggtaacgctcactgagcgattgtgaccatttcgtagggccacatctgtgtctccattcgtataggctcctattgtggtggtgtcctgagagtgctgaaaagaagatgcatgctagcaacgcttgatagaatttaattagactataacttacccccgagtccgtatttgaatttagtgagagattggagatcccattgctaatgggttgtccagcgatggcggccagatagttgtgctccttcatgtgaaccgaggtgcggtatggactcgcttgatcacagtgcatagtcagacgattctttgaacgcggcgtggacgtcaaggagccaaaagtggaagagtccttgctgaacacatagctacttgaacaactcaagcgcttagtataggaagcggagtccgcataaacgtgtccattgggcgtacaagctccagactccgataaatcatcaatccgatggatgttgtccatcacgacgcccaaccacggaacatagagcagggcaatccttgatagctgacctttctgctgatatcgattatccaactcgtgtttggccaagagatccttgaaaatgccaagcgcatgtcttctcacatgacccacttcattgaggctacttttcaattcctggagtagcagcccggatagaaaatgttgtctacagaattgttcggaaagagtgaagtgctgcatcatttcaggaggtctgttctttggattcaaaacaaatggcagattcagtggcacataatgctcatgctggcagatctcctgcagaaagttgaacttgtattcgtgaagtatacgcggattaccaggcgaaaattctcccatataacagcggatcaaacgaaagacaaagcctctgtccatgtagctcaaacactggcgaacaaacttagccaaagatcgattcaacaaatgagtttcctcacttaaatcctcaaatcgtgtggttatgtagggcattagtgccttaatcaactgttccacacgatcaccatattccttgggaaacctttcgttgcggagcattcgaatcctacccgtggccaacaagtgctgagccatgctttttataatcagatcaaagaatatcgacgagtatctcatgaacttgttgacgatgaggaaatccggattgctaggattaaggaggtagggtaaatgcctgcagagttctccatgaaccgtcctttgcctagcagtttgttggctatagtagggtgcgtgaaatacgtatttcacataggctcccaagagatcggatcttttcgcctgatcactgatcaaatggatgatgtttgtaatcaagcggattacattcaagccgatttcttccgactgagtgtgaactagcagagtaaacagctcattaaggaccgtgggtaaatagttaatcaacgatttcatatcaatggcgtgggcagctttcaagatcttgcaggtttccgtttccgctggcactgctccagttttgcccccctccagcaacctttcacagtgtccaaaaaagttgtgcaagtgctgatcggcagtcagaaccgtggaatccagacgcagtcccaccgtatataaattcctctgattgtcgatccactggatatccggaccgcagttctgctgagaaattggaagggtttgtaggcagccaagggtggggtggatagtgggtggttgatggtgcaattagcgtgcatatcagtgcggagaaagagaacacagaaaaagagcacaggttagttggcaagccagggaatgaatgcatggagtatgaagtatgttgggtaaaagacaaaacaaacatttcatgagttgatgaacgacttggcgcagcacacaacgtacacaacttacccctttgccccatcccaagggttggatagatagatagccgactggcaatgtggcagccaccggaagctgttgttcctccaggcatatccgattcttctgaagcaatggcaaccaggcatagccaataggtgtttcgaacgccgcatttgcatcccttttcttgctgagattacatgacacgtggtagaaggaaaagagcaggtggtgttccggaaatagtcccagcggtagacgtagcttgatttcctcgtaccatgtgggcgttacattgtgatgcagcaccgggcaggcgatctgggacactaaaagatcctgaccagggcgaccatatatgcactgcaatcaaaatttatttatgtattcataattttgaaaattttattaattttacctttaagggtttgctgtactccccatctccatcacgtagctccaccacgaccgtaatattcctggctcttgagaacagtttctgactgtcgaattgcaaactcagtgggtacacatagaggtggttacagaaactggtataagggtgggcatcccgttcactttggctttggaattctgccacttctacagtgggcgattgcttggaagatgggctaaaggtggacaagggtgccagcgatttgcttaagccgcaaggtgtggtttggtctaggaactgcatctgcatcttaagactgccaggaataattgtaagtttgcttagtttttccggcttgcgataatcgaccaaaagcttaagaagttcctcatccttcagtttgggtatctcctggcgataaatgggactgaactcaaactctcttttgggatctacatccaattcgtgactgtattgcttgaagagcggtcttgcagcccaggcgaaaggctgccggtaatgtccaatatgttgagcatagctctttgccgctttgtagactttttggcctagctttggatccttgccagctttcagatacggttcggtaacctgggctattcctgattgcagtattttctctatgcgcacaacctatacgagataacctttaatcaatatggcatttagatataattaattaattactaaccaaatatatatcggcatgtggagctgtcacggaaagtagacattgtctcagttgctgaaattgctgtcgattcgatcgcaacagctcggcagacactccatcaaaaagggaatgcggtgcttgacaggcagtgctcctttcatcgccctccgctgactttctagggactccacaaccagcgactgacgaaggtaccggagtattcggcaatagctgggctgcccactgctcatttacattgaagtaaaagttctcgcttaactttcgatttgccttggcatcgaacaaggccaggctggtgatatagggttccacctgctgttcgactccacccgcggagctctcatcctgtggaatgcactgcagccggaagcgcaggttatggcaggtgagcagtaaccgtgtgccaaagtgctctcgatattgctcaacattatcgctaccgctccccttgactggcgactgatagcaagcaaaaaggcggcggcgctgttcccttcttgccaaagcaatcgagtgatccgtttctcgtccatacttcattaattgtggatgcagtgattgatctaagcccttcaaagtgccaaaggtaggtggatccattgctggtggctggagctgtggacttggatttgaaccaatagatgggtgccgctccagtgaagcatttcgcttctcctcttgtgcgcgattttgggccaaaaccgatgaaatcttgctgagccagtccttaaaatcctgttcgttttcggcagccagtgtgaaggatttatgacccgtcgtcatgcggagctcgaaacaaaagcggccacgtttgggattctgaaagggattcaaaattattttttgtcgctctatattttccgttggaatttaaccactcacctgaaccacatctgtgcaaaagtccattactattgtggctttggcttcgccttgtttctcgtccttgtgcagttctaatatatatgttccatctatctcctgtcgcagatagcagtagcgtcgtttaaacgatttattgccaatattggcaaacattcgatctgaagccgaatcgggtccttttagtagatatccctgcttggtaatggtgtccgcctgtgagcgagtcatctgctcgtcaatgcgatcctgatccgcatcgatttcatagatctcttccaccagttcctctgcaggcgatatgctaagataaaatggcttaattaaattgtattcgctataaaacaaacaattgcaatatatacctaggaagatcgtgacagtttccaccataggcattgtatttataatggatcaagtgattcttagccctgtatgtgtagagagcctgccgtgtgaatctggtgcactcagccctggatccgtgaggctgtccatcgactaagtcctcggcgttcccatcgtccgcaaactcatccacctcctccggctgggccaaattcgatcggagtgttatcgacgacagggctgactcataggaggaatccttttgactggaggagccattcgagcactgtgaactctttctggagagttgaccatgtccattggaattgttcaagctgctgctactgctgctgcttgtgtgcccattaccatttccattgtggtggctaccattcgattgtatgctaccctgccgactcacttgactgtgtccatttccattcgttatcatggaaggaccatgaaggggacacacaatcgcctcattgggaggatcgaatcggtccgccactgatttggcatttgttcgctgcttgcggggcatgataatttcctatcggaacagaaaagaaaattagattgtatcacgtacatttgtaaaatttgtcagttgtatagtatattcttttactcaccgatacatcatctgtgggatagatgagtagctccctctgcggatcattttggataacagttttatttttggctataaaggcttcaaaatcaatcggctccaccacgagtggcttgttctgaaacaagaagattgagataagtatacgcttctattttcaaaatgtttgtatgctaatttatgcgagccacttgtaaaagcagagcgtccctattaatagcactcccccaagtaaataatgcccaaatgttatccattcccgatgccggaatgcagacggatttcgagagatttatagagacaacgcacgtcataaatttatggctacttggtgatgtgtgaggttcgctcttattttcactaccccccacacagaaaagaccttgaccgcattacaaagcggatgcctccacttctacccctagtgtaatgatattttccatgtctgccacttggaataaacaaattcatttcgcctaaactctaaacatagtaagttttagcgttttgcatttcttgtacgccacaggcaattgttgatattttctgctttttgcgtcttcgatttcgcaaaatgatgatgaagatacaatcatatctgtgccacgaggtgtgtgacccaatcggtgaccccacccaatatgacatgtccacagagggttaaagtgccacttccgttttggcatatccatttcaggcgactttcggatgtgctgtcattttattgtcttcttgaaactcgaggtgtgtgggcttgatgtgtgttttattcttgggcttggtttatttcaggaagacacgggtcaactccggccatgggaaaagttaatttcgaacaacctttaaacgacgttaactgcgacattggaaaaaggattgtcataggttgggatcggttattagagactgaatccattctgggtggggttattagaacatataccacattttcgtaatttaaaagtaagaagtcattataagttgtagttagcccaaattgaaggcactgcagtttgaaaagttcgacatttaaaggtcgagctttttactttaaaggttatagctaataaaaatccataacatattggcaggcaatccatctatatcagctgtcagctagtttcactggcaaaccttggctttggccctgattccaatcgcatgtgccttatgcccagccacgcccacaaaagtatctggcctgtccaccccctttctccagcatggactgcaatgtcattgcactcgcccacttagccacttttgggctcgagcttgggggaaagcattttccattgtgagctcaggcgcggg

SEQ ID NO: 13964 - DNA, 5955 bp, DROSOPHILA
atgacgtgcaacaagccactcgtggtggagccgattgattttgaagcctttatagccaaaaataaaactgttatccaaaatgatccgcagagggagctactcatctatcccacagatgatgtatcggaaattatcatgccccgcaagcagcgaacaaatgccaaatcagtggcggaccgattcgatcctcccaatgaggcgattgtgtgtccccttcatggtccttccatgataacgaatggaaatggacacagtcaagtgagtcggcagggtagcatacaatcgaatggtagccaccacaatggaaatggtaatgggcacacaagcagcagcagtagcagcagcttgaacaattccaatggacatggtcaactctccagaaagagttcacagtgctcgaatggctcctccagtcaaaaggattcctcctatgagtcagccctgtcgtcgataacactccgatcgaatttggcccagccggaggaggtggatgagtttgcggacgatgggaacgccgaggacttagtcgatggacagcctcacggatccagggctgagtgcaccagattcacacggcaggctctctacacatacagggctaagaatcacttgatccattataaatacaatgcctatggtggaaactgtcacgatcttcctagcatatcgcctgcagaggaactggtggaagagatctatgaaatcgatgcggatcaggatcgcattgacgagcagatgactcgctcacaggcggacaccattaccaagcagggatatctactaaaaggacccgattcggcttcagatcgaatgtttgccaatattggcaataaatcgtttaaacgacgctactgctatctgcgacaggagatagatggaacatatatattagaactgcacaaggacgagaaacaaggcgaagccaaagccacaatagtaatggacttttgcacagatgtggttcagaatcccaaacgtggccgcttttgtttcgagctccgcatgacgacgggtcataaatccttcacactggctgccgaaaacgaacaggattttaaggactggctcagcaagatttcatcggttttggcccaaaatcgcgcacaagaggagaagcgaaatgcttcactggagcggcacccatctattggttcaaatccaagtccacagctccagccaccagcaatggatccacctacctttggcactttgaagggcttagatcaatcactgcatccacaattaatgaagtatggacgagaaacggatcactcgattgctttggcaagaagggaacagcgccgccgcctttttgcttgctatcagtcgccagtcaaggggagcggtagcgataatgttgagcaatatcgagagcactttggcacacggttactgctcacctgccataacctgcgcttccggctgcagtgcattccacaggatgagagctccgcgggtggagtcgaacagcaggtggaaccctatatcaccagcctggccttgttcgatgccaaggcaaatcgaaagttaagcgagaacttttacttcaatgtaaatgagcagtgggcagcccagctattgccgaatactccggtaccttcgtcagtcgctggttgtggagtccctagaaagtcagcggagggcgatgaaaggagcactgcctgtcaagcaccgcattccctttttgatggagtgtctgccgagctgttgcgatcgaatcgacagcaatttcagcaactgagacaatgtctactttccgtgacagctccacatgccgatatatatttggttgtgcgcatagagaaaatactgcaatcaggaatagcccaggttaccgaaccgtatctgaaagctggcaaggatccaaagctaggccaaaaagtctacaaagcggcaaagagctatgctcaacatattggacattaccggcagcctttcgcctgggctgcaagaccgctcttcaagcaatacagtcacgaattggatgtagatcccaaaagagagtttgagttcagtcccatttatcgccaggagatacccaaactgaaggatgaggaacttcttaagcttttggtcgattatcgcaagccggaaaaactaagcaaacttacaattattcctggcagtcttaagatgcagatgcagttcctagaccaaaccacaccttgcggcttaagcaaatcgctggcacccttgtccacctttagcccatcttccaagcaatcgcccactgtagaagtggcagaattccaaagccaaagtgaacgggatgcccacccttataccagtttctgtaaccacctctatgtgtacccactgagtttgcaattcgacagtcagaaactgttctcaagagccaggaatattacggtcgtggtggagctacgtgatggagatggggagtacagcaaacccttaaagtgcatatatggtcgccctggtcaggatcttttagtgtcccagatcgcctgcccggtgctgcatcacaatgtaacgcccacatggtacgaggaaatcaagctacgtctaccgctgggactatttccggaacaccacctgctcttttccttctaccacgtgtcatgtaatctcagcaagaaaagggatgcaaatgcggcgttcgaaacacctattggctatgcctggttgccattgcttcagaagaatcggatatgcctggaggaacaacagcttccggtggctgccacattgccagtcggctatctatctatccaacccttgggatggggcaaagggcagaactgcggtccggatatccagtggatcgacaatcagaggaatttatatacggtgggactgcgtctggattccacggttctgactgccgatcagcacttgcacaacttttttggacactgtgaaaggttgctggaggggggcaaaactggagcagtgccagcggaaacggaaacctgcaagatcttgaaagctgcccacgccattgatatgaaatcgttgattaactatttacccacggtccttaatgagctgtttactctgctagttcacactcagtcggaagaaatcggcttgaatgtaatccgcttgattacaaacatcatccatttgatcagtgatcaggcgaaaagatccgatctcttgggagcctatgtgaaatacgtatttcacgcaccctactatagccaacaaactgctaggcaaaggacggttcatggagaactctgcaggcatttaccctacctccttaatcctagcaatccggatttcctcatcgtcaacaagttcatgagatactcgtcgatattctttgatctgattataaaaagcatggctcagcacttgttggccacgggtaggattcgaatgctccgcaacgaaaggtttcccaaggaatatggtgatcgtgtggaacagttgattaaggcactaatgccctacataaccacacgatttgaggatttaagtgaggaaactcatttgttgaatcgatctttggctaagtttgttcgccagtgtttgagctacatggacagaggctttgtctttcgtttgatccgctgttatatgggagaattttcgcctggtaatccgcgtatacttcacgaatacaagttcaactttctgcaggagatctgccagcatgagcattatgtgccactgaatctgccatttgttttgaatccaaagaacagacctcctgaaatgatgcagcacttcactctttccgaacaattctgtagacaacattttctatccgggctgctactccaggaattgaaaagtagcctcaatgaagtgggtcatgtgagaagacatgcgcttggcattttcaaggatctcttggccaaacacgagttggataatcgatatcagcagaaaggtcagctatcaaggattgccctgctctatgttccgtggttgggcgtcgtgatggacaacatccatcggattgatgatttatcggagtctggagcttgtacgcccaatggacacgtttatgcggactccgcttcctatactaagcgcttgagttgttcaagtagctatgtgttcagcaaggactcttccacttttggctccttgacgtccacgccgcgttcaaagaatcgtctgactatgcactgtgatcaagcgagtccataccgcacctcggttcacatgaaggagcacaactatctggccgccatcgctggacaacccattagcaatgggatctccaatctctcactaaattcaaatacggactcggggcactctcaggacaccaccacaataggagcctatacgaatggagacacagatgtggccctacgaaatggtcacaatcgctcagtgagcgttacccatgcacagatcctgtcccgctgcgataagttcagttctgtggaaagcaaggatcttctcctgggctttcttttcatcatcaaacacctttcacaagagcaaatgattggttggtggcaaaattgcaatgaatccgagacgctgcagtttctctccattttggatctctgcctgctgcaatttcgatatgtgggcaagaaaagtgtagtgataactacagaaacccgtcagggacgtttggccaaggctaacactcttccagctaggactcaaccacccacgggtttggaaaacggcagtcaggaacagcagccatcaagtggaaccctgaatcaaacccgggaacacctattagaggacatcgataccctagctagaaatcagttggctctctatgaatcgaatttggccaccgaagtgggcatgattattttggactgcttaggtctgtatgttctgcagttcagacaacttttggccgatagtttagtcctgcccaaggtggccagagtttacctaagattcctgcagttgggtcaatcagaaaggctctccaaacacgtctttgctgctctgcgagcatttattaacaactatgcagtggctcttttcaaaggaaatgccatgttgtgtggtcagatggtatatgagctccttaaggcctgcgatagtcgcctagtagagattcgccacgaatcttgtgctgttttatatcttctcatgcgcagtaacttcgaattcagtggccgaaaggctctaactcgcgtacacttgcaagttattatctcagtatcgcagatgattggcaacgtaattggattgaacaatgctagattccaagaaagcttgtcgatcatcaatagctatgcgaatagcgataaggcgatgaagggcacaggctttcctatggaggttaaagacctaacgcgtcgagtgcgtactgtacttatggccactgcccaaatgcaggctcatcatatggatcctgaaagattgctggaactgcagtattccctggccaattcgtatgcctccacaccagagcttcgtcatacttggttagtgacaatggccagaaatcacgagcagaatgggaatctgtcggaggctgcctgttgccatctccacattgctgctttaatgtgcgaatatctccgattaaaaggtggttgcactcttagttggtcatccactgcattcggaaagatatctacaaatatacccctagatgagcaaggtctcaaactggatgccggtgctcaggattcccagtacaccgaacaaatgctactggagcagcttaagctatgtgctgacttcttggatcgcgctgaaagatttgagtgccttggagagctctacaaactcatcctgcccatgtacgaaagagatcgtagttaccaggacctggcacactgctatgagcatctcacgcaagcctataataaaatagttgaaatgtactttgaagaagatcatgccatcgagtttgtgtacaaggagcccaagctaacatcactcagcgaaatctctgagcgacttgccaaacaatacaaagaaaagtttggagccgatgtagttaagatgatcatggactcatcaccggtatttttggattggaaaaactaa

SEQ ID NO: 13965 - protein, 1984 aa, DROSOPHILA
MTCNKPLVVEPIDFEAFIAKNKTVIQNDPQRELLIYPTDDVSEIIMPRKQRTNAKSVADRFDPPNEAIVCPLHGPSMITNGNGHSQVSRQGSIQSNGSHHNGNGNGHTSSSSSSSLNNSNGHGQLSRKSSQCSNGSSSQKDSSYESALSSITLRSNLAQPEEVDEFADDGNAEDLVDGQPHGSRAECTRFTRQALYTYRAKNHLIHYKYNAYGGNCHDLPSISPAEELVEEIYEIDADQDRIDEQMTRSQADTITKQGYLLKGPDSASDRMFANIGNKSFKRRYCYLRQEIDGTYILELHKDEKQGEAKATIVMDFCTDVVQNPKRGRFCFELRMTTGHKSFTLAAENEQDFKDWLSKISSVLAQNRAQEEKRNASLERHPSIGSNPSPQLQPPAMDPPTFGTLKGLDQSLHPQLMKYGRETDHSIALARREQRRRLFACYQSPVKGSGSDNVEQYREHFGTRLLLTCHNLRFRLQCIPQDESSAGGVEQQVEPYITSLALFDAKANRKLSENFYFNVNEQWAAQLLPNTPVPSSVAGCGVPRKSAEGDERSTACQAPHSLFDGVSAELLRSNRQQFQQLRQCLLSVTAPHADIYLVVRIEKILQSGIAQVTEPYLKAGKDPKLGQKVYKAAKSYAQHIGHYRQPFAWAARPLFKQYSHELDVDPKREFEFSPIYRQEIPKLKDEELLKLLVDYRKPEKLSKLTIIPGSLKMQMQFLDQTTPCGLSKSLAPLSTFSPSSKQSPTVEVAEFQSQSERDAHPYTSFCNHLYVYPLSLQFDSQKLFSRARNITVVVELRDGDGEYSKPLKCIYGRPGQDLLVSQIACPVLHHNVTPTWYEEIKLRLPLGLFPEHHLLFSFYHVSCNLSKKRDANAAFETPIGYAWLPLLQKNRICLEEQQLPVAATLPVGYLSIQPLGWGKGQNCGPDIQWIDNQRNLYTVGLRLDSTVLTADQHLHNFFGHCERLLEGGKTGAVPAETETCKILKAAHAIDMKSLINYLPTVLNELFTLLVHTQSEEIGLNVIRLITNIIHLISDQAKRSDLLGAYVKYVFHAPYYSQQTARQRTVHGELCRHLPYLLNPSNPDFLIVNKFMRYSSIFFDLIIKSMAQHLLATGRIRMLRNERFPKEYGDRVEQLIKALMPYITTRFEDLSEETHLLNRSLAKFVRQCLSYMDRGFVFRLIRCYMGEFSPGNPRILHEYKFNFLQEICQHEHYVPLNLPFVLNPKNRPPEMMQHFTLSEQFCRQHFLSGLLLQELKSSLNEVGHVRRHALGIFKDLLAKHELDNRYQQKGQLSRIALLYVPWLGVVMDNIHRIDDLSESGACTPNGHVYADSASYTKRLSCSSSYVFSKDSSTFGSLTSTPRSKNRLTMHCDQASPYRTSVHMKEHNYLAAIAGQPISNGISNLSLNSNTDSGHSQDTTTIGAYTNGDTDVALRNGHNRSVSVTHAQILSRCDKFSSVESKDLLLGFLFIIKHLSQEQMIGWWQNCNESETLQFLSILDLCLLQFRYVGKKSVVITTETRQGRLAKANTLPARTQPPTGLENGSQEQQPSSGTLNQTREHLLEDIDTLARNQLALYESNLATEVGMIILDCLGLYVLQFRQLLADSLVLPKVARVYLRFLQLGQSERLSKHVFAALRAFINNYAVALFKGNAMLCGQMVYELLKACDSRLVEIRHESCAVLYLLMRSNFEFSGRKALTRVHLQVIISVSQMIGNVIGLNNARFQESLSIINSYANSDKAMKGTGFPMEVKDLTRRVRTVLMATAQMQAHHMDPERLLELQYSLANSYASTPELRHTWLVTMARNHEQNGNLSEAACCHLHIAALMCEYLRLKGGCTLSWSSTAFGKISTNIPLDEQGLKLDAGAQDSQYTEQMLLEQLKLCADFLDRAERFECLGELYKLILPMYERDRSYQDLAHCYEHLTQAYNKIVEMYFEEDHAIEFVYKEPKLTSLSEISERLAKQYKEKFGADVVKMIMDSSPVFLDWKN

SEQ ID NO: 13966 - DNA, 4485 bp, DROSOPHILA
acaaaaactcaagctaatgaaataattttcaaagaataaaataaagaaaaaaagaataataaaaagaatatttaaattgctagttttgatacttcatgaaacgcttgctttatacattttaatacaattttatatatttttagccatttataggttgttattttatagctaccagcgctgacttctttacggaaagtggcaactctcttccacagctgataattcggtctgctttttgtaaattttgcttgtccagcaaatttagttaaataattcaaagaaatcatgcccgtggtgaacgtgtcggctgccgaggagtaccagaagtacattaatgcggataagacgaccgtagctctattcgccgccgaatgggcagagcaatgcggtcaggtgaaagacgcgctggaggagctggccaagattactggcgaaaaactgcagttcatcagcctaaacgctgaacaatttcccgagatttccatgaaacatcaggtacgctcgtatttattttatgaaaatataacagtagttcctcattcatttgcgatgccaccagatcgaggccgtgcccacagtcatattcttcgccaagggctccgccgttgaccgtgtcgatggtgtagacatcgccgccataagcgccaaatccaaaaagttggccgaaaacgcaagcagcgcggcggcaacaggacaaacgttggaggaacgcctaaaggccctaatcaatacagctccgctgatgatattcatgaagggcgaccgaaatggaccgcgttgcggattctccaagcagctcatcggcattgtgaacgaaaccaagtatgcaaattgatcatcagttgtatttgatttcaagttataaacgaaaatatccttcgatagcttgccgtacgagacatttgacatcctcggcgacgaagaagtgcgtcaaggcctgaaaacctactccgactggcccacatatccccaggtttacgtcaagggtgaacttatcggcggactcgatattattaaggaactgctggcgaacaatgagctcgagtccacgctaaagggctaattccatcggattgcatctactcctacagacaccataaaccagaaacaaatttttagctagatccttagactttttaatggtttaataaaggatttttgctacattctggtattattttattcatcgaaatttttaataacaattgtattaaagcaaatgtgctataggtcatccataagacatcttacacgggcttcaatggtgtcaccataaatgtttacaaacttaacgacataaatatagctagaaatttgtaagaacttttttatacaccagccctggtttatctggtattttgcgtaccttcattttgtaaacagctgtttcggcgtcggcatcttgcacattattttcgcaatattatttatattattgaaaatacccattaactataaacttatatccaaatctttaaatggctgagggtaataccgctggcggagaggaccaaaagctgacggacatctttctaaagggctggaacatattcgacgagctagaagttaccgaactgcccttcaatggcagcgaatttcaggtgtgtaatattgaagatcttcatatatatgtaataaaaaccagcattgaacgtttaccacaacgtttagaacaaagtgaagactgcaatgggccttttcgagcaggccaccgtcattgtgaaccaggttagcatgttcagtgccaacgagttgatcgacgaggtgtccacggaatcgctaccattcatgctgctcccttactttctgggcaagcttaccactaagatcaacagccccaataacacacactccatagagctgggcgagatttacttcaaggaccacctgcagcgttgccaggagtatgatctctgtgcagcgcccaaatctcaggtggctaaggcggatagccaagcggaaaaaagcgagcagcgcgagctggtagaggcagccttcaatagaaacgacaaaatagcccagtatcgccggatgaaggagattgacgagtatatggccagaatgcgcgatgcagtcaagaacaaaacggtcgacgatgaggataaacgtgtctttttcctcaagtatttggacaagagtataatagactccaagcaggaattagaaacattgggcgtaatgaagcagctggcccagatgcgccttgcccgattggctggtggcgaatccgacaacgaagtggattcgttccgtccaccgaatcaaaatcaatcttctgcatcgtccacctcccgcggtcatggtcacagccacggacccggacaccaccaccatcatcagcaggccgctaagccaaagcccttgcagcccttcatcataacacgtaatgccacccagaaggcggttttcggcttgggataccccagtttgcccattatgactgttgatgaattctaccagcagcgcgtcgacgagggcatctttcctgatgaggagaaggttgccaagatgaatcaggcacaggccatcgcggccgcccgggatcccaacgaaaaagaggacgaggagaaggccgttgaggagctacaggcggagcaggatgatcccgagtatatagaccgcatgaggcgcatggatgaatacaaggatgtggtgcgtcgcggtgacggcaaccgtcataaccgtagttaaggaactcaaaatttatgtatttttttaaaacccaataaaatggtataaccgcaagactggttttaagtcagtatattcaaaaaataattctagtttctaaatttatttataaatcctagggatgcgctattgataaaataaaaattgttttcttttttattgaattgacaatatatacagtaaataaatagttagaatagttccactgttgcagtattggtaggcgtttggctgtaatcgcgcattttgcagcactgattgtcaccaccagtaacaaaaacaaaaatctcaagcacaagttaaatttttgtgagttgctacacaaaaaacgtaaaagagaagacagttctctcgaaatattgatagatcaacaaagattaaagtgaggtgtgttaaaatacagcagatacgtggtagtatcaagtgttaacacttttcgtactctgcagcaacccaaaagcagaatgtcagtacgagactttatcaagggtctgcccatacacgattcgagcaattttacccatttgagcaacgaacatggaattcgaacgtcgcagaagcgtgcctccgtctacctgcccaccgaggatgagcattcagagcagctgatcgtgatggacaagcgatgtgtcctgctgcgctacctcactcagcagtgggacaaaaagacgcttcagcggaagagggagcacggcggcgattcgggaaatggcaacggcaacagctccacgcccaacggcaacagcaccaacagcaaaaagcgcccgcgcttggaccccaacgagctgaactgagctgggcggcaggaccttaagccaagcacccgatggacatccccacgcagcactactatcccgagcgaacacgcagccgccaccattcatttacactcatatacatatatattaaataaaatatactaagtacaaaggagttgcagtcgaacggtcctttcaaagttttgtatcacgctgatcattggtcgaaagccccagtatttctttagatttcagttgtacccaaattaacacagctaaataatgtttttgtgaccaacatatgcatacctccttttgcaagaaaataccatcattcgtataaaatgtcgagtacaaaattttgtaagctttgttactgctagttcatgaatcacggtatttttttttccattctttggacttaccttaggaaaatatacatgtacttctcgcaaagtttgtaacctaaaatgtaatgcgtttataatctgggaattgatctgcataaccaattgtatacactattattgtaaattggcaatgaattattttggcagaaggaagatcgactgaattccagtacaacacatttataatagcacataatgtgagttccaatagatttacttttaaagacaaagattggatgtgatttgattacggtactctaagattagtggtgtcccaggtccttggggtcgggcttgccgtactgcttctcccaccaggtcacaaactccttcttgcgctgctcccgcttggcaaagtactcggggtactgggccttctccaggggatgccagtagtccaggacccagtcgggcggaatcacctctcgttcgaaagcacagccaccggcactgttggcaactacaacgataacacacgttagatacacagacatatgaccatacgttcaatttgtttacagtttcggggctggaaatgccttgtctcgaaaagctccctttgtccacaggctaggaggcggatgccctcgcccagatctttggagcggttttcgtcgaagcgagca

SEQ ID NO: 13967 - DNA, 1927 bp, DROSOPHILA
ggactcgatattattaaggaactgctggcgaacaatgagctcgagtccacgctaaagggctaattccatcggattgcatctactcctacagacaccataaaccagaaacaaatttttagctagatccttagactttttaatggtttaataaaggatttttgctacattctggtattattttattcatcgaaatttttaataacaattgtattaaagcaaatgtgctataggtcatccataagacatcttacacgggcttcaatggtgtcaccataaatgtttacaaacttaacgacataaatatagctagaaatttgtaagaacttttttatacaccagccctggtttatctggtattttgcgtaccttcattttgtaaacagctgtttcggcgtcggcatcttgcacattattttcgcaatattatttatattattgaaaatacccattaactataaacttatatccaaatctttaaatggctgagggtaataccgctggcggagaggaccaaaagctgacggacatctttctaaagggctggaacatattcgacgagctagaagttaccgaactgcccttcaatggcagcgaatttcagaacaaagtgaagactgcaatgggccttttcgagcaggccaccgtcattgtgaaccaggttagcatgttcagtgccaacgagttgatcgacgaggtgtccacggaatcgctaccattcatgctgctcccttactttctgggcaagcttaccactaagatcaacagccccaataacacacactccatagagctgggcgagatttacttcaaggaccacctgcagcgttgccaggagtatgatctctgtgcagcgcccaaatctcaggtggctaaggcggatagccaagcggaaaaaagcgagcagcgcgagctggtagaggcagccttcaatagaaacgacaaaatagcccagtatcgccggatgaaggagattgacgagtatatggccagaatgcgcgatgcagtcaagaacaaaacggtcgacgatgaggataaacgtgtctttttcctcaagtatttggacaagagtataatagactccaagcaggaattagaaacattgggcgtaatgaagcagctggcccagatgcgccttgcccgattggctggtggcgaatccgacaacgaagtggattcgttccgtccaccgaatcaaaatcaatcttctgcatcgtccacctcccgcggtcatggtcacagccacggacccggacaccaccaccatcatcagcaggccgctaagccaaagcccttgcagcccttcatcataacacgtaatgccacccagaaggcggttttcggcttgggataccccagtttgcccattatgactgttgatgaattctaccagcagcgcgtcgacgagggcatctttcctgatgaggagaaggttgccaagatgaatcaggcacaggccatcgcggccgcccgggatcccaacgaaaaagaggacgaggagaaggccgttgaggagctacaggcggagcaggatgatcccgagtatatagaccgcatgaggcgcatggatgaatacaaggatgtgcaacccaaaagcagaatgtcagtacgagactttatcaagggtctgcccatacacgattcgagcaattttacccatttgagcaacgaacatggaattcgaacgtcgcagaagcgtgcctccgtctacctgcccaccgaggatgagcattcagagcagctgatcgtgatggacaagcgatgtgtcctgctgcgctacctcactcagcagtgggacaaaaagacgcttcagcggaagagggagcacggcggcgattcgggaaatggcaacggcaacagctccacgcccaacggcaacagcaccaacagcaaaaagcgcccgcgcttggaccccaacgagctgaactga

SEQ ID NO: 13968 - protein, 482 aa, DROSOPHILA
MAEGNTAGGEDQKLTDIFLKGWNIFDELEVTELPFNGSEFQNKVKTAMGLFEQATVIVNQVSMFSANELIDEVSTESLPFMLLPYFLGKLTTKINSPNNTHSIELGEIYFKDHLQRCQEYDLCAAPKSQVAKADSQAEKSEQRELVEAAFNRNDKIAQYRRMKEIDEYMARMRDAVKNKTVDDEDKRVFFLKYLDKSIIDSKQELETLGVMKQLAQMRLARLAGGESDNEVDSFRPPNQNQSSASSTSRGHGHSHGPGHHHHHQQAAKPKPLQPFIITRNATQKAVFGLGYPSLPIMTVDEFYQQRVDEGIFPDEEKVAKMNQAQAIAAARDPNEKEDEEKAVEELQAEQDDPEYIDRMRRMDEYKDVQPKSRMSVRDFIKGLPIHDSSNFTHLSNEHGIRTSQKRASVYLPTEDEHSEQLIVMDKRCVLLRYLTQQWDKKTLQRKREHGGDSGNGNGNSSTPNGNSTNSKKRPRLDPNELN

SEQ ID NO: 13969 - DNA, 9548 bp, DROSOPHILA
ggtgaaaccgcgtaaacgatatatggttaaataaacgatttatagtctcaccttcaacaggaatgcggatatttttagtttgggtagcatatttctgataaatgtatgaaaataaaataaagtaacacggccacccacccgagtaaatgttgctcagctggcaattttttatcgataactgagtgtctgtatggtattttcctatcgacatacatatgtatatttattggaaagtttgaaaatgaattcaaataaattgtttggatagaaatgtatgcattgacattttggtaggattttaggttagagattcattggtttaattattaaaatgtgagccaacgttttatataatagtccattatttccaatatatatacatatgtatttgctgcgacagttttccatctgcacaactaattaaaaagttcattcaagtacacacacatataacatttatttaatatatattttatattgaattcggcatagtgtatagattcgcaaaaatgttataaacgcagcccaacaccgcgccactggctccatgactctcccatcgactatcatccatagtccacaattcgttaattctatcaatgttacacatttatatacagtacataattgcgtggtgcctcttatatttgcttcaactggaatatcgtgctccttctcgatttgctttcgtgcctactaatttacattaagagttttcaagcggttttgttttgtttgcctttagttaggacatctacaaactactaggctttagaattttctaattaatttcattgctaaattgtatgatttgcgcaaaaacagaagcttacttagagaaaaaaagtttaaaacgcaaccccccgctctacagatatatattgaattcctgcggccttccatttcctgcccaccatccgcgcccattctcatcacgaataactatttaatcgcgaaacttaaaacacaagcatccatatccaccgcggctactctggcgctacttcctctgcttggcagcagaagtggctgcagatcctcctgatccagaggatcctccaccggtcacagccgatgtatccttgcgtggtgctgtggagatggtcacgcttggactggcgggctttgtcgttgtcatcgaagttttacagccactgttgtggggcttagttttgggcgttccaggagttgtggttttacctaaaagtgaggaagcaaagaaatgttaagtatttgtttttttctttggcgttaaatccattaccctggtcgaccttcttgcttttgccagcaggctccatctctggctgctcagtggcctttacctttgtcggcttttccagggtttgagtgggcgaagatgaggattccccctccgcaaactcttcgatagcaggcataaatccctcggacacactgctgctgtcttgggtactagtgggcgaatccttctcctcggcaatacgcggtaaaggttcacaattggccagggtaaccacagcggtggcacttgggtcagttccggcagcggttgtggagaccactgttgccatagcagtttgtctttgagattcctcagaagcggcaggcaccaactgcaggggttgaactgaaggagcccccaaaactgctcctccagctcccgatgcactgccgccaggcgtcgacctccaagtcgtggtcaccactcgttggtgggtcggctgtttgataggcggcgaacagcatagtggcgatatctttgtctccgcgctacggggatgcaagcgatccggagacaaggcgcgccttagcagcggagaactaggttccgctgacttggttcgtgcaaatcctgccttcttcgtgtttgcgttcaccgccgtctgcaacgtgggcagcgtgcttcccggactataagattgtgtggtgtttgaggcaccgggctgatggcccaccaatggaaaggccaatggggagggagatcttgtgggtgacgatggcagcggtgacggtgaaggggttcgcgccaacggagacagtggaatgtgacccacagacttccgtcgattcggcaacgaattgttgttcgtggtatgcagagtcttcaggcctccggcgggattgttcgcattgcccccgcctgctattacggcggtggctgcatgcagcttgtgcttgagaccatgtagagtggatggacgctgatacagctgcggaacgactccagtgggagagactatacgaaataggtaaaaatattcaataaactgataatgcactgttgtggcttatcccattacccggtacatttccaacagaggtggggttgctgccaacgacggctcccacatggggcaggagcaccagctgcgtgggtggcggagcagaaggcaattgcacactgagggccgagggagcaactgcaacggatcctgcgttgccaccgtgattggagccacttgatccggtgggtgtgttaggcgaagaggatgagggcgacgtggattgcgatgaagagttcgctgccgactgacaacagctgctgtgataagaggaatccaaaggcgacaaatttctggccgatggtgtggtgggtgaactggtgccagctgagtactaaaattattcatattaggtagtaaacaagtttagctttagatatggtgcacatataaaggatcctacctgctgcatctctgcatttgcacgcttgctgcttatacggcgaaacagagacgtcttgcgcttcttgtcgtgctctcgctttgtctgcttcttttggcgattcacacccttcttggccagcttgctttgcatgagatcgcgcttgcggccaccgctctggatgctggtgtgctcgagaggagtggcccgcagggttacgtgttcgccaccactaagaagcagctgcagcacctgtgtgtggaacaggccttgtacagcctccccattaacatgagtgatgagatccgctggccgcagtcccgcctcaaaagctggactgccctcgtccacggccataaccaaatgatgcattgtatagaagtccgtgtcgccatagtatacacgaatggtatggacagtaaagccgaaaccacgcggaccacgacgtatgatgatcggaggctttagatttgtaaccaatggcgagagctctcggcaaggagaagtatccctagagctggccgtactggagccattgcctccaccacctggcgattgaatgccacacaattgcgcagccaattgactattgtccagagatgtcataagtgacagacccaaggcggatgcagatttaacaattgacctggaccgatgatgcttcacactgcttccgctagtgctgccgtccatggattttggttgatgctgcaaagccagcggagattgttctcttggcaagttcatgttctccgttgatgagctgcccgcggatatggtttcatcctctatcgagatggagaaacgcggcaaaatgtctctggcgcaaacaccctttcgtttccggttaatctgtggcgaaaaatcatcactgtccgtttgcgaactctctggtgtgctgcgcgaaaagctgcccaccgttgctgttggcggagtggccgccattgtcgcctgagtttgagttggtggcggagtggccggcgtactaatgatggtggttgtgttcggtggcatgctatgccgctgctgcattcgctgcgtggccccgggatttggttgctggagataatgcttcagcattcgcagctcagcatcgtttccaatagtcacattatgcaacagttcaggcaagtaatcggcatccggtgtggacggcaccttcaggcagctggaggagagctataagaaaatttttaatattaataaaaactcatcattttcaaataaagcccgtgtagaacgaatactcacatctagctttcgcaattgtggtgtgttcaagaatttgttgaccactccatcgtgtgaggcgctacccgaaccactaccactgccacttccactaccgcttcccattcctgatttaagtttaggtagagcgccagttgatgtggctcctacggttgctgcgggagtctcctgggcacgcgatggcagcgatgaaagtggtggtggacccgttggcttcgcgccatcggtagacgtgggagtggcatgccgcgaccagctataatgctgttttctatactgcggagtatacgaattgaaactgccaaagacgggagtgtcatccgtgtcatcggtatcttctccacctagatcatggttatagcgatccattcgggctgtcgaaaaaatatttatcaataggttgtttaaattattttaatatagcttatcgagcttactgtcaaaataactggtatcatcatcgtgggacaactgcggcacaaactctgccttctgccgcagaagagaattccaatccatgcccagaaagtattcgtgctccttcatctccagtgcacccgattgagtgcccagacgatcccgtggattctgctgcagcagctgcgagattatgtcctttgcctccgcttgaacaggccagtcttcactgtccggccactcgatgtcatcgttgacggtgtgcgcaaatagttcctcagtggtttcgccaaaaaacggcacacaaccgatgagaaattcatacagaatgatgcccatggaccaccagtcgactggtttgccatagccttggcgcaatatcacttcgggtgcaatatactcgggtgtgccgtacaccttaagagatagtacattaaaaaaaaacatgtttttttgtgaaaactgaagaatatttgcatacctgcttgtcggaaaactgcctcgtctccgagtcgatataaccctcatacaaattggtggccaaggacattagacccattttggagagcccaaaatctgttagttttatgtgacccaaggccgtgatcaaaaggttgtccggcttgaggtcgcgatgaacgatgccgtagctgtgcagatactctacggctaatactgtctcggcgaaatagaagcgggccatgtccgcgggcaggggcccgatgttcttcagcagcgttccgcagtcgccaccctccacgtactccatcaccaggcacaagtgcttcttggtctcaaacgaacagtacatgctgaccacaaagggattgtcggcgaacgaaagaatgtcacgctccgcaaacacctgctccacctggttgcgcaggatgagattatttttgttgattttcttcatggcaaagcgttgacgggtggtcttgtgcttcaccaggtagacggctccataagcaccatttgagatcagcttgacaatgtcaaaatcgttttcttggggtgagggttgttgggctccactgccagttgctgttgcagccgaacctccggttattccttcagctcctgccaccttcgaactcgatcctcctccaactgcactacttgatcctcccttctcctcattcatctggctaatagccagcgcaaacgagggtgccgtgtcacacgtagccactggcgtttgaggaggctgttgaggtgtcgctgtgccgcttcccgagtccatagctatggcatccaaggccaggctgctcaactgcttggctgcactggttaggggcgagttgagtagcaaactgccaccgggatgcagtggatccgcatccacggtgacttgctccgagcacatctgctgtgtttcccttaattcctgctgcagttcagcgattggatcacggtttaggcccagcttgtggatgatgtattgcggaatgtccgcctttatcacaggcattgccttggcatgtccttcagcagcctccagtagctcatagaattcttgcggatcgaattctaggcattccagcaatcgagctggtctcgaaataatcaacagcagctttttaatcacaccatttagttcagctgccgcctcgggagatttctcctttgtctccacaagcaaacgctccagattttcactcagctcataaaagtattgcgaggttatcaacttggcctccgatttgtgcaggcaatcccttgccatttccaatacttgatggtgcacaaagctgcaagtgaaaaacaaaaatagttttaaaggatctagaagggggatttgatatatgtataaagaaggaatctcgacaatatctactcaacatgattgaattgttgtagggtttaaactcaccgcactatcggctgcgagtccctaaagctattgcatgcagcactcttgttttcgttgatgaagagcttcagccgctcttccatttgctgtgtggccttgggaaaacgctccttgtacaaagtgttcatcacggcaatctcattgtccacgattggtgaacgcgatgggctggacagcgatcgggagcgcggacgaaaatagggcgacatccgaccaccaacttgcattgcactcgagcccgagctattcgcggatgaaccaccattagcagcaccaccacctgcttgctgaccaccacaggttacgctcagctcggcacagcaattaacgcaggccgctgtcatcgatttctggggctgcagctgcgttggcttcggtggctggggtgtcagttgcttctgggaaacggctagcaacagagcgcagtgcttggggcaatgctgtttgaggtgctcggcacagcaggcaccggcggccacggcagcggcatccgcctcctgcactccgggcggaatgttgtgcgccaactggttgagaccctcctgactcgagcactgagactgtgacacatgaaaccattaagattgcttaaataaatacatttggtttggattatcgaaaaaaaatcttaccgataaattggagctaccaggcgtggttccgtaacctgaagagggcagcgaggcgacggaccaacgacgtccatcggcgacaacgccccggcacgaggcgattcttttaatcggagcaaatgcaaatggcatgggtgaattgaggcgcggactatccacggggctggccgagtatggggaatgggttcgggatccgccagccgctgccacggcagccgagttggtgaccaaactaagacgatgatgggcaactccactggaggagccaccaccggagccagcacctcctccagctgaaccccgcatcacaacgccatgcaagtgatggtgatggtggtgtttggccaagccaatccctgcacagctgcccgaccgcgaaatgttgtgaccgcccaagggagaagccccaaagccaggtggctgtactggtaacggagcggtcagttcgtggcgaaaatagttgcccgtgaggcatggagctgacttccccaaggaggagtgacgcatacgcagcaagttggacgtttctgcaatgaacaattaatacgttttttgtattgatagttgacaattgattttaattgtaatagttggacaagaaaccataattctaactgttggagaagttgagtggacttaacatgacaatttttaaaagaaattcaataaatacgttttaatctgaacttgataactggttttatacgcttacaagggcagccagacaaacatgattaatacaaaaatataggtgtcaatttttgagtgctaattaagacagaactcacatcttactaaaaggataaaaatagcttgtaaatatgctacaaatataaataacaaagctaatattatcgttattgcggaaatatacatatgtatgcatatatactttcttttttttacgttaagtcatttcataaacaacatgaggtttttttatgtggatggcataatctcttaccgccgctgacagcgcgcagcgagttggtgtgctgctgataggagatcttccggagcagggcggtgtatcccctagagtgcaaagaactggagcttccgctcagaccgccggaggagctcttggtcaggttcaggttgcgcatcatcgaggagccgttggtgctgtcgttgccgatggataacttggccggtgaggtgggcagcagctccaatccgctgcacgacttgacgctgctgttgcaggacgacgatgctgccgcaagtgctgctgcagcggcagccgcctcctggtcggagtcgtcgaagatgagtacgcgtgccgagtagctcgattgcgggcgtatccgcgacagattggccgtgctcaagtgccgcttgggcaccggactgccgctcatggtggctgtggctgtggccgtggcgccactgctactctccgcggatgccgagtccgagatggacatggcctcgatctcgcttgccacgctctgattgataaactcctgctcctggtgctcatcgtttttttgcggcgttgaggtggatatcttgctgccaaggacagcactcactgagtggttggacgatgtcgatgatgatgacgatgcaactgggccggtggctccatcggctggacgggatgcagctccctcctggcgactcatgatcgtgctggcttcgcgttcgctctgatcttagcaggatcgcatgttgttatttgtctccggggctttgttgcttcgacttttgggcatggcgtcggcggctgcaataaaagcaattaattagcatacggctggcaaggcgcttcccagctctaagttctcagttctcagttaacagctcacttcctatcccatcccacaccataccatctccgacatccagacgctggcaattgcttccacacacaaacccctggctaattaatctcgttgggctgtcactttgcacgagcctaacagctaataattatatatgtataaatcggtcaaaacttggatcgaaatatactaatatgtagtacatactacacacattcgggaatatacgggaagcgatcgcccacttggttttgggtgatagtccagaaattccacaatgagcaagtgcctgctgaatggttgaatcacaatgctgtgcagtgacaagggtgacacggaaatctcttccaaccgaaaatcaagtaccgctgactcagagatctattttagttgactaagaagccattgttttgagtcaacaacctcacaaaatacaatgattctaccaatgctcatattctgcataaaaactaataattgtagatagaagccgcttgatcgtaccactttactaatagaaattcttaaattatcgaccaatatcaagctctaaattgtttggctgttcgtacattctattgaaatgactacaaaacacaattggaattgagaaatttcagaaagctaagtatcaacacagtttctaatttagatgaaacttttccaaatatttgtatagcgaatttgaccgctaggaaatttataaacacacatccatatgcttttatatgtttacaaatatacatggattcaataatagtttctcaagttcatactaatacatacataagtgttcaaaatttaaaaattccaaaagacattcaaattttttcaatactatgtgatgtgaaattatttcttttaaatctttgtgtgaaatttccacattctaagactttcaatcttgaaacatcattaagtacaacattgtgaaatgcattt

SEQ ID NO: 13970 - DNA, 6521 bp, DROSOPHILA
ccgccgacgccatgcccaaaagtcgaagcaacaaagccccggagacaaataacaacatgcgatcctgctaagatcagagcgaacgcgaagccagcacgatcatgagtcgccaggagggagctgcatcccgtccagccgatggagccaccggcccagttgcatcgtcatcatcatcgacatcgtccaaccactcagtgagtgctgtccttggcagcaagatatccacctcaacgccgcaaaaaaacgatgagcaccaggagcaggagtttatcaatcagagcgtggcaagcgagatcgaggccatgtccatctcggactcggcatccgcggagagtagcagtggcgccacggccacagccacagccaccatgagcggcagtccggtgcccaagcggcacttgagcacggccaatctgtcgcggatacgcccgcaatcgagctactcggcacgcgtactcatcttcgacgactccgaccaggaggcggctgccgctgcagcagcacttgcggcagcatcgtcgtcctgcaacagcagcgtcaagtcgtgcagcggattggagctgctgcccacctcaccggccaagttatccatcggcaacgacagcaccaacggctcctcgatgatgcgcaacctgaacctgaccaagagctcctccggcggtctgagcggaagctccagttctttgcactctaggggatacaccgccctgctccggaagatctcctatcagcagcacaccaactcgctgcgcgctgtcagcggcgaaacgtccaacttgctgcgtatgcgtcactcctccttggggaagtcagctccatgcctcacgggcaactattttcgccacgaactgaccgctccgttaccagtacagccacctggctttggggcttctcccttgggcggtcacaacatttcgcggtcgggcagctgtgcagggattggcttggccaaacaccaccatcaccatcacttgcatggcgttgtgatgcggggttcagctggaggaggtgctggctccggtggtggctcctccagtggagttgcccatcatcgtcttagtttggtcaccaactcggctgccgtggcagcggctggcggatcccgaacccattccccatactcggccagccccgtggatagtccgcgcctcaattcacccatgccatttgcatttgctccgattaaaagaatcgcctcgtgccggggcgttgtcgccgatggacgtcgttggtccgtcgcctcgctgccctcttcaggttacggaaccacgcctggtagctccaatttatcgtctcagtgctcgagtcaggagggtctcaaccagttggcgcacaacattccgcccggagtgcaggaggcggatgccgctgccgtggccgccggtgcctgctgtgccgagcacctcaaacagcattgccccaagcactgcgctctgttgctagccgtttcccagaagcaactgacaccccagccaccgaagccaacgcagctgcagccccagaaatcgatgacagcggcctgcgttaattgctgtgccgagctgagcgtaacctgtggtggtcagcaagcaggtggtggtgctgctaatggtggttcatccgcgaatagctcgggctcgagtgcaatgcaagttggtggtcggatgtcgccctattttcgtccgcgctcccgatcgctgtccagcccatcgcgttcaccaatcgtggacaatgagattgccgtgatgaacactttgtacaaggagcgttttcccaaggccacacagcaaatggaagagcggctgaagctcttcatcaacgaaaacaagagtgctgcatgcaatagctttagggactcgcagccgatagtgcgctttgtgcaccatcaagtattggaaatggcaagggattgcctgcacaaatcggaggccaagttgataacctcgcaatacttttatgagctgagtgaaaatctggagcgtttgcttgtggagacaaaggagaaatctcccgaggcggcagctgaactaaatggtgtgattaaaaagctgctgttgattatttcgagaccagctcgattgctggaatgcctagaattcgatccgcaagaattctatgagctactggaggctgctgaaggacatgccaaggcaatgcctgtgataaaggcggacattccgcaatacatcatccacaagctgggcctaaaccgtgatccaatcgctgaactgcagcaggaattaagggaaacacagcagatgtgctcggagcaagtcaccgtggatgcggatccactgcatcccggtggcagtttgctactcaactcgcccctaaccagtgcagccaagcagttgagcagcctggccttggatgccatagctatggactcgggaagcggcacagcgacacctcaacagcctcctcaaacgccagtggctacgtgtgacacggcaccctcgtttgcgctggctattagccagatgaatgaggagaagggaggatcaagtagtgcagttggaggaggatcgagttcgaaggtggcaggagctgaaggaataaccggaggttcggctgcaacagcaactggcagtggagcccaacaaccctcaccccaagaaaacgattttgacattgtcaagctgatctcaaatggtgcttatggagccgtctacctggtgaagcacaagaccacccgtcaacgctttgccatgaagaaaatcaacaaaaataatctcatcctgcgcaaccaggtggagcaggtgtttgcggagcgtgacattctttcgttcgccgacaatccctttgtggtcagcatgtactgttcgtttgagaccaagaagcacttgtgcctggtgatggagtacgtggagggtggcgactgcggaacgctgctgaagaacatcgggcccctgcccgcggacatggcccgcttctatttcgccgagacagtattagccgtagagtatctgcacagctacggcatcgttcatcgcgacctcaagccggacaaccttttgatcacggccttgggtcacataaaactaacagattttgggctctccaaaatgggtctaatgtccttggccaccaatttgtatgagggttatatcgactcggagacgaggcagttttccgacaagcaggtgtacggcacacccgagtatattgcacccgaagtgatattgcgccaaggctatggcaaaccagtcgactggtggtccatgggcatcattctgtatgaatttctcatcggttgtgtgccgttttttggcgaaaccactgaggaactatttgcgcacaccgtcaacgatgacatcgagtggccggacagtgaagactggcctgttcaagcggaggcaaaggacataatctcgcagctgctgcagcagaatccacgggatcgtctgggcactcaatcgggtgcactggagatgaaggagcacgaatactttctgggcatggattggaattctcttctgcggcagaaggcagagtttgtgccgcagttgtcccacgatgatgataccagttattttgacacccgaatggatcgctataaccatgatctaggtggagaagataccgatgacacggatgacactcccgtctttggcagtttcaattcgtatactccgcagtatagaaaacagcattatagctggtcgcggcatgccactcccacgtctaccgatggcgcgaagccaacgggtccaccaccactttcatcgctgccatcgcgtgcccaggagactcccgcagcaaccgtaggagccacatcaactggcgctctacctaaacttaaatcaggaatgggaagcggtagtggaagtggcagtggtagtggttcgggtagcgcctcacacgatggagtggtcaacaaattcttgaacacaccacaattgcgaaagctagatctctcctccagctgcctgaaggtgccgtccacaccggatgccgattacttgcctgaactgttgcataatgtgactattggaaacgatgctgagctgcgaatgctgaagcattatctccagcaaccaaatcccggggccacgcagcgaatgcagcagcggcatagcatgccaccgaacacaaccaccatcattagtacgccggccactccgccaccaactcaaactcaggcgacaatggcggccactccgccaacagcaacggtgggcagcttttcgcgcagcacaccagagagttcgcaaacggacagtgatgatttttcgccacagattaaccggaaacgaaagggtgtttgcgccagagacattttgccgcgtttctccatctcgatagaggatgaaaccatatccgcgggcagctcatcaacggagaacatgaacttgccaagagaacaatctccgctggctttgcagcatcaaccaaaatccatggacggcagcactagcggaagcagtgtgaagcatcatcggtccaggtcaattgttaaatctgcatccgccttgggtctgtcacttatgacatctctggacaatagtcaattggctgcgcaattgtgtggcattcaatcgccaggtggtggaggcaatggctccagtacggccagctctagggatacttctccttgccgagagctctcgccattggttacaaatctaaagcctccgatcatcatacgtcgtggtccgcgtggtttcggctttactgtccataccattcgtgtatactatggcgacacggacttctatacaatgcatcatttggttatggccgtggacgagggcagtccagcttttgaggcgggactgcggccagcggatctcatcactcatgttaatggggaggctgtacaaggcctgttccacacacaggtgctgcagctgcttcttagtggtggcgaacacgtaaccctgcgggccactcctctcgagcacaccagcatccagagcggtggccgcaagcgcgatctcatgcaaagcaagctggccaagaagggtgtgaatcgccaaaagaagcagacaaagcgagagcacgacaagaagcgcaagacgtctctgtttcgccgtataagcagcaagcgtgcaaatgcagagatgcagcagtactcagctggcaccagttcacccaccacaccatcggccagaaatttgtcgcctttggattcctcttatcacagcagctgttgtcagtcggcagcgaactcttcatcgcaatccacgtcgccctcatcctcttcgcctaacacacccaccggatcaagtggctccaatcacggtggcaacgcaggatccgttgcagttgctccctcggccctcagtgtgcaattgccttctgctccgccacccacgcagctggtgctcctgccccatgtgggagccgtcgttggcagcaaccccacctctgttggaaatgtaccggtctctcccactggagtcgttccgcagctgtatcagcgtccatccactctacatggtctcaagcacaagctgcatgcagccaccgccgtaatagcaggcgggggcaatgcgaacaatcccgccggaggcctgaagactctgcataccacgaacaacaattcgttgccgaatcgacggaagtctgtgggtcacattccactgtctccgttggcgcgaaccccttcaccgtcaccgctgccatcgtcacccacaagatctccctccccattggcctttccattggtgggccatcagcccggtgcctcaaacaccacacaatcttatagtccgggaagcacgctgcccacgttgcagacggcggtgaacgcaaacacgaagaaggcaggatttgcacgaaccaagtcagcggaacctagttctccgctgctaaggcgcgccttgtctccggatcgcttgcatccccgtagcgcggagacaaagatatcgccactatgctgttcgccgcctatcaaacagccgacccaccaacgagtggtgaccacgacttggaggtcgacgcctggcggcagtgcatcgggagctggaggagcagttttgggggctccttcagttcaacccctgcagttggtgcctgccgcttctgaggaatctcaaagacaaactgctatggcaacagtggtctccacaaccgctgccggaactgacccaagtgccaccgctgtggttaccctggccaattgtgaacctttaccgcgtattgccgaggagaaggattcgcccactagtacccaagacagcagcagtgtgtccgagggatttatgcctgctatcgaagagtttgcggagggggaatcctcatcttcgcccactcaaaccctggaaaagccgacaaaggtaaaggccactgagcagccagagatggagcctgctggcaaaagcaagaaggtcgaccagggtaaaaccacaactcctggaacgcccaaaactaagccccacaacagtggctgtaaaacttcgatgacaacgacaaagcccgccagtccaagcgtgaccatctccacagcaccacgcaaggatacatcggctgtgaccggtggaggatcctctggatcaggaggatctgcagccacttctgctgccaagcagaggaagtag

SEQ ID NO: 13971 - protein, 2139 aa, DROSOPHILA
MSRQEGAASRPADGATGPVASSSSSTSSNHSVSAVLGSKISTSTPQKNDEHQEQEFINQSVASEIEAMSISDSASAESSSGATATATATMSGSPVPKRHLSTANLSRIRPQSSYSARVLIFDDSDQEAAAAAAALAAASSSCNSSVKSCSGLELLPTSPAKLSIGNDSTNGSSMMRNLNLTKSSSGGLSGSSSSLHSRGYTALLRKISYQQHTNSLRAVSGETSNLLRMRHSSLGKSAPCLTGNYFRHELTAPLPVQPPGFGASPLGGHNISRSGSCAGIGLAKHHHHHHLHGVVMRGSAGGGAGSGGGSSSGVAHHRLSLVTNSAAVAAAGGSRTHSPYSASPVDSPRLNSPMPFAFAPIKRIASCRGVVADGRRWSVASLPSSGYGTTPGSSNLSSQCSSQEGLNQLAHNIPPGVQEADAAAVAAGACCAEHLKQHCPKHCALLLAVSQKQLTPQPPKPTQLQPQKSMTAACVNCCAELSVTCGGQQAGGGAANGGSSANSSGSSAMQVGGRMSPYFRPRSRSLSSPSRSPIVDNEIAVMNTLYKERFPKATQQMEERLKLFINENKSAACNSFRDSQPIVRFVHHQVLEMARDCLHKSEAKLITSQYFYELSENLERLLVETKEKSPEAAAELNGVIKKLLLIISRPARLLECLEFDPQEFYELLEAAEGHAKAMPVIKADIPQYIIHKLGLNRDPIAELQQELRETQQMCSEQVTVDADPLHPGGSLLLNSPLTSAAKQLSSLALDAIAMDSGSGTATPQQPPQTPVATCDTAPSFALAISQMNEEKGGSSSAVGGGSSSKVAGAEGITGGSAATATGSGAQQPSPQENDFDIVKLISNGAYGAVYLVKHKTTRQRFAMKKINKNNLILRNQVEQVFAERDILSFADNPFVVSMYCSFETKKHLCLVMEYVEGGDCGTLLKNIGPLPADMARFYFAETVLAVEYLHSYGIVHRDLKPDNLLITALGHIKLTDFGLSKMGLMSLATNLYEGYIDSETRQFSDKQVYGTPEYIAPEVILRQGYGKPVDWWSMGIILYEFLIGCVPFFGETTEELFAHTVNDDIEWPDSEDWPVQAEAKDIISQLLQQNPRDRLGTQSGALEMKEHEYFLGMDWNSLLRQKAEFVPQLSHDDDTSYFDTRMDRYNHDLGGEDTDDTDDTPVFGSFNSYTPQYRKQHYSWSRHATPTSTDGAKPTGPPPLSSLPSRAQETPAATVGATSTGALPKLKSGMGSGSGSGSGSGSGSASHDGVVNKFLNTPQLRKLDLSSSCLKVPSTPDADYLPELLHNVTIGNDAELRMLKHYLQQPNPGATQRMQQRHSMPPNTTTIISTPATPPPTQTQATMAATPPTATVGSFSRSTPESSQTDSDDFSPQINRKRKGVCARDILPRFSISIEDETISAGSSSTENMNLPREQSPLALQHQPKSMDGSTSGSSVKHHRSRSIVKSASALGLSLMTSLDNSQLAAQLCGIQSPGGGGNGSSTASSRDTSPCRELSPLVTNLKPPIIIRRGPRGFGFTVHTIRVYYGDTDFYTMHHLVMAVDEGSPAFEAGLRPADLITHVNGEAVQGLFHTQVLQLLLSGGEHVTLRATPLEHTSIQSGGRKRDLMQSKLAKKGVNRQKKQTKREHDKKRKTSLFRRISSKRANAEMQQYSAGTSSPTTPSARNLSPLDSSYHSSCCQSAANSSSQSTSPSSSSPNTPTGSSGSNHGGNAGSVAVAPSALSVQLPSAPPPTQLVLLPHVGAVVGSNPTSVGNVPVSPTGVVPQLYQRPSTLHGLKHKLHAATAVIAGGGNANNPAGGLKTLHTTNNNSLPNRRKSVGHIPLSPLARTPSPSPLPSSPTRSPSPLAFPLVGHQPGASNTTQSYSPGSTLPTLQTAVNANTKKAGFARTKSAEPSSPLLRRALSPDRLHPRSAETKISPLCCSPPIKQPTHQRVVTTTWRSTPGGSASGAGGAVLGAPSVQPLQLVPAASEESQRQTAMATVVSTTAAGTDPSATAVVTLANCEPLPRIAEEKDSPTSTQDSSSVSEGFMPAIEEFAEGESSSSPTQTLEKPTKVKATEQPEMEPAGKSKKVDQGKTTTPGTPKTKPHNSGCKTSMTTTKPASPSVTISTAPRKDTSAVTGGGSSGSGGSAATSAAKQRK

SEQ ID NO: 13972 - DNA, 3528 bp, DROSOPHILA
tcttggctccaacaaatcgttttgcaacatgagagaacattacacgtaagagccagcaacccaaggcggccaacaaaagacccgcagcataaaagtcgcaaaaagttggccaactacaaaattatggctggggacatctgcgatgtgggtatcctgtgagtgaggggagggggggggggggtgtccaactctgactgtaggtggagtacagcatatgtatgttttaagtgctcgactttggctaaggcagagtaattgtgtggcttaaagctaaaatcttattcttatgatgagcgtattaacttatcttagaaaactcaaaatcaatccaattaactaagtttataatatattatttttggcactaatcacttatgcttgaaaacattgaccacaattttggagtttaattgactaagattttaaacaagtttttttatttatttattatgatagatagaatagtttacaaaactagtagtagtgtcataagtagtgtctcaaaaaaatatatcgcgtaaataaggataagtaagtattttttatattgatattccatttgagtgttcaattaacgttaatccattttcaatttcaaccgccgacattgaagcgaacaagtactaaataaatggttactgtcctcgctttagcttagcccagttctgctccgtgttcgggtacgcgctaaacatagtagtgacgcgcaccaaatatctattacattcgacacgtgttttaaacgtgtatattcgtgtatgtaaaattgttgatactatcgtgtagaatatttgcatgtacgtttagaatctaaagttatatcttatctataagttcttatttgtcttttattagttttatcttctcgtgtgcaaatggaatatgaagcaaatccataataaacgaatgctttgccaaatccattattttcaggagtttatttatcttataacttttatcatatacaacaaacaaaaatacagcgtatacaaggtattaactagacattcgcaatgttgctaattattttctgaaatatctgcacaccgcgcaaatagatatccgcctgaatgaactcatcgtgatcgtggagcaatacaggtgtattattcatgggtgagaagcccaaagctgggatgccaacggcacgaatgtatctgctatcagttcctccggtaaatatttgcggtttgatggatatgtgcctgaaagattaatgatatgttaagataatcagaggtcttttaagttagaagcgcttacatctcatcggtagctttcttgaaagcaagccagaagggattactcccatcgatggcggtgggcgggactttaggttgcttctgttcgtaagtgatctcgatgccaccacccacgtcggcacaccatttgtggagctataaatatgccagtatcttagtttacgcaacatttaggatgaatacagcacctacgttagcctcaaactcctcaaagtccacatctagagccaaacgacaatcgaagcagaccattagcaagggaggcaccacattgctctgaactccgccaccgagtttggtcaaattaatggtcgttacatcgccaatgaccaactctggattattctgcaatctttgaacctgactcctacgaaactccatcatctttccgactatatagttcagtttttcaccagcagtattgggcagcaaaagcgatccatgaccagcagtcccactgatgttgaaatatacacctgtttgaaatggtaagtatatatatagcaagggacttaaatttaaaatttaatttaaatttacgccaaactgctcgttctgcatagaaaagaggcagctgctcatcgggtgaagccaatccctcgtccattgcaaatcccacattaagagcacggaaatcttcagttggcacaaaaggtctcatgccataacgaccgcccatttcctcatctaagtgaatgaaatattttaaatgttgtatgatagaatagtaacttagaaagtaactgacccgccacaaaggaaatgtggatagttcgtttgaatttcgctccacttctcttgagcgctctaactgcggctagatgctgcattcccacggacttcatatcttgtgttcccctggcaaaaatgcgaccctcctcatcgatgtcggctccaaatggcgggtgagtccagttttctggaaatacgggaaccacgtccatgtgggagttcagcagaatgctgggcaactcgggattgagtcccttccatgtcaaaaccactacgggattctgttcatttgccgggtaatacaccttcattggcagatccatcagatttgcctgtcgtctgagaaattcgacgcatggtgctgtagaggtaagtgtaagtatctttaaaattgtcacttcatttttctaaaatatactatcgttcagatactaaccatagtccggatcgggatggacacttgggatgcgcagatactcgcgaaagtactgtatctcctcatcggattcccacttgctggtggccatttcacttctatatacgatcttttgcggctgacagctggcagcatactgagttgtgttagctagtgtccgagtcgagttccagtgccctactactaatagacttatctctcacgatcgtaacgccaacgcgcgacccgcgaggtggcggacacagataattttatcaaattgtaaacgagaacttcggatggtgaaaaaactcgtttacgtcacagtagcggaggggatcacttgttttaatcaacaacagcaatcagtgattggacatcactgtggaaaactaattcttatatttcatacaaaaaacatttccagcaatataaggcttagcttttatatgtaatatttgacacaataatccaggggacttttttcaactttattgtgtttttactgtatcaatttgaccgtggtctccccttctactctctattatagtttaaatttgattcgtagatttgttataaggtcggtcgttcgccccttgctatctgttcccatcaactgcttgcttactggctcgagcccgaagtactgctttaaattcaaatttccagcactgcttgactactgcttgggaccagtttaaattcagattttaatacagtaggaagtttattctttacatttacaattacatcatacatcttggcgtgtacaacaaaacttaaagagtcactagagtcttatatgcgaaaataccgaataacgatctccaccagacccttaggccttgcgttcgaagaggacagggaatggcttatccttcggcgcctgcagccaattgtcctccgaatacttgacgttgttctcagtctcgatgacgtggaaagtgtaggcgtggcgactcttttgcgagcgattcggctcactcttgtgcaccacatttccgtggattagaatgcaggtgcctggaaaaattaagtagaacatatgttataatgattttagagtatttaaacgttttatggaaaaaccacgaatataactctttagggaaccagacc

SEQ ID NO: 13973 - DNA, 1213 bp, DROSOPHILA
aagtgaaatggccaccagcaagtgggaatccgatgaggagatacagtactttcgcgagtatctgcgcatcccaagtgtccatcccgatccggactatgcaccatgcgtcgaatttctcagacgacaggcaaatctgatggatctgccaatgaaggtgtattacccggcaaatgaacagaatcccgtagtggttttgacatggaagggactcaatcccgagttgcccagcattctgctgaactcccacatggacgtggttcccgtatttccagaaaactggactcacccgccatttggagccgacatcgatgaggagggtcgcatttttgccaggggaacacaagatatgaagtccgtgggaatgcagcatctagccgcagttagagcgctcaagagaagtggagcgaaattcaaacgaactatccacatttcctttgtggcggatgaggaaatgggcggtcgttatggcatgagaccttttgtgccaactgaagatttccgtgctcttaatgtgggatttgcaatggacgagggattggcttcacccgatgagcagctgcctcttttctatgcagaacgagcagtttggcgtgtatatttcaacatcagtgggactgctggtcatggatcgcttttgctgcccaatactgctggtgaaaaactgaactatatagtcggaaagatgatggagtttcgtaggagtcaggttcaaagattgcagaataatccagagttggtcattggcgatgtaacgaccattaatttgaccaaactcggtggcggagttcagagcaatgtggtgcctcccttgctaatggtctgcttcgattgtcgtttggctctagatgtggactttgaggagtttgaggctaacctccacaaatggtgtgccgacgtgggtggtggcatcgagatcacttacgaacagaagcaacctaaagtcccgcccaccgccatcgatgggagtaatcccttctggcttgctttcaagaaagctaccgatgagatgcacatatccatcaaaccgcaaatatttaccggaggaactgatagcagatacattcgtgccgttggcatcccagctttgggcttctcacccatgaataatacacctgtattgctccacgatcacgatgagttcattcaggcggatatctatttgcgcggtgtgcagatatttcagaaaataattagcaacattgcgaatgtctag

SEQ ID NO: 13974 - protein, 401 aa, DROSOPHILA
MATSKWESDEEIQYFREYLRIPSVHPDPDYAPCVEFLRRQANLMDLPMKVYYPANEQNPVVVLTWKGLNPELPSILLNSHMDVVPVFPENWTHPPFGADIDEEGRIFARGTQDMKSVGMQHLAAVRALKRSGAKFKRTIHISFVADEEMGGRYGMRPFVPTEDFRALNVGFAMDEGLASPDEQLPLFYAERAVWRVYFNISGTAGHGSLLLPNTAGEKLNYIVGKMMEFRRSQVQRLQNNPELVIGDVTTINLTKLGGGVQSNVVPPLLMVCFDCRLALDVDFEEFEANLHKWCADVGGGIEITYEQKQPKVPPTAIDGSNPFWLAFKKATDEMHISIKPQIFTGGTDSRYIRAVGIPALGFSPMNNTPVLLHDHDEFIQADIYLRGVQIFQKIISNIANV

SEQ ID NO: 13975 - DNA, 3203 bp, DROSOPHILA
ttctataggtgcaaataatgcatatatttgtaaaatcaagcttaaatatccaatgaacgcaagatttgataagtaaattccacacatgtataacttacatttctaaactatcagaatattcttaagatgataagaaaattcattaaaaacaaatatatacaaagtaatcaaaggttttagcccatttattgtagtataaaaacaaagtagtttatcttaaccagatttcactgttttgcttaataaccatatttttgatgacacacactcataatttctttgtcatttcagattgctgtgggcgtgggccttatattgaatggccagtataacatcaaaaacggtcacgatatctgccgggcgaacaggatcaataattatacagttagcggcatttttatagtcactgtggtcaatgttctaatatcagcctttactgtggacagagatactgtgcctgctttacccgccaatacaacatagtttaacttgtattttaaatagactttagtattatgaacacacagatgcatctttagataatactcacattgttcaaaccttgttaaatttcactcagcgactcatttttctaaacgcaacaatgaattgtgataaataaaatcccacgagcatttctcgcttatttaaataactgaaatgctgtttttcttacttttgggcgttttaagtaagaaatgaataaactttcttaaatgttataagatacgttcacattaatattaaatacttataaaccagttgttctttggatattctttgttattaatattaaattctaataactcaaatgcaattctatttatactatttaaatcaatttttggcgccaaactatcgtttagttgcgatagtttacgtagtggcatttcacagcactgtgttatagcctcgacacttcacagcactgggcaacagctgttacaaaataaagtcgtgcggaaaattaagcattttcggctaaaagtctattgcaaacatggccaagatcattaaggcggtaagttcaaggaactcaagtgaagcacctgctcgagaacctacaaaagagaaatgaccgactaatccccgcttgagtttcgcggcgtttcttcaattgttattgttatgtcatcgcttccttctgcagtccacaggtttgactggactcgccgtgtccaccaatccacaccacacgctgagtgctctgtatggcaagattctgcgggcggtgtccaagatgccacaggacgccagctaccgcaagtacacggagcaactggtcaagcagcgcgccgattctgtggcccaagtaagattatttggaaactttgctaatttgggtttaccaagtggatggtaccttcatcaaagcatatgtagcacctatatagaccgtgcaaccaagatacagatccttacacttgttatttgtattaaagactgttattttcttgatcatcctccaatttccttttttttaatacaatctctaactttctcacccgcagcacaaggacatcactgccctggaaaaggccgtcggttgcggtcaagtggaggagctaattgtccaggccgagaacgagctgatccttgcgcgcaaaatgctcggctggaagccctgggagaagttggtccaagccgcgcctgccaagcagtgggactggccaccagcccagatcatggagcccaaggtttagattcacacttagtactaattaatctacagcaaatcgaaatgagaagagagcaataaatccgttgataagccagtggctttatcagctaaaaaataattgagctttaatcaaatgaataaacctggaacagcaccacaagatcagccacattcaagcaatcgatccactgacgatctcagttcgttttcaacatgcgtgcgcttcagtaccttctgctactgctcgtcatctccatcggcttggcggcatcggtgcctcgccagcgtcgtcagatcgatctcacggtttcggcggagcacgacgacaacgatgaggagacggaactggctctggaggccatcgccgggctatggagcagtgcggacagtcggacgaagatcgatggctctgccagcctggtgcatcgaacacatggaacacaatcgggtacgggcagcaccagataccaggccaaactgcatctacaccatgactataagaccaatgcgtatccctcgtaatccaaggttcggagcaggactttcgcgtgggcgtgcgtattacattcgacaaatagagccgtgagaattccagacatcagcaggcgggcggccggggacaaaatcgagcgattgcgtgaggagacagacggccactgtataaacaatcccactgacgatagataacattttgaccttctcgggcttggctttgttggaaatatatatagaacgtttgtgaaaatacaatatacccgcataatgttcgctttattgattccattttaatcgccctctccggttttctcgaccgtgaagcggcgcgcaacaaatttcagcttaaaattacaactagaacaacgaatttgcacaacaatgatgaggtggacaggaggagagtatataataaatacaagccatttcttaagtataaatgccattagtcaaagtggtttgcagggtgggggctccaggcatcggggtcacgaaaagtaatctatggtctactttcattggaaacattgggtcaagttcgctggctaagcaattgtttactaacaatattctgctgctgacaaagtatttttcacaatataagcaaagtttgtcctagaattcaaaaatagtctgcttctacataaaactaaaatcttgatattgctcttatatatgcgattattgaatggagagtattatttctattttatttaagaaaactattagttaaaatatgaagtttgatattctgtatcttcggaaagtttttaagtttctcttataagctaaattctttacaatatgcataaagagtacctggttttcctatagcttcctgccgtttccaatgataagttttctataatttacttttcctgtcgtcgatcagttcacaaacaatttctacccccaccccattgaggttaatatcattctacattcgtccgcaaaatgcttcgccttaattcaagttaactgatactccctgcttctgctgctccttgagttcctggacgacaaagtt

SEQ ID NO: 13976 - DNA, 690 bp, DROSOPHILA
atggccaagatcattaaggcgtccacaggtttgactggactcgccgtgtccaccaatccacaccacacgctgagtgctctgtatggcaagattctgcgggcggtgtccaagatgccacaggacgccagctaccgcaagtacacggagcaactggtcaagcagcgcgccgattctgtggcccaacacaaggacatcactgccctggaaaaggccgtcggttgcggtcaagtggaggagctaattgtccaggccgagaacgagctgatccttgcgcgcaaaatgctcggctggaagccctgggagaagttggtccaagccgcgcctgccaagcagtgggactggccaccagcccagatcatggagcccaagttcgttttcaacatgcgtgcgcttcagtaccttctgctactgctcgtcatctccatcggcttggcggcatcggtgcctcgccagcgtcgtcagatcgatctcacggtttcggcggagcacgacgacaacgatgaggagacggaactggctctggaggccatcgccgggctatggagcagtgcggacagtcggacgaagatcgatggctctgccagcctggtgcatcgaacacatggaacacaatcgggtacgggcagcaccagataccaggccaaactgcatctacaccatgactataagaccaatgcgtatccctcgtaa

SEQ ID NO: 13977 - protein, 229 aa, DROSOPHILA
MAKIIKASTGLTGLAVSTNPHHTLSALYGKILRAVSKMPQDASYRKYTEQLVKQRADSVAQHKDITALEKAVGCGQVEELIVQAENELILARKMLGWKPWEKLVQAAPAKQWDWPPAQIMEPKFVFNMRALQYLLLLLVISIGLAASVPRQRRQIDLTVSAEHDDNDEETELALEAIAGLWSSADSRTKIDGSASLVHRTHGTQSGTGSTRYQAKLHLHHDYKTNAYPS

SEQ ID NO: 13978 - DNA, 2759 bp, DROSOPHILA
gaataccaacggcgtgaatgaccacgcacatgttcgggatccttgcagcagatcaatatttgatccccgaacctacatatgtaaatgggttacaggccctttgacccgctatgcgggtcattagcgaagcgatcccgactggctgtcagtcatcgcacctcaactcatcatctggagactgtccagaaccggttcgtaatcgccggccgtcttctgctacttcttgggcgataaggtcatcaaagccggggatattcgactgctcaaagttctcacacgctcgtctaatttatgcaaggacattgcagaaggacactgcgatgcgactgcgatgcgaatgcgattgctgttgctattcctattgcttttgtggcgtgagttcccaaaggacaaccggtctgaccggtccagccgggtccgaatccgaagccgtgtcttcggtgaccacgatccactgtgagaacttccattagatggcctttgtcagcaactgcccgaacgggttgtctttagatctgccttttgggtgttgtcactgggttcttggtccgcgtcctttctgaactttgccaattgctcggggggttaggacattgatttatacgcaaataaaatttgtttaccttcgagttggcagacatcggtgtgacctcaatttggggagtctaagatattaaggttaacaaaaaccggaaagaagtattggaaggagtttcaagagcaaagggatttgtattactcaatcattggtggagtattgaccaaaaacgaacttatcacttagcctcacacaaaaatattccatgacacatttcatgttttttgaaacttttaatttaatattctaaacaagaaagtcgaacctaaatgaatgatataaaatagaataatgttataatctcgtgccaatcgagtctcggcatatttacaaactacatggacttgcggaactttcaagagtgtttcgacaagagtcatcgatcttggatggtcgaatcacctactggtactggtggtactgtggctgctgctgttgctgctggtgctgatactgctgcttgctgggcccggagctgtactcctgctgggccttgtgccctccagcgcggagcaactgcgtcggcggcgggggagtggggatcttcaccacgatgtcggtgggctcgcgaatgacctcggccttgaatccctcctttggatcagccgtgtacttgacggtgcggatgaagccatcggagtccaccaccgagtagctacccttgatcaccgaaccgtcgcgaatctccttgcggttctggtagttggtaaactcgtcgtccttcacatcgaatccaaactggtacgaggagttttgctaaaaaacattgttagttaggcattagttgggagatgaggctataactaaatctattacttaatatgatttatgagtaattagtaatataattgcaaatgcttttagcacttgtatgatattaatctcttgaaaggcacttaaatttttttaatttctaaattaaatgtgataaaaagttatgatatatttacagaaagatatgggtgccagtgaaaactaattaaattgtgcaatgaaaatagtatcgattccaatacacttttgcaaagaaataaaatcagattgggcactttgtgaatggggtggggctcgatggggactttaaatgcgtactacaacctggtgctgacccacttttgaggctggcccaaaaaacgtgtccagacgctggtgttgcgtcatcgccccaaggcacattcgcgtaggctgtgcaactccaaactcccaatcccagatcacgcacaagtgaaagtaatttggagccgcttgcatattttaatggtccgatcgcacggaatcaaagtgccggttcgttgcagcggctgcggatcacacgatcgatccgttgactgcggattatgtttatgcaaccaggcgatcgaagcaccaccacccataaaaacctcgaggcgttggataatttatgcacaaggttggtgcgatttccccctagttcttgtgaggatccaatggcagcaagaccttcgattggccaagacaatcggatctaagattgctggcaactgggttaaggtaacaagaagatcgtggctttagagcgtggccacaaatcgattcctcgttcttttattttaggtagccttttaggcctgacgtggaccaaaaaaacaaagagcttaaatgcccacagaactgcaggccaaaaattggaaaggcaaagccagtttgcaagccggttctaatgcgtgccatgtccattggagctcattgttgtgggaattgggctcggagttgcagatcttatggtcacggagtggggattggggtaaatgggtcgcatttgaaagtgattgtctggcggagacattaagcggtaaattgcaatcacttgtaatgattaatataatagctcttacaaatttgacaatgctaagatgtgttttaatcattacatgtgccgccacatgatgttttccattttcctagtgtctactaatttcttttgcattttagttttaggatgatgaaataccaaattaattgtcatgtaacttttttttttttttgacaaaacccatcaaatcctgtttgggccatcaattttaagtggctaataggatgacacaccaactgagcaccttaaccccatctcgttggcttgccgccgcattaagcctgatggattatggtcactttggtaacggatattcgccagcttccg

SEQ ID NO: 13979 - DNA, 423 bp, DROSOPHILA
atgacgcaacaccagcgtctggacacgttttttgggccagcctcaaaagtgggtcagcaccaggttgtacaaaactcctcgtaccagtttggattcgatgtgaaggacgacgagtttaccaactaccagaaccgcaaggagattcgcgacggttcggtgatcaagggtagctactcggtggtggactccgatggcttcatccgcaccgtcaagtacacggctgatccaaaggagggattcaaggccgaggtcattcgcgagcccaccgacatcgtggtgaagatccccactcccccgccgccgacgcagttgctccgcgctggagggcacaaggcccagcaggagtacagctccgggcccagcaagcagcagtatcagcaccagcagcaacagcagcagccacagtaccaccagtaccagtag

SEQ ID NO: 13980 - protein, 140 aa, DROSOPHILA
MTQHQRLDTFFGPASKVGQHQVVQNSSYQFGFDVKDDEFTNYQNRKEIRDGSVIKGSYSVVDSDGFIRTVKYTADPKEGFKAEVIREPTDIVVKIPTPPPPTQLLRAGGHKAQQEYSSGPSKQQYQHQQQQQQPQYHQYQ

SEQ ID NO: 13981 - DNA, 4016 bp, DROSOPHILA
tcaaaagcagcactcatacgccctgtgcgccatctgcattaacatatcattagtgcgtgcgtgtgtttggctgtttatcgacgcttttgtttacagcaaagcgtaatcatgtgttacaaataccaataatacagcctatgggccctgggccttggtaaccctatagccatagaagcatccagcatgggcgtcgcacccacttcaatgtcagttcatgaatgcataatgagccctagagctccacaaatcgtgtctccgcactccgtcctcaagtgcactttgccggagatccagtctcccggtctggagtcgtgtaaacatcccatttttgtgtccaaatggcgctccagttggcgctgccattgcaggaagccaatgtctttggggtcaacttgtttgtgcgaaatttaaaattggaacgaaaataaatgaatacagccgggatcatcatgtgcatactttggtgttcaaatctgttgatatagatagatcagaattgatttgaaatcacaaaaattgacctgacattcaaattttattggttcttgatgatttggtaagatcatactctagcagagtatgatacaattgggctttctaaagccctggaaacattatgatgatgttgaaatgccattaaatctacggtgagtggactttatcgttttttttccgttggcttttgcatttttgcttaattcgtgaagaacacttggctcggcactcaggcgccttaagtagaaccaaccaatttggattcattaaatacttaagtagaagctcaagtgccacgtcttaagtgttgggctataattgcaaaaatatgtaaaaagaacaaagtgcagatcaagtatttataaagaactttatagaaatctccatatggtgttgatttttgtttaaaattttcaatatacagaattttttgggctttattctttatcaattatttttacctttcatgctaactatttggtcttctccatcgttaatccacgcatcacataagtttctaagataatattgggttatatatagcactcaacccatttgtagttttcattcagttttcgcctctttcttctgtgctcgaattcctctaaaagatttataatttcgacttacagcatacaaggtcaaaagtggtaatagagtaatagccagaataattgctgatacatccagaagatagaactggtaccagggcagatgcactcctgctgccaccaaatgtggcgctccccgatgttctacgacataattaatccaatacatcgcggtgtccattgcgccgagtggacgatcccggaaaattcgcgatgctttcatcatattggcttgatatttgggatctttcaagagcgcatgaagcgcagacttaagttgatctttcgaaatggtgcgatagtccaagccaatggcatatcccgctgcttggcccgccttaatgtttatatcctgatcgaaatagaatggcattccaagcaccgggaccgcatggtaaactgcctcctgcattccaaacagtcctccatgggcgatgaaaaccttcacattcggatgtgccaatatgtcagcctggggtaaccacttttcgacctttacgttgtccggaagattgggcagctgatcatcctcgaatttccaaaggaccctttgcttcaagctggcgaagacgtcaaggaaaatttgaagcttttccgctggcatgtcagcactgcgcacttgagatcctgaatttgacagagatttcttttacttcgatttaattcaataatacatattctaaatcagttaaaatccctgaatttttttagataagcttattttacaacactctatgtaaactcacccaaactaaagtagatcgcaccgtgctcagcgttatccagatagtttttaatatgttctggtaggggtttgggtggcaggatgtgcagtccacccaccgaaatcatattctgggacatgggtcttggcgaagtcagcggcatgtagctatttaaaagaataaccgagatgttctgttccaattgcttgaccgttggcacccgaggcagtaagctactaaaatgcttcctgatgacggcatcctgttgcggatagtaggatacttcccggacaacatcctcagccgtgctaatcactacattttccaatcgctcccacaaggacattctatccgtacaggacaaaaaaacattgggaacgtaggacaatggattcacaaaaccgaagacttgactaaaatagtttgcgtatgcaaaagtagctatggtaattgcaggtatttcgtaaatgtaacccaacattagagctccctcattgtggaactgttccacaaggagcagatcgaatttccccttcttatccttggcatagatcaactcctgaacttcgggatgggccagagcaaagtccgttgacttgatgccaatgtgttgggccagtcgcatgtgtgttagctttgacatgtcaatcatatccagtgccgattttgttttcatcatcgcagatactgtggaattaggccatcaaatttgaactcaagaaataataaactcacttactgtccgcccaggtatcgtacttgggcaaaagtatttccctgtagttcggccccaagttttccttggccaatgatagcggtgtgatgaaggtgacctcatgtccacgtttcactaattcccttataatggcatccgtcatcataaagtggctctttacaggcaggaagaatggtgccaaaattcgtgctccatctccagtgcccaaaaggcatacgaagagcaacttcataaagagtatctgcggtttaaaaatatatatgtcatgttattaattaatccgatgctccagtgcttgattatttaatagagttcaggtcgactctttatctttgaacgcgaaacacaccattgtattaagatttaaaagatgtctcttaagttctcgggagtcacaggtacactgaactgaaagcaatcttaccagtggttttattatatatgttctgttatctgtcatccagttatccagttgcagaccatagtaactatagcaataaatgatcgcatatcagtagacgccattctgtctagtgacgaagagcactgagcgtgtaaggaagataatattcatctaatccatctaaatgaggtacaaccacaaggggcactacagtttaacattccgcttatagagaatatttggaataccatttttgcttaaaaaaaaaaatgaaacggatttcgtcacaaaataaaataagtaaaggcgcgatcatcaccccctttctgagaggcgttttggtttagcctattttaggaaatttctttatgtaggtagatgtcatctactgtgataagagttcatttaagttacctatcagttggtgaatgctgtggttgaagataagcagcagacgaatgaacttgataaaatcaatgtttgtttacacatcttaatcataatctatggtctttgacgataaacatttgtttaaatgaatgcacatgttgaagatattaaattatttgttttccgcaaaaaaagtatgtatataaatttttaatatgatcaaaagtatctcatagtgtgctgatttcaaaactttcctccacgattttatgttgtacttcccaaagtgatcaagttgaacgatgggaaatagcgcataaatcagaggcattaggataaattaaatatttgcctcccggttgccagccagccgaatgtgtggtaaattatggcgctaaactgaaagattgcagcatcccttgtaaactttccgaatcgacagcatatgcaaatttaaatggttaagttgccataagactcaacgcgccaatttgtaggcaatcaaatgatgtgtttgaactggaattttggagaatggtatgacgttcggtgtggacttctgtgcggatatattgattccgattcccatcggattggggattcagatcagcagcgaatcgatcattcaatttggcagccattcgcggcggacttat

SEQ ID NO: 13982 - DNA, 1595 bp, DROSOPHILA
cagaacatatataataaaaccactggtaagattgctttcaatgaagttgctcttcgtatgccttttgggcactggagatggagcacgaattttggcaccattcttcctgcctgtaaagagccactttatgatgacggatgccattataagggaattagtgaaacgtggacatgaggtcaccttcatcacaccgctatcattggccaaggaaaacttggggccgaactacagggaaatacttttgcccaagtacgatacctgggcggacaatgaaaacaaaatcggcactggatatgattgacatgtcaaagctaacacacatgcgactggcccaacacattggcatcaagtcaacggactttgctctggcccatcccgaagttcaggagttgatctatgccaaggataagaaggggaaattcgatctgctccttgtggaacagttccacaatgagggagctctaatgttgggttacatttacgaaatacctgcaattaccatagctacttttgcatacgcaaactattttagtcaagtcttcggttttgtgaatccattgtcctacgttcccaatgtttttttgtcctgtacggatagaatgtccttgtgggagcgattggaaaatgtagtgattagcacggctgaggatgttgtccgggaagtatcctactatccgcaacaggatgccgtcatcaggaagcattttagtagcttactgcctcgggtgccaacggtcaagcaattggaacagaacatctcggttattcttttaaatagctacatgccgctgacttcgccaagacccatgtcccagaatatgatttcggtgggtggactgcacatcctgccacccaaacccctaccagaacatattaaaaactatctggataacgctgagcacggtgcgatctactttagtttgggatctcaagtgcgcagtgctgacatgccagcggaaaagcttcaaattttccttgacgtcttcgccagcttgaagcaaagggtcctttggaaattcgaggatgatcagctgcccaatcttccggacaacgtaaaggtcgaaaagtggttaccccaggctgacatattggcacatccgaatgtgaaggttttcatcgcccatggaggactgtttggaatgcaggaggcagtttaccatgcggtcccggtgcttggaatgccattctatttcgatcaggatataaacattaaggcgggccaagcagcgggatatgccattggcttggactatcgcaccatttcgaaagatcaacttaagtctgcgcttcatgcgctcttgaaagatcccaaatatcaagccaatatgatgaaagcatcgcgaattttccgggatcgtccactcggcgcaatggacaccgcgatgtattggattaattatgtcgtagaacatcggggagcgccacatttggtggcagcaggagtgcatctgccctggtaccagttctatcttctggatgtatcagcaattattctggctattactctattaccacttttgaccttgtatgctgtaagtcgaaattataaatcttttagaggaattcgagcacagaagaaagagaaacttatgtga

SEQ ID NO: 13983 - protein, 441 aa, DROSOPHILA
MKTKSALDMIDMSKLTHMRLAQHIGIKSTDFALAHPEVQELIYAKDKKGKFDLLLVEQFHNEGALMLGYIYEIPAITIATFAYANYFSQVFGFVNPLSYVPNVFLSCTDRMSLWERLENVVISTAEDVVREVSYYPQQDAVIRKHFSSLLPRVPTVKQLEQNISVILLNSYMPLTSPRPMSQNMISVGGLHILPPKPLPEHIKNYLDNAEHGAIYFSLGSQVRSADMPAEKLQIFLDVFASLKQRVLWKFEDDQLPNLPDNVKVEKWLPQADILAHPNVKVFIAHGGLFGMQEAVYHAVPVLGMPFYFDQDINIKAGQAAGYAIGLDYRTISKDQLKSALHALLKDPKYQANMMKASRIFRDRPLGAMDTAMYWINYVVEHRGAPHLVAAGVHLPWYQFYLLDVSAIILAITLLPLLTLYAVSRNYKSFRGIRAQKKEKLM

SEQ ID NO: 13984 - DNA, 3938 bp, DROSOPHILA
tattaaatcaggaaacaatatataagatattatttttaatatatcatatagttacaagcgtgttttttatttaaagtcagtgatggcatttaaataattttaataatttaaataatttaaattaagggtctaatgctacgagagcctaataattagttgtctatatggagagaataagataacgtaattttaagtgacttgtggaaccttttgtaatggctatatgtaagttttttttttacattagattgcgtaattagtcgactgaggttcaaaccggctcgttggtctagaggtatgattctcgcttcgggtgcgagaggtcccgggttcaattcccggacgagccccagtcatcccagtgcgctaaggaatgtataatttttaaacaaaaaagttatattttataaatatttattttaaaatatttttaagttattgagaatacacatttagttgcatgtgtacacaattatatacaatttacttagggaatgaaataaattaaaagttattttatatcattaaaaacaaactaaattaaattaaattaaggaattttttagcgtcctcataaatgttgcaaaattgttgagtcttcggttttgtacggcttatgtcataatatattgaagatagagaaaaaatttgtttaaaaaacagctaattttataactactctaaaaaatattataaaacactgcatttaaatgataaattaaaagttgctgataagtaatacgtttagagtgggtgaatagctttaaacattcggataaacaaaaaatcattttaaaaatcataaaaataattttagttctattaaaaaatatgatatcatggatattgatccataccaaagaaaacatcgccgataggtgtgtgtcttcgctagggaaagtgtctccgctaaggtatcttgagccaacaaagtacataacgcgtttcattccaaacggtatttattttttgaccttgtggtattctaactttttgtctgtgctatcacttacaaacaagttttcccggcattttcgacctattcaggtgattttctaataattatcacatagtaggcaatgaattttacacggactaattggtaagtgacagaaactagtgtagaattcagaaaattaacccatgaatgctcctcagctcgccgctgagtaaaaacccagtggtgcagcgcagcctggacttgcgattgcagggcgcccaagcgcggcattacctcaagtggtgctccataaatgtggtgctgctgtcgctactcctcttcgacctctggcaggcatgtcggtccgcctacaggacctactggttcctggcggagtgcaccattacgaccctgattggcctaagtgcactcgcctgcttcggcaagtatttgtggttatggtttggtggtgaccaagttacgggtagcgatatccaaaagtggctgcttgatggcaaggcaggtgaggaatccaaaggaacccgttctaacgcatccacttaaccacttttattcctatagagaactcttttcgtacagtttgctcccgagccgtgatgaaaccacgcagctacgaaccggatagcgatatagaggacgacatacccatcatcaactggcactcctccttcgaggactcctgctggggctcgcaatccatgcgccgcagccccagtcccacaaggacgccgcagcagacgaaacaaaacacctcttacaactcctcgatggttcgaaacaactcgctgaatgccagcaatctgagcaacgagtctacctatatgtccccgtatgcggaggtgcgacgcgatgacttcatgaccgatacacgaaagttgaccagtctaatgaagcaggcggatcgggagcgcagcatgatggacagctcggatacacccaatgtgcagagcatgggatcggccaactccttctggaactactgcaacaatgcggcctatatgctcaagaccaccatctatcaactatcgccacctccggctgtttctacggaaaatgctcccacctcgattgaggagtttggcggtattcagtttagggacagcaattcggaggtcatcaagcgcatatccacggacaaactgtcgcaatatgtggccaacctaagatttgtaagcatcccgttcaatattccactgcaacgtactaatgtcttaccattttctagtggatttctacgaccatacttcagcgtttggtcaaagagatcaattatgtggacgatgttttccgccagcgagctctgattgacattaaaattggatctgtgagtgtagagagattacgcaaaacagccgagaaccagcagttcgtgcagacgtgtgcgcccatgttgcccatgctcttacctttcctggacaccttcagcaaccaggaatacctggtgcagcgcatcaaggagcttgcgcagggctcttgcatagctgactaccgctggtactcgggcaaaacacacaacggtcagcagcgggacgagcatttgcccaccgatgcagctgtgagtatacgaaattccgcaactgagcactcttgattaattgtaacctcattctgcagataatattccatttattttgcgtgtacttggatagccagttgatgccgttgccgcagggcggcggacgaccctttcactcccgctacgtgttaattcgcgacgagaagagctcgaccaaggacgtggtgaacgcagttcacaacaaggcccactgcgccattttaagtaccggcaacccacttaaccctaaatttaactttatcagcgacaaagaactacacaactgcgtctacgataggaataacctgttctacgttatcatacagttcctaatttatatgcgacagcaccaggactctgctctggagtgcgtaaatcttggcaaaagtggtatcaacatcatgtgcgtcatcgaagactgaacagtggaactagtggctatgacttttaatcccacccctaatcactccttacttctaagcatgatcctttgtgactcgactagcgtttggtgactggacaatcctcatcattcgttactatgaaattatacatttgtaattattaagccaacttacgactgttgtggtttcgcggttatcaagtgtcgtgtggcctgcggtctgtgcaattaacttgtttggcagtcggcggtaagctatattcgcggatatgtgcacacaggtgcccgactttaattgccctttcatgattctcactattgaccagccagttggtgacctggccattggctcggccagcgacatgctcccacatgctcgccactttgcacttccgaaagtgacaaaattaatggtttccgccgacgctgtcgacattttgtcgagtgagagacattgagaaaatgctccaaagtagtgcaaaatgaaggagtcgcaaacggagacccctaaagcaggcgccaggacgagcaggacctgggccctctcgaccagtcacattaccatttctcttggccatgctcatttctgggctctggcttgacgttgaatcggttggctggttattttaatgccgcccatactcccggatgcccggatggctggatggctggcacctcgggtgagtaatgtgcctgggttgtcaactttacacttttatccctcgcattatatttgctttacctacacaaacacacacactcagccacccaaccgaaccgaagcgaaccacacaccctgtgtgtgtgtgtgtgtgtgtgtgtgtgtgtggagtgatatgttttcctgatactttttctcaagttgtaaattggcttaaaaataatttgtcaaagcatttcagccgcggagtcgggagacgcgatgcctaagatgggaattggagttggaacttggagcgtggaacgttagtatctccttgtgccgagccattttcttgtcacaatatttggaccctcgc

SEQ ID NO: 13985 - DNA, 1708 bp, DROSOPHILA
tgctatcacttacaaacaagttttcccggcattttcgacctattcaggtgattttctaataattatcacatagtaggcaatgaattttacacggactaattgctcgccgctgagtaaaaacccagtggtgcagcgcagcctggacttgcgattgcagggcgcccaagcgcggcattacctcaagtggtgctccataaatgtggtgctgctgtcgctactcctcttcgacctctggcaggcatgtcggtccgcctacaggacctactggttcctggcggagtgcaccattacgaccctgattggcctaagtgcactcgcctgcttcggcaagtatttgtggttatggtttggtggtgaccaagttacgggtagcgatatccaaaagtggctgcttgatggcaaggcagagaactcttttcgtacagtttgctcccgagccgtgatgaaaccacgcagctacgaaccggatagcgatatagaggacgacatacccatcatcaactggcactcctccttcgaggactcctgctggggctcgcaatccatgcgccgcagccccagtcccacaaggacgccgcagcagacgaaacaaaacacctcttacaactcctcgatggttcgaaacaactcgctgaatgccagcaatctgagcaacgagtctacctatatgtccccgtatgcggaggtgcgacgcgatgacttcatgaccgatacacgaaagttgaccagtctaatgaagcaggcggatcgggagcgcagcatgatggacagctcggatacacccaatgtgcagagcatgggatcggccaactccttctggaactactgcaacaatgcggcctatatgctcaagaccaccatctatcaactatcgccacctccggctgtttctacggaaaatgctcccacctcgattgaggagtttggcggtattcagtttagggacagcaattcggaggtcatcaagcgcatatccacggacaaactgtcgcaatatgtggccaacctaagattttggatttctacgaccatacttcagcgtttggtcaaagagatcaattatgtggacgatgttttccgccagcgagctctgattgacattaaaattggatctgtgagtgtagagagattacgcaaaacagccgagaaccagcagttcgtgcagacgtgtgcgcccatgttgcccatgctcttacctttcctggacaccttcagcaaccaggaatacctggtgcagcgcatcaaggagcttgcgcagggctcttgcatagctgactaccgctggtactcgggcaaaacacacaacggtcagcagcgggacgagcatttgcccaccgatgcagctataatattccatttattttgcgtgtacttggatagccagttgatgccgttgccgcagggcggcggacgaccctttcactcccgctacgtgttaattcgcgacgagaagagctcgaccaaggacgtggtgaacgcagttcacaacaaggcccactgcgccattttaagtaccggcaacccacttaaccctaaatttaactttatcagcgacaaagaactacacaactgcgtctacgataggaataacctgttctacgttatcatacagttcctaatttatatgcgacagcaccaggactctgctctggagtgcgtaaatcttggcaaaagtggtatcaacatcatgtgcgtcatcgaagactga

SEQ ID NO: 13986 - protein, 542 aa, DROSOPHILA
MNFTRTNCSPLSKNPVVQRSLDLRLQGAQARHYLKWCSINVVLLSLLLFDLWQACRSAYRTYWFLAECTITTLIGLSALACFGKYLWLWFGGDQVTGSDIQKWLLDGKAENSFRTVCSRAVMKPRSYEPDSDIEDDIPIINWHSSFEDSCWGSQSMRRSPSPTRTPQQTKQNTSYNSSMVRNNSLNASNLSNESTYMSPYAEVRRDDFMTDTRKLTSLMKQADRERSMMDSSDTPNVQSMGSANSFWNYCNNAAYMLKTTIYQLSPPPAVSTENAPTSIEEFGGIQFRDSNSEVIKRISTDKLSQYVANLRFWISTTILQRLVKEINYVDDVFRQRALIDIKIGSVSVERLRKTAENQQFVQTCAPMLPMLLPFLDTFSNQEYLVQRIKELAQGSCIADYRWYSGKTHNGQQRDEHLPTDAAIIFHLFCVYLDSQLMPLPQGGGRPFHSRYVLIRDEKSSTKDVVNAVHNKAHCAILSTGNPLNPKFNFISDKELHNCVYDRNNLFYVIIQFLIYMRQHQDSALECVNLGKSGINIMCVIED

SEQ ID NO: 13987 - DNA, 6005 bp, DROSOPHILA
tccatagcctcatcctctaagccaccggcatcctgcataggatcgctgtcttccgaatcactgtttgccgaatcaggatgtagggcctggcaagtcgtcatggcactgtacatagtgtctacggtgtgaatgtcctccggcataagccagcactctgtgacctctccaaattgctcgtctacggcatcctcgaaattgtcgtcctcatcgtgctcatcgctgccatttccctcgtccacttccgcttccgaaccaccgccattccgaccattgactgcctgctggggaggatctccgtagacgccgttccactcgactttgtggtccagcatgaagtagatgcactttctcggattcgaagagataccgtgcaggctaacctgcttccactcaatggatataccctccgccaattcagttggctgccaggatagcgtgctaggaacaagaaataacagttactttaaaagattttaataaatagagagcaataccagacaccggcaaagctctaaagcgctcacttttgggcaatgtaaactgtgccttcgcccaccactttgtcgcctagtttcagcttgatattgtttgccgtatacaacagaccatgttccggcggggaaacacgcataataagaaccattttaatacagcttgttaaattaattgtaaaaagcgcgatcaaacaacaaaacttgcaaaaatgcagtgttgagtaccattttttcgtcccccttttgaaagtctggcaagggtggcaataactaggagagacagctggactctggcaacgctctgatgtattttccttctttgaatgtagaatcatcagaacaggtgttctcggaggacaacttctttcttaccactgttgaatttagaaatagatatataaagaatggaacaattttgtcaaaaaaagataaaaacgtagtacgtaattgtgctaccagatcagcgcgtacgattttctcccaaagaggtcttaatttggcgctctagccgcggtcacactggttaggtagcgtctcgttcaattttcaattttagctgttaaaatttgcgataaatgtgataaatgcgaagttatatgctcgcgcatcaaaccttcgacaataatacactcctcaaaacgaacccattacggacagaagtgaaagaagtagccttcgggttaacgaaacgaacttgtcattgtccttccaagttgttgttattttccttatccgttggcagtcgttattattgttgttgttgtcgttgttcgtggatatatacagtgtttactcgatagtcccgacggataaaccacacagattgcatggaagcaacgatggatacggaccatgcgaacctaaatgacttcagggatcgcgatctggccacgcgcatgcgccgctgcaattacgaaaaatacaaatccttggtgcgcatgcacctatcgtttgaattggagctcaatacggatgagtaagatggatcaccttggtatatggctgctcaccacattactaacgattcccttatatatgtagattcgatctcccctgtcacgagattgtctacgaggacaagggcaagctgaagaagtggaaccgcctgtctaaaaaacatcgtttgggacatggagcagctgccacatcctgtgccgccggctccgccagtaaatccgtgggtaatagtcccacagagacactgcaacagcagattgatccgggattcttaatgcatctgcaagagctcaaggagttcctaatgctggagaagagtaagttcgctgaagatctcaaattacgttcattaactgatccactgtttcagatctcacccaggaaggcctattccgcaaggctggtgcggtgtcccgacaaaacgaacttcggatgcacatccagcacgacaaaccactgaatttggaacttgcgggcttctccgctcacgattgcgcgaccgttttcaaaggttttctatccgaacttccagaaccgctgcttacggatgcccactatccggcgcatctgcagatagccccactctgccaggcgctcaatggtcagacgactgccactgctgagcgtcaacaacatcttctcaactccgtgcagctgctacttctcctcctgcccgaagaacatcgtgaacttcttcagcacatcattgagatgctgcatgctgtggccaagcatgagaaaagcaacaagatgagcgccgataacttggccactctcttcacaccgcacctaatttgcccaaggcaactgccacccgaggtcctgcactaccaggccaagaaaatgtccagcatcgtgacctatatgatcgtccgtggactggacatcttcgaggtgcctggaaagctgtctaccgacatccgggcgtactttctcgagcgcaaaagaaagaaaaccatgtcgccggaacaaacgcttgacgagtccatctcggacgtctcgacggtcaacacggtgtacacttttgtagaccgagccgccactgcagcggccaccaatacgaacaatacggacacggagctggcgcaactttatgcccatatccagagcatgccggagtcctctaagaagaggcgtttgattaagcagttcaacaagcaaaatgggcagggtaaattactttatatatttaatgctttaatgccctttcactctgggtcttatgatttaaatacctctgctagtaatttcaaaattacttgaattaaggttcaaaatatcttgaatctaattaatatagttaatattacggaagtaagaaatctatagccaatgtttaagtttgcacataataacgaggtaatttttgggaaaaagttaaaataattaaaaaaaatatcattatgatttatcaactaatcaattttcatttgattaggcacaccgttgcaactggtggtaatgaatcgtttgaagaacaacgaggccactcgaagtgccaagtccctgggagattccattaagaagcacattttccacaagagcctcatgtcgcggactccaaaaagagtgccacccagttttcatttggctagtggatccgaggtaagtcgtgcatttggacttcgcctactgctgtgtttttttaactaaccgcatgcctttttgtaatccatcgcatgtttatcgccagacgcccaatatgtcgcatgtgaaaccgcccaagatgcgggtgctttttcagagccccacgccacccacacccacctcatcgaccatcaccagcgtcagcctgtccactaacactcggcatcagcttcagaaatccatctcatctgcttccctcaagatcgaatcctcgtcttcggacagcagctctagctgtgcgaccagcggtagtatctctgctccagtcagtcgacagcaatcgaaagaatcgccttctggcaatggagctgctggtgcttccggccaggaactggatgagatcgatgccgattgctgcgtgacgcctttaaagatcatgtcagcggttgcaaagcagctaattgacaagaagagcgttgcctgggacgagcaccgactgctggagattgaggagtactcgaatccctcaacgcccgttcagcaatcgacgcgctataagtcggagcctaatctgtcaagtatcctgccgcaggtggacgcagaggaagaggacgacggcgcactgacgcccattgtggagggccgcagtaccatggtagctagcagcagccatatgggcagatcaataacccgaaaattgatgaagggcgttagcatgggtaatctcagattcccattcagtacgccagagacaaccaaacgactggtgcgaagtgtttctgccacgctcaggaggcgccccagtggcgaagaaagcaagccatgcccattggcagcggatgcaccacttctggaggatgtagacgatagcgatgaagacgacgaccatcatggggcggtggatgaggacgatgatgatacactttcggaaaacaatggcagctccaacgagctgcccgccatgagcctgggctatcagcagatactacagagcagcgtatatcgcaacatggatctcattacgagcacaccagctctgcatttgggtcgccgttccatgtcgcccatcaccaagtcaacccaacgcatgcctaaggcgatgcaggtgcgtttgaaatctattaacgtatatttaatgcttatataataacacaaatcgtaagaagcgtttggatattttgcttaggaaaatcaatttatatatatgataattacaacatatttgttttacattgtaggaatctatcatgactccccgatcccgaaaaccggtgatgttgcttaccgccttagctggcaatggcgacaagcagctaaatctgagcttcgccgagcaagatgagccggattcgattggtggcacgccgaccaagcaactggagccaccatcgctgcacagtgaggatgccacatcactggggggatatgcggatatcctagggcagcatcagagctttgctctctttaatcccagagagcgtacgaccagcagtagcaacagcaatgaagactcaaagccctcaaacgccttatccagtgatttcaagtgagtgttggcctgagatccattttgcgaatagttttgacattatgattctataatacccagggaatatttgctaacgcgcagtgttcttaccgccagtccggctgatttatcatttgccagtcggtcggatgatttcggtggagccagcaccacgcaggacatcgacgacttggacgagtccgatctgagccccagtctgctctactgcctggacggaaatgagccaactttagcctcaccctttggcaacagcaacggcaggaagcgatcggcgggcacacccctaaagtctacgctaattaccaaccttgacgccgacaacaaggaaaacatggagaatctacaggaggatcattcgcgcaccaaaaagctgctaattacttctcccgagaagtatccgggcgaaacggccctctagctttaaattgagcttttcgcacagatatatatatatattttttcataatctaacgttaaaaccgttgtacggttttaaaaaatcatctctcatcaaaatatttaagaaaatgtttgcttccgtaaaaaatgtttttggtatgacacgtttagcttggccgcgttctaaagtttagcataagttctacattttaaatgcatgcctcaaatattaagagatacatacatatataactatatataatcgaaaaataatcgctgttttattggaagggcttaagttgtaaatgaaatgagttagctctgtggggggttaatgcagtattaactgataagttgttccaagtacttcagatagttgcgtgttgagcaaagtcataatattgtgcaatttccaggtgaacgggtaagttcaaattaaggattttaaattgtttttcctaaaaacggttttaggacaactgtcccaaaatatatgttcgccttaaccaacacagctcgccctgccctcaacgacaggcaacactgagttaattgtaatcagctgttttttgttgatattttcgaggaaaacacattttattcgacgaaaattacgttttatcacaactatccgagtaatattacagcgaaatgggaacctgggtgctggaggtggccaagatgggcatgtacatggcctttccggtgacgctattccacttgtttaaccagccggaatactttgaagaatgggtgaccaagaagaagcgggaactttatccgccggaaagcaaaagccaccacgaggagctgcagcgggcaatccgtgaacaccacgcccagcacgacgccaaaatgatgcgtgctatggaggaggcggagggcaagcagaagaagtagatatttcgttatcaacaatcatccggctaatcccacgttatataatcgggggcaagcaaacaaccgatgctccggatggatgtgactaactgatctgtaacgacgtaataaaaacatat

SEQ ID NO: 13988 - DNA, 3336 bp, DROSOPHILA
agccgcggtcacactggttaggtagcgtctcgttcaattttcaattttagctgttaaaatttgcgataaatgtgataaatgcgaagttatatgctcgcgcatcaaaccttcgacaataatacactcctcaaaacgaacccattacggacagaagtgaaagaagtagccttcgggttaacgaaacgaacttgtcattgtccttccaagttgttgttattttccttatccgttggcagtcgttattattgttgttgttgtcgttgttcgtggatatatacagtgtttactcgatagtcccgacggataaaccacacagattgcatggaagcaacgatggatacggaccatgcgaacctaaatgacttcagggatcgcgatctggccacgcgcatgcgccgctgcaattacgaaaaatacaaatccttggtgcgcatgcacctatcgtttgaattggagctcaatacggatgaattcgatctcccctgtcacgagattgtctacgaggacaagggcaagctgaagaagtggaaccgcctgtctaaaaaacatcgtttgggacatggagcagctgccacatcctgtgccgccggctccgccagtaaatccgtgggtaatagtcccacagagacactgcaacagcagattgatccgggattcttaatgcatctgcaagagctcaaggagttcctaatgctggagaagaatctcacccaggaaggcctattccgcaaggctggtgcggtgtcccgacaaaacgaacttcggatgcacatccagcacgacaaaccactgaatttggaacttgcgggcttctccgctcacgattgcgcgaccgttttcaaaggttttctatccgaacttccagaaccgctgcttacggatgcccactatccggcgcatctgcagatagccccactctgccaggcgctcaatggtcagacgactgccactgctgagcgtcaacaacatcttctcaactccgtgcagctgctacttctcctcctgcccgaagaacatcgtgaacttcttcagcacatcattgagatgctgcatgctgtggccaagcatgagaaaagcaacaagatgagcgccgataacttggccactctcttcacaccgcacctaatttgcccaaggcaactgccacccgaggtcctgcactaccaggccaagaaaatgtccagcatcgtgacctatatgatcgtccgtggactggacatcttcgaggtgcctggaaagctgtctaccgacatccgggcgtactttctcgagcgcaaaagaaagaaaaccatgtcgccggaacaaacgcttgacgagtccatctcggacgtctcgacggtcaacacggtgtacacttttgtagaccgagccgccactgcagcggccaccaatacgaacaatacggacacggagctggcgcaactttatgcccatatccagagcatgccggagtcctctaagaagaggcgtttgattaagcagttcaacaagcaaaatgggcagggcacaccgttgcaactggtggtaatgaatcgtttgaagaacaacgaggccactcgaagtgccaagtccctgggagattccattaagaagcacattttccacaagagcctcatgtcgcggactccaaaaagagtgccacccagttttcatttggctagtggatccgagacgcccaatatgtcgcatgtgaaaccgcccaagatgcgggtgctttttcagagccccacgccacccacacccacctcatcgaccatcaccagcgtcagcctgtccactaacactcggcatcagcttcagaaatccatctcatctgcttccctcaagatcgaatcctcgtcttcggacagcagctctagctgtgcgaccagcggtagtatctctgctccagtcagtcgacagcaatcgaaagaatcgccttctggcaatggagctgctggtgcttccggccaggaactggatgagatcgatgccgattgctgcgtgacgcctttaaagatcatgtcagcggttgcaaagcagctaattgacaagaagagcgttgcctgggacgagcaccgactgctggagattgaggagtactcgaatccctcaacgcccgttcagcaatcgacgcgctataagtcggagcctaatctgtcaagtatcctgccgcaggtggacgcagaggaagaggacgacggcgcactgacgcccattgtggagggccgcagtaccatggtagctagcagcagccatatgggcagatcaataacccgaaaattgatgaagggcgttagcatgggtaatctcagattcccattcagtacgccagagacaaccaaacgactggtgcgaagtgtttctgccacgctcaggaggcgccccagtggcgaagaaagcaagccatgcccattggcagcggatgcaccacttctggaggatgtagacgatagcgatgaagacgacgaccatcatggggcggtggatgaggacgatgatgatacactttcggaaaacaatggcagctccaacgagctgcccgccatgagcctgggctatcagcagatactacagagcagcgtatatcgcaacatggatctcattacgagcacaccagctctgcatttgggtcgccgttccatgtcgcccatcaccaagtcaacccaacgcatgcctaaggcgatgcaggaatctatcatgactccccgatcccgaaaaccggtgatgttgcttaccgccttagctggcaatggcgacaagcagctaaatctgagcttcgccgagcaagatgagccggattcgattggtggcacgccgaccaagcaactggagccaccatcgctgcacagtgaggatgccacatcactggggggatatgcggatatcctagggcagcatcagagctttgctctctttaatcccagagagcgtacgaccagcagtagcaacagcaatgaagactcaaagccctcaaacgccttatccagtgatttcaaggaatatttgctaacgcgcagtgttcttaccgccagtccggctgatttatcatttgccagtcggtcggatgatttcggtggagccagcaccacgcaggacatcgacgacttggacgagtccgatctgagccccagtctgctctactgcctggacggaaatgagccaactttagcctcaccctttggcaacagcaacggcaggaagcgatcggcgggcacacccctaaagtctacgctaattaccaaccttgacgccgacaacaaggaaaacatggagaatctacaggaggatcattcgcgcaccaaaaagctgctaattacttctcccgagaagtatccgggcgaaacggccctctag

SEQ ID NO: 13989 - protein, 1000 aa, DROSOPHILA
MDTDHANLNDFRDRDLATRMRRCNYEKYKSLVRMHLSFELELNTDEFDLPCHEIVYEDKGKLKKWNRLSKKHRLGHGAAATSCAAGSASKSVGNSPTETLQQQIDPGFLMHLQELKEFLMLEKNLTQEGLFRKAGAVSRQNELRMHIQHDKPLNLELAGFSAHDCATVFKGFLSELPEPLLTDAHYPAHLQIAPLCQALNGQTTATAERQQHLLNSVQLLLLLLPEEHRELLQHIIEMLHAVAKHEKSNKMSADNLATLFTPHLICPRQLPPEVLHYQAKKMSSIVTYMIVRGLDIFEVPGKLSTDIRAYFLERKRKKTMSPEQTLDESISDVSTVNTVYTFVDRAATAAATNTNNTDTELAQLYAHIQSMPESSKKRRLIKQFNKQNGQGTPLQLVVMNRLKNNEATRSAKSLGDSIKKHIFHKSLMSRTPKRVPPSFHLASGSETPNMSHVKPPKMRVLFQSPTPPTPTSSTITSVSLSTNTRHQLQKSISSASLKIESSSSDSSSSCATSGSISAPVSRQQSKESPSGNGAAGASGQELDEIDADCCVTPLKIMSAVAKQLIDKKSVAWDEHRLLEIEEYSNPSTPVQQSTRYKSEPNLSSILPQVDAEEEDDGALTPIVEGRSTMVASSSHMGRSITRKLMKGVSMGNLRFPFSTPETTKRLVRSVSATLRRRPSGEESKPCPLAADAPLLEDVDDSDEDDDHHGAVDEDDDDTLSENNGSSNELPAMSLGYQQILQSSVYRNMDLITSTPALHLGRRSMSPITKSTQRMPKAMQESIMTPRSRKPVMLLTALAGNGDKQLNLSFAEQDEPDSIGGTPTKQLEPPSLHSEDATSLGGYADILGQHQSFALFNPRERTTSSSNSNEDSKPSNALSSDFKEYLLTRSVLTASPADLSFASRSDDFGGASTTQDIDDLDESDLSPSLLYCLDGNEPTLASPFGNSNGRKRSAGTPLKSTLITNLDADNKENMENLQEDHSRTKKLLITSPEKYPGETAL

SEQ ID NO: 13990 - DNA, 3133 bp, DROSOPHILA
cggggttcgtatttccggatcgggtgtgggtactctaatgtggattcggctggggatcctcgggcatacaaaccgtacaaaaactagctagatacaaacatacaatacaatacaatacaatacattattagtattatcatcgattcgattcgattagcatcgatttgctttccgttgtatacaaagtagataatattcgaattacaattataattgcggtacgagtacgtaattagtgtaagtacgataaaacaagttaacaagctttaatgcaattattcgcctcgaattcgaattcgatttcaatttcgcttggagacgagactaacgtgagtttagagtagagtgtaagttacagttaggcatgggttagctttgagcctagccaaaaatggaattacataaacgagagcgtagcgtagtatgcaaagtggtagtagatccacatccataaatatggtggaacggcgcatatgcgatcagatgtccgccggccgccttggtgcttttccatttcgcttaggcttagagttacaaaaagtacacggaggatataacgaataataatctcatctctgccctaggctatcatatatgtatgtatgtatgtgtggtggttgctttataaaatacaatacaatacgtacaataaaaaatgtataattagatttataatttctttagaattgaagtttaatgcatatgaacgccaagagctgcgtggcgccagcgttttaaccgtcttctgcacttgatctctgttaacctgaatacaaaaatacattatcataaatatatttatatgttcgcgtgtatatgtatgtatgtatatgtatgcaattggtaattaactgtctggtaacgacaacgacaaaacgatttcgatacggatttgtatttgcatttggatgtggttgagttgctggatgcgttctgcatctgtgggctgttggatgcttcggatgcacgattcggcattctagatcccctggccctccatctacttgttgttctgcgccatcacatgtggcgatttgtagaagttttgcacgaactccgacaggctgtagaccgatcctggaccttttcctgcactcatgcagataaagtctcctagacagtgcatattcgctattggtagagacgcatattagtcgcatatccatagattgtcaacctaaatacgtacaattggagagtataggtggataggagggcggtggcttgatccaactgccatccggccgacgcatgtgacgccgatccgacgagaactcaatgagatatgtgtctgcgggtatgactctaaagaatctgtttaacaaatacacaaaactgatgatcacactctcttcggcatccttaaagtgacttacctgtggtgctccggacgcagggccagatcggagcggaacgtctccgtcacgtacttgtgaaaatatgtgggaaagggcagtgtggtgtccagatcgaacaccaaacagcgattcagcaagggattgtgtatgaagaagacgtggtagtcctaaaaggcaacgtgatgaaatacatattaaatcatagtttatccatgcatcacatagttttacatataactttctaatatggtagtttctgttcttaacattgtggtaataatggttcatccacttacccatatcacaacttgatcgtcgccgcgtcctgctttctggcgccacaggggcacggtgcgaccctcgttggaaacgaagacggcgtagcacttggacagctcctccggccgcgtccgcttcacctgctcgcagagcttccacacgttctcctcgctgcaggggaaaagcggggggcttactaatcgatagatgcaagatgctcaagagcgagattaagtcccagtcacagtccgagttccagttcggggctaatccctgcacgaaatgtcaagtggcttaactgatgctaatccttatcagcaacaggccgcctcgttggcattataataatcgattttgcttggcacgcggctgactcttggcccgtgcctcttgctagttcagtgtttatggctctttcaaataaattccaatcaattcggctgccacacaatgttgctcgcatgttggcggcctcaggtgcatgtgagtggggcattaaactaggtggcacaacaaaggcagccatatcaacagtaacaggtataacaaggactcgagggggtggtggattgggtgctctaaattgttcgcatggaaggaggcaagaggaaagaggcaagaggcaggtggcacagcccactcaagtggcgcggtcaaaagtcgagactgaaagtggctcccggcaatatcgtgagctggcgttattctgttggtggtgggctggtttaagccaaggcccaatttgagtgacttgctcaaacgcaaacacaaagaaatcgcgccattgccatttacctgtgaatcctttaaataagaaggcaagaaaaggatatttcgctgggaattttaacgaccccaaaagccaacaaattcctaataatatgaacaattatatttatttgaaatatgtttcaaaactatctatttatgagtgcgcaatggcgcaaaagctaaaagacagtgtctaaaacttgcgagccgctgcaacacgcgacccatagatggcgctgctgtggtgtatatgccgacgaaagcgaggcaaacgagagcggtgggttttccagagttttcctggaaggagagatgaatctgagtgcaaatgtgagtgcgcgagcagttgcgaattaatcaatgaacatgtcctgcgggagaagggggaagggggctggccggatgggcggttagaaggctgaatgttgggtggtatgaggtcagagaacgcaacgacattttatctggccatgtaaatgggtatgcgtgtgtaaaaacttttttatgttctgcgccttttacttgttattttttgccgcttttttttttacattcgtgtgtgcgcgggtgtgtgggtggcagaacataaaactcatatcacgcgccaggataaacaagtccccgccgccaattcatcgggggaccgaccgcctgccaagttgccattacttagttctcgtcgccgccattgccgccatttttgcaattagcattttaaatattgc

SEQ ID NO: 13991 - DNA, 606 bp, DROSOPHILA
atgccccactcacatgcacctgaggccgccaacatgcgagcaacattcgaggagaacgtgtggaagctctgcgagcaggtgaagcggacgcggccggaggagctgtccaagtgctacgccgtcttcgtttccaacgagggtcgcaccgtgcccctgtggcgccagaaagcaggacgcggcgacgatcaagttgtgatatgggactaccacgtcttcttcatacacaatcccttgctgaatcgctgtttggtgttcgatctggacaccacactgccctttcccacatattttcacaagtacgtgacggagacgttccgctccgatctggccctgcgtccggagcaccacagattctttagagtcatacccgcagacacatatctcattgagttctcgtcggatcggcgtcacatgcgtcggccggatggcagttggatcaagccaccgccctcctatccacctatactctccaattcgaatatgcactgtctaggagactttatctgcatgagtgcaggaaaaggtccaggatcggtctacagcctgtcggagttcgtgcaaaacttctacaaatcgccacatgtgatggcgcagaacaacaagtag

SEQ ID NO: 13992 - protein, 201 aa, DROSOPHILA
MPHSHAPEAANMRATFEENVWKLCEQVKRTRPEELSKCYAVFVSNEGRTVPLWRQKAGRGDDQVVIWDYHVFFIHNPLLNRCLVFDLDTTLPFPTYFHKYVTETFRSDLALRPEHHRFFRVIPADTYLIEFSSDRRHMRRPDGSWIKPPPSYPPILSNSNMHCLGDFICMSAGKGPGSVYSLSEFVQNFYKSPHVMAQNNK

SEQ ID NO: 13993 - DNA, 5188 bp, DROSOPHILA
ctcattcagcagacaccccggcggagcatgagttggtcaaaaaggctgctctggaggcaggtgcattcgccgccgtagtctccactcactgggcggacggaggagccggagccgttcagctggccgatgccgtgatcaaggcctgcgaacagggcaatcaattccgattgctctacgatctggagctgccgctggtggataagatgaacaagatcgctacgacgatgtacggcgctggaaaggtggtgctctcgccggcggctgaggagaaggtcaaacgcctgacggatgcggtaagtcgagaacattttcttcgagaaactgaaagtatttatagaaatgcattgttcaattcgcagggttttggcaatctacctatctgcatgtccaaagtctccggctccttcaccggcgatgccaaaatcaaaggcgcccccaagggcttcaccctggacgttgaggacgtatatgtttcagccggagccggctttgtggtcgccatgtgcggtgaggtcaccaaaatgccgggtcttcccacccgcccggcgatctacgatatcgatctgaatacggaaaccggagaaattgagggcctattttagacggcaacctggacaagggagaagattcctaataactttcaacgccttttcacatctaattccagagtagtaacaaatttatcgttttaacttgtatataaatgatatagagataagatttaaaagtcggtaaactaatatacatttctgacgatttgagttttctttaaaactatcgagtttttacttttcagaagctaaagaatggaaacgaaatatttttagtttttatatattttcatgatattataaatgaatttttttttatatgtagacaggttggaaatatataaattacacgaatacctatttttggccctcaaaagtaaggtagtattcttgcacaaaatcgcaaccaacaatgcatgatttttgctgactactttcaagccgactttttaggtactttgtctttttccaaagttccccttcttcactgtgctaacgtcactcacacgaggcgactcaaagtagtccacctttcgtatgttagacactatcttgaagtaattggcaatgatcttgtccacttcttgtccctcatatgcggtggccaattccttttcacatcgtgagactacgttcgtgagcagacctccggaccgaaagaacgctatgttgatctcccgtttgacccacttgcagatatgtgaatgggtgactggctcgaaaaagtgaaagatctcgtaaaagtgctcgtaactctcgccaaattttcgcatttcaagttcacccaacttgggaatgtccaggtggtttcgtctgatgatatgatatgggtcgtattgctccgaaaagtttgagaaccgaactgctggccagtcgaggttcagaagggtgttgtagagattcttcgggtggccaaggattccatgggacagatcaatcaagcggagctgcgatccgggcacaacgtactccaactcgatctgagcgatgtgaggatcagtgcccctatacttacgctttcctatccacagaatgggcaaatcctccgtcacaacatgctccaactcttggaccagcggagagatctggacgcgataattgaggttcttgttgtttcggccgtaaagaagacttcgctccgcctccgtgaactcaaggtactcagggcggacggaaacaaagtgctccgaccggaaaagccgattcatctccatttcgatgacgaaatacgctcggcgatgcatgcatatccagactatttggatggatactgccagaaaatgctcatggaagtacttatcgtggatagttgctgaaatgttggaaatcggcttcatgtggtagtacttggccatagatccctcgcccttgataatctcacagtagtttcgggctaatagcatgcggaagtggctcaggtaaacggaataggttttcttcatctcagtggtctgctcgctctgaatttgggccatctggccagagagttcatctctgcgaatcaggacgaactccaccaggcgtaggtagtactcaaagtacaatgttaaggcgtggagcacggactgcacctgtggctcatgcatgaattcaatgaacttgtaggttagaaagtctttaggcatcaagtagagcaccagatctcgaatatctcttagcaccactgtgtcactggtgttggacttggcgcgtacatactcctgccggaagataagctcctcctcttggtcgatggtacgcaggaacttgtacccattggtgattatatagcgctctcttgcgttttccagatcgttgtgcgcctgaaagttgaggcagtccttctccgagtcccatgaccacttgccgctgtagtactttggagcgtagttatcgacatggactcttttcatcgtagtcgcgcagataaaccaagatcgggttgtgtttagtgtttttaaagtgtatttaaattgatgtgtacgtgacgaagtttagtggaattatgctcatgtttaaaggcctaaagtgaagttttattcccaagctcccacctacgaaacccatacccttgatcggatgccaatgtctttcgtcttcgtgcatttattataaaatagcaatccataagtgtcagtgctttaaagctccgattttctgtatatataataatatgcaaaaattgcaattaacgtataaaattaggtagttttttttaccgctttgccttgcctacactaaatcgcgatgcaatactactacgcgtagatgatgcatgctccggatctctatcctccttgcgtattttggacatgatcttaaaatagttggagatgatctgatcgaccctttgtcctgaagatgtgcttgccaactccttttcacaacgcgagactacgttcgtgagtagacctccggaccgaaagaaggctatgttgatgtctcgtttgacccacttgcagatctgatggtgtgtgacccgctcatgaaccttacagagcttgtagaaatgttcatatttctctttcattgtacgcatctgaagctcacctatcttgggtatttgcaggtgaggtctcctgattatatggtacggatcgaacttttccgagaagtttgagaagcggacagccggccagtcgagactaagaagcgtgttgtagaggctcttgggatggcccatgatgccgtgcgatacatctataaagctgagctgcgaaccgggcacaatgtactccagctcaatctcggcaatgcggatatcgtttcctctgtacttgcgttcgcctatccacaaaatgggcaaatcctcttcaggaaccagctttagctcctggactagaggcgattcctgaattcgataattgtagttctttttgtttctgccgtagagaagactgcgctccgcctccgtgaactcgaggtattctgggtgggcggaaacaaagtgctcggagcggaaaaggcgattgatctccatttcgattacgtaatacgcccggcgatgcatacagatccagactatttggatggccactgccagaaaatgctcatggaaaaacttatcgtggattgttgctgaaatgttggaaatcggcttcatgtggtagtacttggacatattatcctcgcccccgatgatgcggcagtagtttcgtgcaacaagcatacgatactggcttaagtataccgaaaaggttcgtttcatatcgttggtctgctcgctctgcacctgacccaggggaccggaaagctcatcccgacgtataagtataaactcgaccagtcgcaaatagtgctcaaagtatataatcagggagtgaagcaacaagtgcgtatcccgctcgtacatgaactcaacgaacttgtaggttagaaattctgaaggcataaggtagagaaccaagtttctaatatctccgaccaccacaacgtcactatagttgcttttcggtagcacatactcctgtcggaagatgagctcctcctcctggtctattgtgcgcaggaacctgtagccattggtcataatatagcgctctcttgcgttttccagatcgttgtgcgcctgaaagtggaggcagtctttctccgagtcccatgaccacttgccgctatagtactttggggcgtagttatccacatgaatgcgcttcattgcgtttggcagtaaataatggtataaatttataaaatcgtattttagtcaaaagcagtgaaaaatcagtgtcgttacattgagagttaaatatttatgttcctcaaaaagactgaaatttagatgctgcagcgactccgattatttaaaagaccaaatacaataatttccaagggcgtgatttttctgtcaatctgtattctcagaatttgtattttccggtaccacgctgatttaggtgaccggtgtttcccggactgtgctaagcatgttccgccgcactaatgccgatccggtcatacggcaatttattctgcgcactgcagtcctcaattatcttggcaagagtctgcgagagcagtataatgaatattgccttttgagaacccagcacgaaaatattaggctgaagactgcgagtgatcaagagcttgaggacctgccgactctttccgagctatttgagatgcaacagttgaagacggctgccacccatcgtctgctgatgcgggagtaccaagaattgcttgcctacatgatggacaagagtgatttgtgggacagtcaggagtacttcaaggccaagtctgcgcttggggcggccatccacaatctacgggtttgtgcacccaccaaaccaatggactaaaaccagtcgagaggaacatttgccagatagaattccattcaatcagtatatatacatacataaatagtgaaacgatccacgagcgacttaactacttgtagaagggtatctccacgcgtccggatttcgtgttaaccgcctcccagcaggtgcacgcaaaggttgagcggtccatgtgatcggtgtatagttttccctccaggtgatccatttcgtgctgcgctatccgggcattccaaccactcagagccagttcgctttggtttcctagttggtcaaggcctgttagctttacaccttcgaaacgctccacttcggcagagtaacctcgcacactcatgcatccttctg

SEQ ID NO: 13994 - DNA, 2874 bp, DROSOPHILA
atgaagcgcattcatgtggataactacgccccaaagtactatagcggcaagtggtcatgggactcggagaaagactgcctccactttcaggcgcacaacgatctggaaaacgcaagagagcgctatattatgaccaatggctacaggttcctgcgcacaatagaccaggaggaggagctcatcttccgacaggagtatgtgctaccgaaaagcaactatagtgacgttgtggtggtcggagatattagaaacttggttctctaccttatgccttcagaatttctaacctacaagttcgttgagttcatgtacgagcgggatacgcacttgttgcttcactccctgattatatactttgagcactatttgcgactggtcgagtttatacttatacgtcgggatgagctttccggtcccctgggtcaggtgcagagcgagcagaccaacgatatgaaacgaaccttttcggtatacttaagccagtatcgtatgcttgttgcacgaaactactgccgcatcatcgggggcgaggataatatgtccaagtactaccacatgaagccgatttccaacatttcagcaacaatccacgataagtttttccatgagcattttctggcagtggccatccaaatagtctggatctgtatgcatcgccgggcgtattacgtaatcgaaatggagatcaatcgccttttccgctccgagcactttgtttccgcccacccagaatacctcgagttcacggaggcggagcgcagtcttctctacggcagaaacaaaaagaactacaattatcgaattcaggaatcgcctctagtccaggagctaaagctggttcctgaagaggatttgcccattttgtggataggcgaacgcaagtacagaggaaacgatatccgcattgccgagattgagctggagtacattgtgcccggttcgcagctcagctttatagatgtatcgcacggcatcatgggccatcccaagagcctctacaacacgcttcttagtctcgactggccggctgtccgcttctcaaacttctcggaaaagttcgatccgtaccatataatcaggagacctcacctgcaaatacccaagataggtgagcttcagatgcgtacaatgaaagagaaatatgaacatttctacaagctctgtaaggttcatgagcgggtcacacaccatcagatctgcaagtgggtcaaacgagacatcaacatagccttctttcggtccggaggtctactcacgaacgtagtctcgcgttgtgaaaaggagttggcaagcacatcttcaggacaaagggtcgatcagatcatctccaactattttaagatcatgtccaaaatacgcaaggaggatagagatccggagcatgcatcatctacgcgtagtagtattgcatcgcgatttagtgtaggcaaggcaaagcgagtccatgtcgataactacgctccaaagtactacagcggcaagtggtcatgggactcggagaaggactgcctcaactttcaggcgcacaacgatctggaaaacgcaagagagcgctatataatcaccaatgggtacaagttcctgcgtaccatcgaccaagaggaggagcttatcttccggcaggagtatgtacgcgccaagtccaacaccagtgacacagtggtgctaagagatattcgagatctggtgctctacttgatgcctaaagactttctaacctacaagttcattgaattcatgcatgagccacaggtgcagtccgtgctccacgccttaacattgtactttgagtactacctacgcctggtggagttcgtcctgattcgcagagatgaactctctggccagatggcccaaattcagagcgagcagaccactgagatgaagaaaacctattccgtttacctgagccacttccgcatgctattagcccgaaactactgtgagattatcaagggcgagggatctatggccaagtactaccacatgaagccgatttccaacatttcagcaactatccacgataagtacttccatgagcattttctggcagtatccatccaaatagtctggatatgcatgcatcgccgagcgtatttcgtcatcgaaatggagatgaatcggcttttccggtcggagcactttgtttccgtccgccctgagtaccttgagttcacggaggcggagcgaagtcttctttacggccgaaacaacaagaacctcaattatcgcgtccagatctctccgctggtccaagagttggagcatgttgtgacggaggatttgcccattctgtggataggaaagcgtaagtataggggcactgatcctcacatcgctcagatcgagttggagtacgttgtgcccggatcgcagctccgcttgattgatctgtcccatggaatccttggccacccgaagaatctctacaacacccttctgaacctcgactggccagcagttcggttctcaaacttttcggagcaatacgacccatatcatatcatcagacgaaaccacctggacattcccaagttgggtgaacttgaaatgcgaaaatttggcgagagttacgagcacttttacgagatctttcactttttcgagccagtcacccattcacatatctgcaagtgggtcaaacgggagatcaacatagcgttctttcggtccggaggtctgctcacgaacgtagtctcacgatgtgaaaaggaattggccaccgcatatgagggacaagaagtggacaagatcattgccaattacttcaagatagtgtctaacatacgaaaggtggactactttgagtcgcctcgtgtgagtgacgttagcacagtgaagaaggggaactttggaaaaagacaaagtacctaa

SEQ ID NO: 13995 - protein, 957 aa, DROSOPHILA
MKRIHVDNYAPKYYSGKWSWDSEKDCLHFQAHNDLENARERYIMTNGYRFLRTIDQEEELIFRQEYVLPKSNYSDVVVVGDIRNLVLYLMPSEFLTYKFVEFMYERDTHLLLHSLIIYFEHYLRLVEFILIRRDELSGPLGQVQSEQTNDMKRTFSVYLSQYRMLVARNYCRIIGGEDNMSKYYHMKPISNISATIHDKFFHEHFLAVAIQIVWICMHRRAYYVIEMEINRLFRSEHFVSAHPEYLEFTEAERSLLYGRNKKNYNYRIQESPLVQELKLVPEEDLPILWIGERKYRGNDIRIAEIELEYIVPGSQLSFIDVSHGIMGHPKSLYNTLLSLDWPAVRFSNFSEKFDPYHIIRRPHLQIPKIGELQMRTMKEKYEHFYKLCKVHERVTHHQICKWVKRDINIAFFRSGGLLTNVVSRCEKELASTSSGQRVDQIISNYFKIMSKIRKEDRDPEHASSTRSSIASRFSVGKAKRVHVDNYAPKYYSGKWSWDSEKDCLNFQAHNDLENARERYIITNGYKFLRTIDQEEELIFRQEYVRAKSNTSDTVVLRDIRDLVLYLMPKDFLTYKFIEFMHEPQVQSVLHALTLYFEYYLRLVEFVLIRRDELSGQMAQIQSEQTTEMKKTYSVYLSHFRMLLARNYCEIIKGEGSMAKYYHMKPISNISATIHDKYFHEHFLAVSIQIVWICMHRRAYFVIEMEMNRLFRSEHFVSVRPEYLEFTEAERSLLYGRNNKNLNYRVQISPLVQELEHVVTEDLPILWIGKRKYRGTDPHIAQIELEYVVPGSQLRLIDLSHGILGHPKNLYNTLLNLDWPAVRFSNFSEQYDPYHIIRRNHLDIPKLGELEMRKFGESYEHFYEIFHFFEPVTHSHICKWVKREINIAFFRSGGLLTNVVSRCEKELATAYEGQEVDKIIANYFKIVSNIRKVDYFESPRVSDVSTVKKGNFGKRQST

SEQ ID NO: 13996 - DNA, 5825 bp, DROSOPHILA
ctgccccaaaggggttgcatgctgctcccgtcgcctttgtgttcgctgggcttttgtgcagcaagtcgaccgggtgttttaatgggcggcagggtgcaggctgcaggatgcagctgagtgcttaacgctttattttcattaacatttctaagttgcctcttcagcggctttaagctgtgcgactaagcggcgcatgcgtcgagggtgctgttagcgcacgaagtcctgcgacaggacctgcaattagcaactcgccattagaggtcctaatgacatgaaaccatacgtatgtatatgggcatatcatcataccgtgtgcatatggtatcgcacaaacttgtgcgatgaaacctgctgtaattgagttccatcaaccatcgtcttttcacaaaggtgaaccaccaccagcaccacctactgccattcccacagctgcggttaaattattaaggtatctgtaggcaaagggtagaagcttttatcgattttcattgttacacggaaggggagcttagattatacatttataaagtatattacacagaaatctttcgctcttagaaaagttaaaatatatgaaatataattgaaagaggtaaaacggatttttggtattaaaaagatagcatattccaattttagatactttagatttacaaataactctataacctttataaagttacgtatctagcctaataattctatgttcttagttttttctctctgtgtgggccacgtttgcagtttcaaaacacagagaatgctgcgaacggcgtgtcgacatccccggatattgttgttaccaattgacaatatacattacaggacctccaaggttggggttgaaagctcaaacatatggtggaacgtaagggggatgttggaatagctatcgataccaaaacacccaccacgaacagctgataaggaaagctccatgtagctgggggtgaaaaagctgctcgtggagggtttcccagttttccgaacgacttccattggtttacatttcgccagccatcgtgtatttgccacaaaatccagagaaaaccaagcgaaaaatcaaaataatcatcgaaataatggaaaagcgcatatcataaactgatatttgcgtgctcaagtgtaaattgaaggaacgcgtgttgtggtgattcttttttgcagcccgcaaaaaggccaaaaatcaataggcgtgttcaaattgtaaacacggcaagccctcggacaagcctctttcgctttctcggcctttccaaccccgaaatccccaagtgaactgtgaccgccagctgcccgaagtgaaaaggcccagtcgcgttcgaaaaaccgcaaaaataaccattagccagcgaaatgattgccaacttggcgttgcctttcctgctgatgatcgcggaagcagcagccaccgcggagcaggtgaagtacctggagtacctgcaatcttcgccggcggagcaccggcttagcaaacgcatggatctggaggtgtgcataggtgagaccaaattcgttagccacatccagctttatggttggtaattagttttagtcttttgtttgtgtgtctttggccataataactcaataatcacctaataatatagaagaccacaaacttcaacacaagagcatttacgaacttttggagtttctttcgacttctgcccacaggtcattttgatgtgcataagaacaccattattcgcacgggagagtcgcaggcgattggtggcaagtacctccagggcattgagctggacaccatcgaggaatgcgaaaggctgtgctgcgagacggacgcctgcgatgtgtacatcttcgagcggaaggcgggtggctattgctacctcttcgagtgcggtcctccggaggatttccgctgcaagttcaccaggcacgccaactacacgagtgccgtgctgaatccacagccaaagccagtcggtgagctggtgaccacaccgcgtccgcagttgccccacatccccagcaacaatgtgtcgcagcaggaatgggagctgagcaacctgaagctaaagccggaagcgcgcgacaagcccactgtttccaccgccgcagtggtggctcccacatcgggaacgggaacgggaacgggagtgggtctgggagtgggccagtcgccagtttaccaatcgcaaagtggtgagttgtggtcgggttttcgataccttgtactttatagaaatcacgggtatatgcgatttgaagcttagaatatatataagaacaatttgaatttaaaatctaaatcaatcttaaactaaaaatattatctaaaaattcctacgattgattacctactatttaaaattgttccccttcgagaaactaacgtaaccactttttcagttcccgccgcgcattgtggacgcttccagttcacctgccactccggcgagtgcatcgcggtgtacaatgcctgcgatggaataccccagtgcgaggatggcagcgacgagggaccggaagtgagttgcactttcacctccagccaaatacacacactccctcaaccgttaattgctaaccccattttcagtgcaacatcgtgctgtcgacggccacaaaaccggccactaccagcagcaatttggagcccgtgaagccgatggtgtcgcagtatgtgcccgtgcagaacgtgcaacagacacagcaggtcgtggcccagcagatgcagcagcagcaaccgcagcagcaacagcaacagccgcagcagcaaccacaacatgtcattgttttgggaccaccaccgccaccgccgcctccaccgcccatggtgaacaatcgtgaagatgccgctgcctgggccaaccgcaagatgattgccgaagggcagcagcagctgccgcagcagcaactgcaacagcaacagcagcaacaatcatcgcagccaaagacggagatcatcaacacgggttagtatagataaggggtctaggaaaatatagttaagattagaagttagttgataggatgtattaaaagcatatgatgtgtcaaagattagatttaatgattattaacacaacaaagtttaggaaatgaaacttttgcagctgtagtatacgatgtagttcccaattgatgatatctgtcttatctatagaatcttcaacgctaacaaacttatgattggcaatcatacagggcttttcttcattttttttatataatttattttattttatgcctcacaacccagtaaagctgctgcagcactgcactaagttgcattaagttgttaattaaactcgattgagtgtccaggagcaattagttctagccaggcactccagcccaacaaaaactaaaagctgagtaaatatttatgaggacagggaatggggagtgatacccggaggctacggcgctccagtgcgacattagcacacaaatggccggcacagtgcacgcaatgatcccactgccatggccacttggccacgacacactcgctcccttgttccggagggcttttctgctgggaaaatcgcaaatagcccatcagttttcattgtgtgaaatgggagctgccgtcgctcgaaattgatttacgaatgcttgtgccctatgcgtgcagtgcctctgtctgcgcgtaattaattcaattagctgtgcgttaaccgggatacacacacttcatgcttcctagtgacgccttcgcctccgctttcttacagacgcacagagccacatatttagccataaaggcggcctccagctgcagcagcccgcaaacggacagggtccaccgccgtcgccactccaggttccgggtcagatggcgggagcaggtcaggttcaggttcaggggcaatccccaacgctgcaactgcccggctacgaggccaaccaggctgtatacgggatgtcacgcacaggaatctacatgccacagcagccggcgcaactccaggctccagctggccaacagcagcagcaggtgcaagcgagtgtggtgtggccacagcaggctccattaattccgcagcaacagtcgcccgtgcagcagtcgcagtccctgatgccccagcaatctggtcatgtctatgccgccgctgctccggccatccaatctccgccagctgcgcagcaagccatgttgccagtcctaaatgcagcacccgtagctgggaaaaatcagggtccagcggcagatggggactacgatgattacgatgaggaaacgtacacggaggcaccaaaaaaggtaagatctgatgaatgaatatagattaagattaaccattcattttaaaaccacagaagcagcacaaacacaagaaggtcaagacgaagacggccaaggatcccattgaacttgccctggagcaaaacaagttgcaaccggagggatcccttccagccctgccggttcccgcttcccccgtccacgagcagtacaagatgatccatgacaacctggcgatggagttccgcgatcacgacggtcactcggagcgacctggcggggcggtcctctcgctgactctgggcctgctggtcaccgctgcgctggccattcttatcgggtgcaggatgcggacggtgacgcggagggcacgacgactgggcggcaagacgccctactcacaggaggcggacttcctggtcaacggcatgtatctgtaagccggttgcctgcggattaggtcgggggctagccaagattcgttgtgttgttccacgtgcggggaagcgtgaggatatatatatttacgattaattgtgtaatgaaaaacgtattttatataaacaaagatatatcaaataaaactaaaacttaaacatagcgatcgccttacctgtggaccgattaatgagtcgaaaagtaattttataatattttttatttaagttcctttccatttgcgatttcagttttgttttggttacgaaaaaaacttacaattactttgttacgaaatcttgttctcagtttttttttcaatgaagtgacgacgatgactggtttagtcattaaaactacaaaatagtaggaagttggtttttatttatattctttttttcttttcttttcctttatatatcagcactatactcgtaattgcctttctttaaaataacaaatttcgctgtggtggagcctttttaatgttcaagtctaaaatcattattagtgaaaggtagtatttgaccaaaaaaacaaatttcgaacgcttaaaaatatcacattaaaaaatcaaaccgaatccgatttcatatataaataacacaaatttatttaattttgttttggaatttggaataggttgtcttaagttttgtatacatagatttatttcgtttttcgtttaccacttcatttttagtcttttgttgttgagaattttccttgctgtggccagtttttttttttttttttgaatgaaaatcatcttttacgaagtttactgccctgacattggttgcattaatattacgcattacgcattaaaataggcttttctctttactcgtttagctccattttcacttaacactgtacacatataatgtaaactaattgtatttatatttattatgcagttgaatagtttatagtttaatatgtcaatgtgcaattcatgatgcagtttttcatcgaatgtgactcgttacaatgttttcggttgctaagcgaattaaaaacaaaactagtttccgaaaaatacaactcaagaaatctccaaatgtttttttttttttacaacttctgtattaacgtgatataaatatagactgaatttagattggattggatcgactggctgttggcggttgcttttcgtgtt

SEQ ID NO: 13997 - DNA, 2550 bp, DROSOPHILA
attggtttacatttcgccagccatcgtgtatttgccacaaaatccagagaaaaccaagcgaaaaatcaaaataatcatcgaaataatggaaaagcgcatatcataaactgatatttgcgtgctcaagtgtaaattgaaggaacgcgtgttgtggtgattcttttttgcagcccgcaaaaaggccaaaaatcaataggcgtgttcaaattgtaaacacggcaagccctcggacaagcctctttcgctttctcggcctttccaaccccgaaatccccaagtgaactgtgaccgccagctgcccgaagtgaaaaggcccagtcgcgttcgaaaaaccgcaaaaataaccattagccagcgaaatgattgccaacttggcgttgcctttcctgctgatgatcgcggaagcagcagccaccgcggagcaggtgaagtacctggagtacctgcaatcttcgccggcggagcaccggcttagcaaacgcatggatctggaggtgtgcataggtcattttgatgtgcataagaacaccattattcgcacgggagagtcgcaggcgattggtggcaagtacctccagggcattgagctggacaccatcgaggaatgcgaaaggctgtgctgcgagacggacgcctgcgatgtgtacatcttcgagcggaaggcgggtggctattgctacctcttcgagtgcggtcctccggaggatttccgctgcaagttcaccaggcacgccaactacacgagtgccgtgctgaatccacagccaaagccagtcggtgagctggtgaccacaccgcgtccgcagttgccccacatccccagcaacaatgtgtcgcagcaggaatgggagctgagcaacctgaagctaaagccggaagcgcgcgacaagcccactgtttccaccgccgcagtggtggctcccacatcgggaacgggaacgggaacgggagtgggtctgggagtgggccagtcgccagtttaccaatcgcaaagtgttcccgccgcgcattgtggacgcttccagttcacctgccactccggcgagtgcatcgcggtgtacaatgcctgcgatggaataccccagtgcgaggatggcagcgacgagggaccggaatgcaacatcgtgctgtcgacggccacaaaaccggccactaccagcagcaatttggagcccgtgaagccgatggtgtcgcagtatgtgcccgtgcagaacgtgcaacagacacagcaggtcgtggcccagcagatgcagcagcagcaaccgcagcagcaacagcaacagccgcagcagcaaccacaacatgtcattgttttgggaccaccaccgccaccgccgcctccaccgcccatggtgaacaatcgtgaagatgccgctgcctgggccaaccgcaagatgattgccgaagggcagcagcagctgccgcagcagcaactgcaacagcaacagcagcaacaatcatcgcagccaaagacggagatcatcaacacggacgcacagagccacatatttagccataaaggcggcctccagctgcagcagcccgcaaacggacagggtccaccgccgtcgccactccaggttccgggtcagatggcgggagcaggtcaggttcaggttcaggggcaatccccaacgctgcaactgcccggctacgaggccaaccaggctgtatacgggatgtcacgcacaggaatctacatgccacagcagccggcgcaactccaggctccagctggccaacagcagcagcaggtgcaagcgagtgtggtgtggccacagcaggctccattaattccgcagcaacagtcgcccgtgcagcagtcgcagtccctgatgccccagcaatctggtcatgtctatgccgccgctgctccggccatccaatctccgccagctgcgcagcaagccatgttgccagtcctaaatgcagcacccgtagctgggaaaaatcagggtccagcggcagatggggactacgatgattacgatgaggaaacgtacacggaggcaccaaaaaagaagcagcacaaacacaagaaggtcaagacgaagacggccaaggatcccattgaacttgccctggagcaaaacaagttgcaaccggagggatcccttccagccctgccggttcccgcttcccccgtccacgagcagtacaagatgatccatgacaacctggcgatggagttccgcgatcacgacggtcactcggagcgacctggcggggcggtcctctcgctgactctgggcctgctggtcaccgctgcgctggccattcttatcgggtgcaggatgcggacggtgacgcggagggcacgacgactgggcggcaagacgccctactcacaggaggcggacttcctggtcaacggcatgtatctgtaagccggttgcctgcggattaggtcgggggctagccaagattcgttgtgttgttccacgtgcggggaagcgtgaggatatatatatttacgattaattgtgtaatgaaaaacgtattttatataaacaaagatatatcaaataaaactaaaacttaaacatagcg

SEQ ID NO: 13998 - protein, 675 aa, DROSOPHILA
MIANLALPFLLMIAEAAATAEQVKYLEYLQSSPAEHRLSKRMDLEVCIGHFDVHKNTIIRTGESQAIGGKYLQGIELDTIEECERLCCETDACDVYIFERKAGGYCYLFECGPPEDFRCKFTRHANYTSAVLNPQPKPVGELVTTPRPQLPHIPSNNVSQQEWELSNLKLKPEARDKPTVSTAAVVAPTSGTGTGTGVGLGVGQSPVYQSQSVPAAHCGRFQFTCHSGECIAVYNACDGIPQCEDGSDEGPECNIVLSTATKPATTSSNLEPVKPMVSQYVPVQNVQQTQQVVAQQMQQQQPQQQQQQPQQQPQHVIVLGPPPPPPPPPPMVNNREDAAAWANRKMIAEGQQQLPQQQLQQQQQQQSSQPKTEIINTDAQSHIFSHKGGLQLQQPANGQGPPPSPLQVPGQMAGAGQVQVQGQSPTLQLPGYEANQAVYGMSRTGIYMPQQPAQLQAPAGQQQQQVQASVVWPQQAPLIPQQQSPVQQSQSLMPQQSGHVYAAAAPAIQSPPAAQQAMLPVLNAAPVAGKNQGPAADGDYDDYDEETYTEAPKKKQHKHKKVKTKTAKDPIELALEQNKLQPEGSLPALPVPASPVHEQYKMIHDNLAMEFRDHDGHSERPGGAVLSLTLGLLVTAALAILIGCRMRTVTRRARRLGGKTPYSQEADFLVNGMYL

SEQ ID NO: 13999 - DNA, 2096 bp, DROSOPHILA
cagtggtaataccgatcatgcataccgagatgatttaaatattgctgtagtttaattacttaataaattcggacaaaggttggtagttttcgtattaagcataaatatggaatcggtaattctgctaaattaacttttaaatctgcaatagttttcccagaattaaaagttttggttttagtcattaatcgtttttatttatgctgtgcttagtaggagacgccggtgtttgtcttgatccagtccaagtagctggtcacacgggtgaagccagcaggggcaccggactcacaaccagcgctcgacacgaaggaggtgacaccgatgagcttactgtcgctgaccaggaccagtgggccgccggagtcgccgttgcaggtggacactttgttgggggtagcaacgcagatcacgttgttggtggctaccagagagccataagtgttctggcattgagagacggacacaacctcgaagacttcgtactgcagagtgttagcgacgctggtggcggaatcggaggtcttgccccatccggaggcaatagcctgctgtccagtgtaagtggagtaggtaccggcgatggcgggcagctcaaccttgttaataagggcggtgaaggcaaccgttggggtcttgatcagggaaatgtcgttcctcaacacaatcgagttgtagctggcgtgctgaacgaagttatcggcggaaacggtctggaccagctgggcactagtacgcacggtggctccgtagtaaatggtcacagcggaggcactgagagatatacattaaaatttaactcattttgtagataaataaataagttaactcacccagaagtgcagtgagcagcagtgagaacccaggtgttgtcgatgatggaaccaccgcaccaccagctgccgctggtgctggcgaagctgagtcccacctggtaggggaactggccagaagtggcggtcttgccgttggtgatgcgaccctcgatattggtcacggcgggcaggtcacgggggtggatcggcacctgctggggcagcagaccggcggaggcggtggccagagccagggcgaagactacgagcactttcatgatggtcggagaacgaatgattctttaccggccacaccagcacttttataccaactaattgggcggcttatcattggccgtgcctcttgtattttgaccaagtcacttctgtttattcgcgtgaaattgcttatcagtcgtgggttttgctccgattttcgatttttttctttcttttattgatgtcggccaaaaaggaagcagtcccacttatcggctttgattgacccaagccaaaaaaaaaagtatctgctgttatcggacttgtgagaaaccggtgagattacaaaccgcaggctttcaattaaacgcacttcacaagcgaactggcggcaaacgttgtccactcgaatgataagtggtaagtgataagcatagatttctctaaatgacggtagtgatattttgccaaacggacgactttggctgacttttgctctgttttaaggcatatacatgcatatttatagctgggaaaaccggctaagcgaaatcggtttaatcgaattatttgattattttcgggagccatcgatcagaaattgtttacggcgacactcaccgcagtggagtggctgaaatacccagtgattatctgatggctgggcccaaatcgtattaagcatacgcagcggtgtgccaaacttgccaactcattcgagtgggcgggcggtcaaaggcgacagtggcaagttgaatctgggaaattgaaatcaaatcgccttacgtgtcgggcatgcaaaagcatactggattttggggccagtctccagaacacaatcctgcaggacattagcacataaaaacaattcattgcctttcatgctgacacatgtagtgtgtagttgctgtcgggcagtgacttttgtgggccactgtgcgtgtctgggccataaatgccaagcataaaatagatttaatcctaaaggagcagcgaaaacttggcctgaagaatttttcatctatttaatccttatattaactgcgttttattgattttcct

SEQ ID NO: 14000 - DNA, 867 bp, DROSOPHILA
atcatgaaagtgctcgtagtcttcgccctggctctggccaccgcctccgccggtctgctgccccagcaggtgccgatccacccccgtgacctgcccgccgtgaccaatatcgagggtcgcatcaccaacggcaagaccgccacttctggccagttcccctaccaggtgggactcagcttcgccagcaccagcggcagctggtggtgcggtggttccatcatcgacaacacctgggttctcactgctgctcactgcacttctggtgcctccgctgtgaccatttactacggagccaccgtgcgtactagtgcccagctggtccagaccgtttccgccgataacttcgttcagcacgccagctacaactcgattgtgttgaggaacgacatttccctgatcaagaccccaacggttgccttcaccgcccttattaacaaggttgagctgcccgccatcgccggtacctactccacttacactggacagcaggctattgcctccggatggggcaagacctccgattccgccaccagcgtcgctaacactctgcagtacgaagtcttcgaggttgtgtccgtctctcaatgccagaacacttatggctctctggtagccaccaacaacgtgatctgcgttgctacccccaacaaagtgtccacctgcaacggcgactccggcggcccactggtcctggtcagcgacagtaagctcatcggtgtcacctccttcgtgtcgagcgctggttgtgagtccggtgcccctgctggcttcacccgtgtgaccagctacttggactggatcaagacaaacaccggcgtctcctactaagcacagcataaataaaaacgattaatgactaaaaccaaa

SEQ ID NO: 14001 - protein, 274 aa, DROSOPHILA
MKVLVVFALALATASAGLLPQQVPIHPRDLPAVTNIEGRITNGKTATSGQFPYQVGLSFASTSGSWWCGGSIIDNTWVLTAAHCTSGASAVTIYYGATVRTSAQLVQTVSADNFVQHASYNSIVLRNDISLIKTPTVAFTALINKVELPAIAGTYSTYTGQQAIASGWGKTSDSATSVANTLQYEVFEVVSVSQCQNTYGSLVATNNVICVATPNKVSTCNGDSGGPLVLVSDSKLIGVTSFVSSAGCESGAPAGFTRVTSYLDWIKTNTGVSY

SEQ ID NO: 14002 - DNA, 2999 bp, DROSOPHILA
gaaatgtgcatgtgtgttgaatttagttaaatatttttacgttttttataaacaaaatttaaattaaaattaaatgtgggagggcatggtcatcgggcgataatggagccattcgagcacactgtgcgacccctggcaaccttcaacttcatcgcagtgacatgtcaacggcagcagcagagacaccgacaacagcaaaaacaacaacaaaggccgtggagagcaacaacaaattgttggacaatcgttgaaatgaaatgaaatgaaatttcatattaaaacagtattagctggcggagatctctgtggcggcgcctgtcagaatcagtgcgcgccgctacattgcgttgggtcatttgaatgaggagcggcgattccaccccactttccacttccgccctccgcagaaatgaacccgcaacgccgccgaatccccccctgaaacagccacccctggcaccttgccatcaaattggacgcactgaagcatgagaaatgcggggacagcctcaatcaggactcagttcgagtgtaaaaacgaggcgatgagcagccgcgaaccgcttgacatttctctgctgtgcataattaaattaagagatgccaaatgcggtacacagtgcgaaaatgtgaatgcttatggtagaagaaaataccaagtggatatacggttattggtattcttgcactctgaaatgttatgatgcaatgattattgttattttgttattttgttatatatataaataacaatttctttttaacatgcaaaaattgtaatttttgtgtttcaaaatcattttccatggccttctttgcgctcagtgtaaattatgggatcatgctgctgggacattcctgccaaactgtttcactttcagttaaagccttatgcttacctttcacaacttcgtacacagaacaaacgagtaacatttaacattttaacaaacattaaaaaaaaaaaaaccaaatttcttcgaatcgccttgaacacaagatgaccaagtacttcaacacgcacatcctacaatcgctggtgggccagctgtccgccgagcatcgggatcgttatctgaaccggagcacggcgggccgctacgttctgtatgcctcctccgatccttgcaaggaacttcatccccggaccgtgaagaggagtttacggaatctgtttgcaacgaatgcgacgccgcatgaatgcgtcgtgagaatccgtgaggaaaagttcttgtatccgaagctggattgcctcaagatgacggcgaagccgttgggcttgaagagtgctatcgaaaatatgttgaaatcggaggaaagattcctcaggatgggcacaaattccgaatcctcaacgagtatcatcaatctggatgaacgggcaaggggcggcctcaacgcctcctatgatcccaatatgttaattggggagagtagtagtaacataaaagttctccatcataaccccactttctttagccattcctgcaccttcgggacagaaaatcgtctcagaagttgcatggattctctccatgcacagatacttaagaagtttgaggagaagcaagtggatgttgatgagccaagctccgcgatgaaccagatgtcgatgcaggaggcgagttccgaggttagctcagaggagaacgatattccggaacagctgatccatctgatcaattccttgaataatcgatggaatgagatccgccgacatgaggaaccgagcgaaatctacgttaacgtttttgaattattatggaatgccttgagctactgcatgcaaatcgttcgtcgattctttttcaacaggagggaggagccaggacaagggtcaattcgatcctatatggaccgggcacactatgcttcctttattctgggaccagccactgatgagtgcatagcgatcctagcggatcgcatcgttaccataatcaagtgggcaatgaataaggagctgcaaccttctgagattgcagacgagccgcagtagatgctattttcgcggtggctgtgcggcagtggaatttcccctccccaaaacctgcgagccgaagacggaaacggagcagcagctggggaatgcatcaaacatttactgcccctccaccagtcgctctttaaaacgtttgagtacctccgggatatcgtgttgctctcgactctctgtacccgataaccccgagaaggagccatcagtgttaattcgatgtgcgttcaatccttgtagccaaaattttaagtaaaggaatataatatagcttctgggttttttaatcgacgactgactaaccttgaaacccactggttccatggcgggcgtgacgagggcggcgggattaagctcgatgttgatgttgttgggctccatgatgagccccaggctctgaagattgcacacctccggcagctgtagggtgggcgtgggcaccttgagcaccgccacggtgcagtcgatgctcgacgccgtcaccgtcgcagtggcgggcagcgtctccggcatgctggccaccgcttcagacggcaccgacctctgctcctcggcgctgctcctccgcctcccgatccctatgctgacaccgatcttgactgggttggtgctccgcgtcgcaaatctgcaagatagttgacattcattagattttaagacttgtagactgcatttcactttcattcggaacggaatgctaattggatcaaaacttattacgcaaaagcctaaaagtatagaaaaaaaaagtggcatgtgttggtgggtattatgggattatggagcatactttcaggcaacgaaacaatgcccacatatcaaacttgcatgataaagtcgtgcacatattgaacaaatattgaaccgaaacccgagaaaaacaattggttccggcttaaatgcgagtcgcttctgcgtttatttgtttctttttagtgttcattttggtataagttgtccgcacttattcctatggttacactgtagacctaagcatagtagc

SEQ ID NO: 14003 - DNA, 999 bp, DROSOPHILA
atgaccaagtacttcaacacgcacatcctacaatcgctggtgggccagctgtccgccgagcatcgggatcgttatctgaaccggagcacggcgggccgctacgttctgtatgcctcctccgatccttgcaaggaacttcatccccggaccgtgaagaggagtttacggaatctgtttgcaacgaatgcgacgccgcatgaatgcgtcgtgagaatccgtgaggaaaagttcttgtatccgaagctggattgcctcaagatgacggcgaagccgttgggcttgaagagtgctatcgaaaatatgttgaaatcggaggaaagattcctcaggatgggcacaaattccgaatcctcaacgagtatcatcaatctggatgaacgggcaaggggcggcctcaacgcctcctatgatcccaatatgttaattggggagagtagtagtaacataaaagttctccatcataaccccactttctttagccattcctgcaccttcgggacagaaaatcgtctcagaagttgcatggattctctccatgcacagatacttaagaagtttgaggagaagcaagtggatgttgatgagccaagctccgcgatgaaccagatgtcgatgcaggaggcgagttccgaggttagctcagaggagaacgatattccggaacagctgatccatctgatcaattccttgaataatcgatggaatgagatccgccgacatgaggaaccgagcgaaatctacgttaacgtttttgaattattatggaatgccttgagctactgcatgcaaatcgttcgtcgattctttttcaacaggagggaggagccaggacaagggtcaattcgatcctatatggaccgggcacactatgcttcctttattctgggaccagccactgatgagtgcatagcgatcctagcggatcgcatcgttaccataatcaagtgggcaatgaataaggagctgcaaccttctgagattgcagacgagccgcagtag

SEQ ID NO: 14004 - protein, 332 aa, DROSOPHILA
MTKYFNTHILQSLVGQLSAEHRDRYLNRSTAGRYVLYASSDPCKELHPRTVKRSLRNLFATNATPHECVVRIREEKFLYPKLDCLKMTAKPLGLKSAIENMLKSEERFLRMGTNSESSTSIINLDERARGGLNASYDPNMLIGESSSNIKVLHHNPTFFSHSCTFGTENRLRSCMDSLHAQILKKFEEKQVDVDEPSSAMNQMSMQEASSEVSSEENDIPEQLIHLINSLNNRWNEIRRHEEPSEIYVNVFELLWNALSYCMQIVRRFFFNRREEPGQGSIRSYMDRAHYASFILGPATDECIAILADRIVTIIKWAMNKELQPSEIADEPQ

SEQ ID NO: 14005 - DNA, 2968 bp, DROSOPHILA
taacataatttcgctcttaacacatttaacacattgttgtgggcaaaagacagcttcaatcgtgccgccgactgagatgagattccgaatcgaagtccgagtccgagctaagatccgattgcgagtccagtcgttttccgaactatcgtgattcacccataattggcttataatttatgcacaaataaaagaaaaataaccgatctcttggctgtttcaatcggattgttttgttatatttgcttgaatatgtatacagaaccgcttatttgttaatgatttcaacaaaaaagtgatcgtcagcttaataaaattaatgattagactttgtttttatggctaatcaggtttcgattgggcataaatcttcattgccttcgtatgtgggttgcacttgagattcctttctaattgtacgtgacacacgacgggcctcggaaaccaggtcatctaacagttgttggcatcttcgcgaccttgagctgtcgtcgggaaagaaccagttcctcgttggccgggagtccggtattaatgcttcccgctggccaagtgggtggatctaatcttgtagtcaattaatttggcggcatgcgagttggctatgtcagataattagtccattgatttgtatggaaagtctaggtgaatatgattcgacgagggcttaaactcataaaggaaacctgctccgaactgcctttcctgatcttgatgtcgtcaattcgagatatttatagtttgaagggcactttttatacttaacccatccgcaaacaatcaagccaaacaaggcggacttaatgcaccattagctactatggccaagccgcaataaaaatctcactctataaaacacataaggtagacctttgtttaaattttcgtatttaaatttcaaatttattggtgtaattatgcattagtcaacaacgtgtaacaggaagaatgagttcttcagtcgagatttgcttaagttaatggagtccaagatgtagccttcctagaaacgcagacgacggaacacagaagtgggcaggtaggcgttgtcggggatctgggcgttagccttctggacgggtccagcggaggcgaagttcagggcgggtgcaacaccaccatcatgagcctgagaggatcctcccagctggtcgtactgaccctggatggcgcgctgggcgttggcagcatcctcgggagtgcggtacttgacgaagtgcacctcgggcttgttgttgttgttgttgcggatggcgttcagtttctgggcaagatctccaatatcagcctgcttgttcaggacatagatggcggtctcctgctgggcagcctgcttggcgagggccagggcagcgttctccagaccacggttctcgggtcccttgatgaagacaacgcgcagtcccttgtttacggatccagcaacacgctccagttcttgtggctcatcgaagtcctgctcgttggcggagtaggtgaagaattccttctggagctcagcagcgggagcgggggcgttgtaggagactggagcggccagagcgtcgccacctcctagaccaccgagtccaccaagaccgccaagaccggaatcgatggagccaccaccgatggaaccaccaagggatccacctccgatgcttcctcctccgatagagccaccaccaatgaggcctcctccaatagagcctcctccaatagaacctcctccgatggagcctcctccaatagatccaccactgatagagccgctgccaggagcgaaggacagtccggagctggagtggccaacgggctggtagttgtagccgagcttatcggcgcaggtgactgccaccaaacacaggacctggaggcatgaaaagagaagtgttatcctggcgtataatcctttgaatccttaaccgcgctacttacaatgaatgcgcgcatcttaagcagattgctggttcttttgctttgaggtatgagttgcttgtgtctctggctaggagcgatctttattatttatacaaatccatcttggaggctgataaagacaaagataccgccgcggcgtctgctgcacggagatttctttgaagccactgtgttttgccgcctacaaaggtttttgcttcctctgttttttttaatgttcggtgtggaattttttggttgcgtttcaatgggcagagtctggccgtcgtgggttattcaaatatttcgagtttcgtccaatagtttacaagaattcatattgaattataaaattaatatgtcgcgagcacgtcggaatgagtttaacatgcagatgggtcataattaggtacgagtattatataaaatacatttttttgacaaattcttcggcaaggctaaaagcttgttttatgtaggacatctgcacttggtttttccgactgaatgacaatcgtttagtcattataatcgttttcgacacatctgtttagttctgatttatggacatgatgcaagcgctaaatttagcaagtcgtctaatgagatgtttgaaatgccgcccccagttcattgattctttattttcgcatatattactaatgaaataaaaaatttaacttgagagtggtgaaaacgatatgtttatatttaatttaacttttttgtcgtaaaaacattttgcctacatttaaaatatgcggaaatattttattttattcttttcccagtacttcgtaggataatattttggttatgacaaatattaaacgtcaaggtcatcgggaagctgccttgggtaatatagcttaccaaattcttaatgagttttaaaggtcttttgctttgtattaagttaatagcgttgcacctttttaagaataaattcaaattaaaagtcattaccaaactttttgtgcaataaaaacaggtcgaaaaatctcaccaaagactgaaataattttctaaaagcccaacttgtaactccactcatgttgtcatcggaaggtat

SEQ ID NO: 14006 - DNA, 900 bp, DROSOPHILA
ctcatacctcaaagcaaaagaaccagcaatctgcttaagatgcgcgcattcattgtcctgtgtttggtggcagtcacctgcgccgataagctcggctacaactaccagcccgttggccactccagctccggactgtccttcgctcctggcagcggctctatcagtggtggatctattggaggaggctccatcggaggaggttctattggaggaggctctattggaggaggcctcattggtggtggctctatcggaggaggaagcatcggaggtggatcccttggtggttccatcggtggtggctccatcgattccggtcttggcggtcttggtggactcggtggtctaggaggtggcgacgctctggccgctccagtctcctacaacgcccccgctcccgctgctgagctccagaaggaattcttcacctactccgccaacgagcaggacttcgatgagccacaagaactggagcgtgttgctggatccgtaaacaagggactgcgcgttgtcttcatcaagggacccgagaaccgtggtctggagaacgctgccctggccctcgccaagcaggctgcccagcaggagaccgccatctatgtcctgaacaagcaggctgatattggagatcttgcccagaaactgaacgccatccgcaacaacaacaacaacaagcccgaggtgcacttcgtcaagtaccgcactcccgaggatgctgccaacgcccagcgcgccatccagggtcagtacgaccagctgggaggatcctctcaggctcatgatggtggtgttgcacccgccctgaacttcgcctccgctggacccgtccagaaggctaacgcccagatccccgacaacgcctacctgcccacttctgtgttccgtcgtctgcgtttctag

SEQ ID NO: 14007 - protein, 286 aa, DROSOPHILA
MRAFIVLCLVAVTCADKLGYNYQPVGHSSSGLSFAPGSGSISGGSIGGGSIGGGSIGGGSIGGGLIGGGSIGGGSIGGGSLGGSIGGGSIDSGLGGLGGLGGLGGGDALAAPVSYNAPAPAAELQKEFFTYSANEQDFDEPQELERVAGSVNKGLRVVFIKGPENRGLENAALALAKQAAQQETAIYVLNKQADIGDLAQKLNAIRNNNNNKPEVHFVKYRTPEDAANAQRAIQGQYDQLGGSSQAHDGGVAPALNFASAGPVQKANAQIPDNAYLPTSVFRRLRF

SEQ ID NO: 14008 - DNA, 3860 bp, DROSOPHILA
agaaccaagtttctaatatctccgaccaccacaacgtcactatagttgcttttcggtagcacatactcctgtcggaagatgagctcctcctcctggtctattgtgcgcaggaacctgtagccattggtcataatatagcgctctcttgcgttttccagatcgttgtgcgcctgaaagtggaggcagtctttctccgagtcccatgaccacttgccgctatagtactttggggcgtagttatccacatgaatgcgcttcattgcgtttggcagtaaataatggtataaatttataaaatcgtattttagtcaaaagcagtgaaaaatcagtgtcgttacattgagagttaaatatttatgttcctcaaaaagactgaaatttagatgctgcagcgactccgattatttaaaagaccaaatacaataatttccaagggcgtgatttttctgtcaatctgtattctcagaatttgtattttccggtaccacgctgatttaggtgaccggtgtttcccggactgtgctaagcatgttccgccgcactaatgccgatccggtcatacggcaatttattctgcgcactgcagtcctcaattatcttggcaagagtctgcgagagcagtataatgaatattgccttttgagaacccagcacgaaaatattaggctgaagactgcgagtgatcaagagcttgaggacctgccgactctttccgagctatttgagatgcaacagttgaagacggctgccacccatcgtctgctgatgcgggagtaccaagaattgcttgcctacatgatggacaagagtgatttgtgggacagtcaggagtacttcaaggccaagtctgcgcttggggcggccatccacaatctacgggtttgtgcacccaccaaaccaatggactaaaaccagtcgagaggaacatttgccagatagaattccattcaatcagtatatatacatacataaatagtgaaacgatccacgagcgacttaactacttgtagaagggtatctccacgcgtccggatttcgtgttaaccgcctcccagcaggtgcacgcaaaggttgagcggtccatgtgatcggtgtatagttttccctccaggtgatccatttcgtgctgcgctatccgggcattccaaccactcagagccagttcgctttggtttcctagttggtcaaggcctgttagctttacaccttcgaaacgctccacttcggcagagtaacctcgcacactcatgcatccttctggatgcttcagcttcgcgtagttggtcaccgtcaggacgggattgatgaaaatctgtaagaagcaaaccattgtattatagggtttgggcttccgaacacagctagttaggaccccagtctcacagtcagtggcaactcggacatttgtcgggcttggtaaacggcctcgggcagctcctttcggatccgtcccttgaactccattgctatgatcctgagcgatactccaatctgaggagccgcaatgccgacgcagtcgaacttccttagcaccttgaccatccgctcgacgatggccttaatctcggggctagccatgtgctccttgggcaccaaagccgcttgttgcctaagaacagggtcaccaatctgggtgaaatggttgtatggcggcaagtttgtgcgctccgtggtccacaggtgctggtaccacttcctgaacgactgattagcgggaggactcgttccaaaggatcgacaatgtcccagaatcgcttggcatacttttatccgtggtttcaggtgcattttgtgaaatgtttagcctcctttaatattccgatcaaaatcgtagggaatatagttacacaacacggtcatactggccagctgaccggctagggatgtgaaagtatgtacctatcgatatatcggtggaaatagatttgatatttggcgcgcttttaaatatatgctaggtgcataaaatactttttccccgcacacaaagtttatttcgtaaacagcgcattcatttcagaagtgtattttattttcaaacaatatacaaatatgttgtataaagcgccataaaaaagtgaaaagctccttgaattaaatgcaaccaagttattacttgtgaaaccaaatggcggatcgaccttcagctgcgttgatttgctcccagaggatgcagttgaaggtggagagatccatcctatccatgtagatagttccattaaggtgatccacctcgtgctgggcgatccgtgcgttccagccctccagttccatttccgacggagtgcccagcttgccgatcccccggatccggaccttatcgtaccgttccacctcagcggaatagcctcgcacactcatgcaaccttcgggatgcttgtttacttggctgctgattatctccagctccggattaatgaagacctgcaagcaaatgatttatgatgagaaatcacgggattgttgctgcacataagcaatatttttgtatgcagaaatttagtttctcaaattcatacgtttataaaactgcatagatttacatatatttttcgaacgcgaaaagaaaagctttacttacggccaagggcagtatggacatcttacgctcctcgtagatttccggcttgaattgctcttgctttccctctcggaattccataacgataatacgcagcggtattccaacttggggcgcagccacgcccacgcaatcgtagtgacgtaacacctttaccatgccgtcaataatctggttgatctccctactatcgatgtcctcgggcggcacctcttctgccctttggcgcagaacaggatccccaatttgggtaaaatgacgatatggcggagcggacatgattctggtcggaagaagatctctactgaaccgtgtctatcgagcaactactgcacagagctgtcgaggtggacagattttgatacgatagccttatctggggatcagctgatctgccatttgaaacactgggaacgataagtctacggttcgcattttaaagcggaaatatataccttaaaaatccaatacaattttttaaaaatactagtaatatcctacaatattagtaacaacaatattgccaagctttcaagatttataagtattttattcacgaataaataattttgaagtatttgaagtctcttgaaaacctaatggatgtgtacgacctcaaatcaatcgaaatagtattcctgtggcgttttcttttggcgcggcgaattgaagcccccgatccgcgaggaggtgatgctaacgttgtccggttcatatggagatcccttgcgcagcctggacttcaccttaaagtaattggatatgacctggtcgaccttggttaccggtaccttttcggccagttccttctcgcaccgggataccacgttggtgagcagcagtcccccggagcgatagaactggacgagcttgtcccgcttgagccacttctgcaggatctgcacgctgtgcggctcgtagatgcgatacaccttgtagaaatgctcgtagttttcattcatcttgcgcgctttcaaggcgtcgatcttgggaatgtccaagtgcggctggcgaatgatgtggtacggatcgtagccaagcgaaaagtttgagtagcgaactgtgggccagtccaggtctaggatggtgttgtacagatccttcggatgtcccagtatgccgtgtgccacatcgatcatacgcagctgtggtcccggcacaatgtactccagctccatctcggcaatgcgcttgtcgttgcctcggtactttcgctcgccaatccacaggatgggcatgtcctcctccgccacgtgctccaactcctggacgagcggcg

SEQ ID NO: 14009 - DNA, 1212 bp, DROSOPHILA
atgtccgctccgccatatcgtcattttacccaaattggggatcctgttctgcgccaaagggcagaagaggtgccgcccgaggacatcgatagtagggagatcaaccagattattgacggcatggtaaaggtgttacgtcactacgattgcgtgggcgtggctgcgccccaagttggaataccgctgcgtattatcgttatggaattccgagagggaaagcaagagcaattcaagccggaaatctacgaggagcgtaagatgtccatactgcccttggccgtcttcattaatccggagctggagataatcagcagccaagtaaacaagcatcccgaaggttgcatgagtgtgcgaggctattccgctgaggtggaacggtacgataaggtccggatccgggggatcggcaagctgggcactccgtcggaaatggaactggagggctggaacgcacggatcgcccagcacgaggtggatcaccttaatggaactatctacatggataggatggatctctccaccttcaactgcatcctctgggagcaaatcaacgcagctgaaggtcgatccgccatttggtttcacaagaagtggtaccagcacctgtggaccacggagcgcacaaacttgccgccatacaaccatttcacccagattggtgaccctgttcttaggcaacaagcggctttggtgcccaaggagcacatggctagccccgagattaaggccatcgtcgagcggatggtcaaggtgctaaggaagttcgactgcgtcggcattgcggctcctcagattggagtatcgctcaggatcatagcaatggagttcaagggacggatccgaaaggagctgcccgaggccgtttaccaagcccgacaaatgtccgagttgccactgactattttcatcaatcccgtcctgacggtgaccaactacgcgaagctgaagcatccagaaggatgcatgagtgtgcgaggttactctgccgaagtggagcgtttcgaaggtgtaaagctaacaggccttgaccaactaggaaaccaaagcgaactggctctgagtggttggaatgcccggatagcgcagcacgaaatggatcacctggagggaaaactatacaccgatcacatggaccgctcaacctttgcgtgcacctgctgggaggcggttaacacgaaatccggacgcgtggagatacccttctacaagtag

SEQ ID NO: 14010 - protein, 403 aa, DROSOPHILA
MSAPPYRHFTQIGDPVLRQRAEEVPPEDIDSREINQIIDGMVKVLRHYDCVGVAAPQVGIPLRIIVMEFREGKQEQFKPEIYEERKMSILPLAVFINPELEIISSQVNKHPEGCMSVRGYSAEVERYDKVRIRGIGKLGTPSEMELEGWNARIAQHEVDHLNGTIYMDRMDLSTFNCILWEQINAAEGRSAIWFHKKWYQHLWTTERTNLPPYNHFTQIGDPVLRQQAALVPKEHMASPEIKAIVERMVKVLRKFDCVGIAAPQIGVSLRIIAMEFKGRIRKELPEAVYQARQMSELPLTIFINPVLTVTNYAKLKHPEGCMSVRGYSAEVERFEGVKLTGLDQLGNQSELALSGWNARIAQHEMDHLEGKLYTDHMDRSTFACTCWEAVNTKSGRVEIPFYK

SEQ ID NO: 14011 - DNA, 3193 bp, DROSOPHILA
cttcgcctaaggataaattcagcacctctcagcttggcaggctccgaataaccgatttttattaacacaaacaaggcattaatatcaattttggcatcacttgactggcgagcagataattacgggtcagcagctgctgttccctggtgtcgagaatcgagagtaaggtcctcctgatctgcccccaattgtcagaagaaatcagcgccaattggcttcaaagcaaatatttgccccgagtggcagttaaagcgcagtctgttgataatgacgggatcggggtgccaggatctgggatctgtgatctgagttcgcagggagcaactgctgccatttcacaccatgccatgccgaaaaggtgcgatggctggcacacctttgggcaatatccaccttgttggctgtgtcaattccgggaatgacagggatttcggctccactcgggcaataaaacgttgcagcaaattagcgctttattgcgtgtttgtttggtcagagttaagccaaccggataaggatgccaagtcaatctccgtcagcgtctggctggctctttgccacctaaccaattcgaactccaattccgtgatccgttaaattcttgttaagacaagggccgagtgcaaattatagccaggggccaagaaacttattgcgaaggccataataacatacagagcagcgcagaaaacccatataattcatataatactcgtgatatatgtaagcttttattgacattttgaagcacctgcttgaggttttagcccgttcagcgtttatcacacagctatttacacgtcatcgttgcgccgatgagtccttgtcttcggttccttacagttccttataggcattgcatatagctcagctatcgtaataacggtgcaccgcttgtaggcctggctatttcgacgccactagcgccttatcacatgtgttttcggtatttagggagtaccagttccagtttccagttttgggcatgccctgtactaacctagacgaccagatcaccgctcagacactgcggggtataaacgttggccaacgagtcccagccacagtcggccaactgatgggtcctgtggggattccaatccaatccgcacacgaactccgtgtgccgcgcattgacctcctgggcggactcaccacgctccagattccaaatcctaaaaaggtgacaaaagtggacagttgttactaaccataaaaatgtcctgttttttgaaagcctaagatcattccacttaccttgtggtaaaatcataattggccgatgccaagaccgctgccgagtgcggtgaacaggccaatcgccggacagcgaattctccagagtacagctcaaagacgtgcgtcctcatcttgcgcagatcccagccgcggatcagaccgtccgaacctccagtgaccaggacattgcgatcgaagtgcgaccagtcgcagcatagtgcctcactcgcatgcgcctcgatgctcatcaggggtttacctgcaaagtcaagagagttccataagttaagatgtccatcggtacttacgcttgcaaacagattggcgatcaggggcgagaacttggccccgtagatcagatcgttgtggcccacaaatgtggtgatggagttctgtctgttgcagtcccacaatttcagtgtacaatcccagctgcccgagagcagcgtgtggtagttccacttctcgccccagtccaggctgtacacctcgttcttgtgctcctgcaggcagatcagcggctgtttcggcgtcagctggttgctcgccgattcgccatccaatccgcaccagatctgaagcgatccatctccggaggcagtggcggcgatatcggcggcatacggacaccaggcgacgtcgaacaatccatcggaccactctaggcggcacagctctccgagactctggccatctgtggatgaggaatttgtgttggagttctgttccagcagaaagagggaaccacctccagcaagaccgtacagttggctgggtatcgaaaaaaaatggttttctattagtatattgttggttttagagcttaagattgatctcaccttgtagctagcagcaagtagttagcctcgaaaggcgaaaagcgcaggctatagccatgtcggtctgtggtggtgtgtgtctgtgtctgcatcttggttctagatctcaactgcaaagaaaaaaaaaggagagattcaaaataataccaatttctctggaccttaaatattatctaacattaactacaatgaattgcgacctttggtaagctagttgtaagaaatgccaatttcaattatacctctcacattaaaatcaatatatcgacgtttgatacataacaaaattaaaaacatctaaggtttctccttgctgcccactgatgtttggctaagagagaacaaaactggccgattgataacaacccggtaacaccaaatcggatgctaatccagctccaacctaccatgctcaattattcaacagttggccaaatgacctcgtactaggtcggaaaatcggaaaaagatacttgacattagccaatttgctcgggcaagtggcaaactgcgcagaaaatagaacaacccctggaagcagcttgtttgcagttttcccttagttcctatggttctatcttattgtcgtgttggacaagccaacaaacaagtgcataacgagcaaatccagttagtggccagaatgaagacccacggacagggccagggcaaaggtatataagcaggttgtacggcacttgggtttcgcattttcctccgccgaacggaaaactctataacgcgcatcgcccgacttagcctcgaattgcccagttgcatttgccaggaatcaaagaaatccactaatccacaatggttgtatccgtgaaggtctttaagaaggccacgcccaacggcaaggtcaccttttatctgggacgccgcgacttcatcgaccacatcgactactgtgatcccgtcgatggagtgattgtggtggaaccggactatctaaagaacaggaaagtctttggccaactggccaccacctatcgctatggtcgcgaggaggacgaggtcatgggagtgaagttctccaaggagcttatcctgtgccgggagcaaattgtgcccatgaccaatcccaacatggagatgacaccgatgcaggagaa

SEQ ID NO: 14012 - DNA, 1043 bp, DROSOPHILA
tgcagttgagatctagaaccaagatgcagacacagacacacaccaccacagaccgacatggctatagcctgcgcttttcgcctttcgaggctaactacttgctgctagctacaagccaactgtacggtcttgctggaggtggttccctctttctgctggaacagaactccaacacaaattcctcatccacagatggccagagtctcggagagctgtgccgcctagagtggtccgatggattgttcgacgtcgcctggtgtccgtatgccgccgatatcgccgccactgcctccggagatggatcgcttcagatctggtgcggattggatggcgaatcggcgagcaaccagctgacgccgaaacagccgctgatctgcctgcaggagcacaagaacgaggtgtacagcctggactggggcgagaagtggaactaccacacgctgctctcgggcagctgggattgtacactgaaattgtgggactgcaacagacagaactccatcaccacatttgtgggccacaacgatctgatctacggggccaagttctcgcccctgatcgccaatctgtttgcaagcgtaagtaccgatggacatcttaacttatggaactctcttgactttgcaggtaaacccctgatgagcatcgaggcgcatgcgagtgaggcactatgctgcgactggtcgcacttcgatcgcaatgtcctggtcactggaggttcggacggtctgatccgcggctgggatctgcgcaagatgaggacgcacgtctttgagctgtactctggagaattcgctgtccggcgattggcctgttcaccgcactcggcagcggtcttggcatcggccaattatgattttaccacaaggatttggaatctggagcgtggtgagtccgcccaggaggtcaatgcgcggcacacggagttcgtgtgcggattggattggaatccccacaggacccatcagttggccgactgtggctgggactcgttggccaacgtttataccccgcagtgtctgagcggtgatctggtcgtctag

SEQ ID NO: 14013 - protein, 339 aa, DROSOPHILA
MQTQTHTTTDRHGYSLRFSPFEANYLLLATSQLYGLAGGGSLFLLEQNSNTNSSSTDGQSLGELCRLEWSDGLFDVAWCPYAADIAATASGDGSLQIWCGLDGESASNQLTPKQPLICLQEHKNEVYSLDWGEKWNYHTLLSGSWDCTLKLWDCNRQNSITTFVGHNDLIYGAKFSPLIANLFASVSTDGHLNLWNSLDFAGKPLMSIEAHASEALCCDWSHFDRNVLVTGGSDGLIRGWDLRKMRTHVFELYSGEFAVRRLACSPHSAAVLASANYDFTTRIWNLERGESAQEVNARHTEFVCGLDWNPHRTHQLADCGWDSLANVYTPQCLSGDLVV

SEQ ID NO: 14014 - DNA, 4078 bp, DROSOPHILA
caagccgaagatagggtaccctcaaatgggggatgagatttggtaaaagtcttgccagaacctttaaggcatgcaagtagtaaatacttaacaatttgtgattaaataactcgctaatcttgatcttatcttactgcaaatcatcgattttgctaatacaattgttttcatttaaatttctaactgttgcagatatttatttatcttaaaattaagttcagtctttactttcacaccttataggaaatgaagacaatatgcaaaggcaaatcaaaataaataagtatgcagtatcaactatgtttgttatcgtataaaaatgtttcgatttatttatcatgttatcatggtttaataacttgatttttagctaacccattcatagctttattttccacaccgtcttgtttaacaactttttagtgcgtcttacaccaagtagttggcttaaagaataaaaaactcaattgaaacaacaattacgataaaatctaaaacataactacccagaggaatttaaaaggtatatatgtaatcgcatacatattctagcttccaatcgcacagagttagagatgatgaagcatttattatggtcggggggaccacttcgttccacacaacttacatactttcgaactcactcccaatcccaagggctagcgggcggacttcgccgcagggcatagattcgggtaattgttgtggaatcacttgattgctacaacatgttggaacatgtgttgttgctggagtcgggcttttaattagctgctttggctctcaagtgattttgggcgctctcaatgacgctgcgccgcctccacctatcatctgtcacctggttttgtgggtgaaactatggccaactgatttacggctctgacttgcggtgcttgactttctcggtcgacgtcgctgctttagttatcgcatgaaaagcgatttttccagcgtaataacggtcgcgtggcgaattcagttcgtttccggcgatcgacaaggaaacacctataaaaaccaatttaaaaaaaaaacccctcgccatgtccaagggatcggtgttgccacaatatattgctggcttgtcggccagctttggtgccctctgcatgggcgcctccattggttggtcctcgcccgtggagaatatgataacggtgaacacggaatacggctttcccattagctccagtcagttcggctgggtatcctcgctgctgaccctgggcgccactgtgatctgcattcccattggtttcgccatcgattggatcggcaggagacccactatgttagccctaattccaccgtacatggtgggctgggtgctgatgctgttcgccaaaaacgtgaccatgctctacttcggacgattcattcttggcatgtgcggcggagccttttgcgtaacagctcccatgtactgtacagagattacggcgacagcactacgaggcaccatcggatcctttttccagctgctgattgtgtcgggcgtgctgtacggctatttggtgggcgccttcctgcccctgctcaccatcaatatcctgtgcgctattctgcccgtaatctttgctatcatacacttcttcatgccggagtcacccgtctacctggccatgaagggacgcaacgatgatgccgccaaggccttgcagtggctgcgcggcaaggatgccgatatcgatgacgagctcaaggagatcctggaggagtcccagaagcagattgatatgccacaggttagttaacattccactaataatcaatcaatcaatcaaaatcgatcgatattgaaggcataaagaaactttataaagggttcgcagggctttaacagatttattactctttccattatcacacaatcggaagtgatacatacatatacttaccctgataaaagaaatgttgtaaattcagatagtatataatattttgttttcattcattaagattttcaataacttgaaccaagatagggtttgcattaaacttaaacgatttcgtagttaaactacatatgaacacaggtacgtaatttgtttccattattccatttagtaatcagtgtagcagatactacttatcatacctaataaatacattgattttggtgaagattagaaaataatacgtggtcttatttttattgcaggtcaacattctgtcctcccttcgtcgacccatcgtcctgaagggtcttggaatcgctgtgctcctgcaggtcttccagcagtggacgggaatcaacgccgttctcttctactccgcctccattttcgaggatacgggctctgacataagtggcagcgatgccacgcttatcattggagtcacccaagtgaccagcacgctggttgccgtggccattatcgacaaggctggccgtcgcatcctgctccttatctctggcgttctgatggccgtgtccactgcactgatgggcgtgtactttcagctaaaggagaacgatccggcttcaatggacaatttcggttggttgccgatcagcagtatctgcattttcataatcttcttctcgattggattcggaccggtgccgtggctggtgatggcggaactcttctcggaggatgtgaagagtgtggcaggatcgattgccggcaccagcaactggctgtcggccttcgtggtcacgctgctcttcccaatcctcaagagctcgatcgggccgggtccgaccttttggatctttaccgcgatcgcggtcatcgccttcttctactctctgttcttcgtgccggagaccaagggcaagacaataatcgaaatccaggacctgctgtccggaggaaagggtgtcaaaagtgatgacaagagccagacgtgatgatgtcgcgtagtcttagtcgtagcgatactttttcatattctccttaagccaataagaaaatgttatgtataagaagtgaagagcataatcaataaagtagaatcaccatgtatataaactacccgattgaattttcgttcatttccgtcagtgtagttctaattagactcaattagtataattctaattagtttgacaagattttaagtcttggaaaaaaatgaggaaataagaaactttactcgtatggaggagggctgcaaacgaaggtctaaatgatctaaggatagtatgggtcaaaaagtgatgtgatatattcttaacaattggtattgattaagaattcaaataataaataattcacgaacttacactaccgaaaatgcttattattttgttgcagatttcgataaaaatggaaacgtttattatttccggaaggtatattattggcagcgagcatttcaaaacaaatttatttatgttgcggtttgtggtaataatttaagttcaaagaaccgcactgcgtagtgtgaccagtccgttttgaaacacaattcttaatacgtttgacacaaggcatcttataagagccgctggccactctgtcaccggcttctttgttctttaatcgtaaattatttgacttcaaattgtaatatcaaaatatcccgaagactctgtaaccaagagcgaagatatggaagatgtggaaatcaaggtaaaatgaattggcttgcgctctcgcttattgcaaaataattaacaaaatcctttccagcctcgcggctatcaacttcgcctggttgaccacctaacgaagagcaatggcattgtctacctgcccacaggatctgggaaaacgttcgtggccatcctggtcctaaagcgcttctcgcaggactttgacaagttagtagcgaatggatatacatatatatattattatatgtattacctatatccgatacttacatttatatatatattattatatgtaatacctatatcggattccgatttgtttacacagacccatcgaaagcggcggaaagcgtgcgttgttcatgtgcaatactgtggaattggcccgacaacaggcgatggccgtcaggcggtgcaccaactttaaggttggcttttatgtgggtgaacagggagtggatgactggacgcgcggaatgtggagtgatgaaatcaaaaaaaaccaagtga

SEQ ID NO: 14015 - DNA, 1662 bp, DROSOPHILA
caaggaaacacctataaaaaccaatttaaaaaaaaaacccctcgccatgtccaagggatcggtgttgccacaatatattgctggcttgtcggccagctttggtgccctctgcatgggcgcctccattggttggtcctcgcccgtggagaatatgataacggtgaacacggaatacggctttcccattagctccagtcagttcggctgggtatcctcgctgctgaccctgggcgccactgtgatctgcattcccattggtttcgccatcgattggatcggcaggagacccactatgttagccctaattccaccgtacatggtgggctgggtgctgatgctgttcgccaaaaacgtgaccatgctctacttcggacgattcattcttggcatgtgcggcggagccttttgcgtaacagctcccatgtactgtacagagattacggcgacagcactacgaggcaccatcggatcctttttccagctgctgattgtgtcgggcgtgctgtacggctatttggtgggcgccttcctgcccctgctcaccatcaatatcctgtgcgctattctgcccgtaatctttgctatcatacacttcttcatgccggagtcacccgtctacctggccatgaagggacgcaacgatgatgccgccaaggccttgcagtggctgcgcggcaaggatgccgatatcgatgacgagctcaaggagatcctggaggagtcccagaagcagattgatatgccacaggtcaacattctgtcctcccttcgtcgacccatcgtcctgaagggtcttggaatcgctgtgctcctgcaggtcttccagcagtggacgggaatcaacgccgttctcttctactccgcctccattttcgaggatacgggctctgacataagtggcagcgatgccacgcttatcattggagtcacccaagtgaccagcacgctggttgccgtggccattatcgacaaggctggccgtcgcatcctgctccttatctctggcgttctgatggccgtgtccactgcactgatgggcgtgtactttcagctaaaggagaacgatccggcttcaatggacaatttcggttggttgccgatcagcagtatctgcattttcataatcttcttctcgattggattcggaccggtgccgtggctggtgatggcggaactcttctcggaggatgtgaagagtgtggcaggatcgattgccggcaccagcaactggctgtcggccttcgtggtcacgctgctcttcccaatcctcaagagctcgatcgggccgggtccgaccttttggatctttaccgcgatcgcggtcatcgccttcttctactctctgttcttcgtgccggagaccaagggcaagacaataatcgaaatccaggacctgctgtccggaggaaagggtgtcaaaagtgatgacaagagccagacgtgatgatgtcgcgtagtcttagtcgtagcgatactttttcatattctccttaagccaataagaaaatgttatgtataagaagtgaagagcataatcaataaagtagaatcaccatgtatataaactacccgattgaattttcgttcatttccgtcagtgtagttctaattagactcaattagtataattctaattagtttgacaagattttaagtcttgga

SEQ ID NO: 14016 - protein, 465 aa, DROSOPHILA
MSKGSVLPQYIAGLSASFGALCMGASIGWSSPVENMITVNTEYGFPISSSQFGWVSSLLTLGATVICIPIGFAIDWIGRRPTMLALIPPYMVGWVLMLFAKNVTMLYFGRFILGMCGGAFCVTAPMYCTEITATALRGTIGSFFQLLIVSGVLYGYLVGAFLPLLTINILCAILPVIFAIIHFFMPESPVYLAMKGRNDDAAKALQWLRGKDADIDDELKEILEESQKQIDMPQVNILSSLRRPIVLKGLGIAVLLQVFQQWTGINAVLFYSASIFEDTGSDISGSDATLIIGVTQVTSTLVAVAIIDKAGRRILLLISGVLMAVSTALMGVYFQLKENDPASMDNFGWLPISSICIFIIFFSIGFGPVPWLVMAELFSEDVKSVAGSIAGTSNWLSAFVVTLLFPILKSSIGPGPTFWIFTAIAVIAFFYSLFFVPETKGKTIIEIQDLLSGGKGVKSDDKSQT

SEQ ID NO: 14017 - DNA, 4147 bp, DROSOPHILA
cactatttctccacccacggtgccggtggcttgcgacgcgccgccggagtaccctggctcttgtctccggatcccgccgttgattttcccgttttcaaaaaggcttgcataccggtttccttgtttcttgacaaaattacaaataaagcaggacgcaaatgcaagttaagcgcgcgtttatcgataacaagttgtcgcgagttgaaaggttgccggtagcagagctgccagctagagcgaagcaattgtacacctgtaaaaacttctgtgtattacaaaagtttgtatcaaatgtaatactaaaaatgttatattaaaacattttttaatatttgtacttataaaattacacttttgtacagatttttttatttgcaaataatttgaatttaaaatgaaaacaatataaacattagattctcgccgcgtaggtgcatccatctatccggcaaccctggcctgcatcgcttttgtttttgttgcgtttttttattgcgctgataactacgggttttttagttttttataaaggatataaatagagcggctttcgcaggcagggtggacaaacatgattaaccgcccagcacagcgcgtgccaacgagtgttttataagagcccgatttggattctgattttgatttgctattgcctttgcctctgccattgcgattgttattgtttttgtgccccgccttcgccccacaaaaccgaaaaggaaaaaaccaagagaagcgttgccaaaacgttgttatgtaaatgcacggaagcagaacgttggcacaggcaccaatcctcatccggaatccaccgcaatcgacgtgctccgcagcgggacacgaagtttaaggtcggagcgcagagcacccgcacgcatcacgcgattgtgtgaaagtttcgcctggctcgagtttgtttagcgcttgtttacccaacgcgtaacgaagtcactgagtttccccttccttgtgcattgcagataggaaacccggctcggaaatggccgccaagacggacgaatcgtcgccagccgtggcgtcaagcacaagcagcaatcccgctccctccagcggacgccaccagttgcgacccgtgaagtttgactacgcggactcattcgcctgcacttacatcgtttccgtggtggccgcctccattgcagagctcgcgacctatcccttggacctgaccaagacgcgtctgcagatccagggcgaaggagccgcccattcggcgggaaagtccaatgtgagtggcaccccacacctaactgctttccgcttgttgttctattgtctcaggcttttggttactcctaaccccggaacctaatccacatccccctcttccaatccatccattccttagctcacaaactaaaccagagattgtgctgccccctccgatttatctactccaatcgcgcgattagcgagccgaaatttcacagtgtgttttcagagtcagagatacggcaaatcggagtgggcacggccttgctgataagccttggctcacaagacgctatgctaggtggctcggtatcagtcacagcttctgcccagatcacacccatgcacccacccccaccccggctagctcatccattgtacccgtatacgccttcccactttcccatctgtgtgtgtgaatgtttggattggtttaattgtttgcttgtattcatggactgtattgatacaatttattactaagagagtgtatgataacgatagctaacaaatatgagtaggtacttgtttaatcgtatcaaaagaaaccagtttgctaaccacaaagaacatgtttgatattcgaattaccaatctcagttacgcagaaagggaagagggaaaatgaaaatataaagatttctaaatcaataatagctaatcctcctaagacgaaaagctatgttagaaaagatacattaacaaaaagttacaaggcttatagggtaagcttagtaaatggaattagatatgcgataggaatggcctagcaatacaggacccccatcccactgaccaatccattccaatccgtttgtgtgtgtatgtgcctgttccatgtgaatattgtgtttttcggcctgcaacagatacagatacagatacagatactacaatgaaccacccacaattaccgattcccaacgattaccattaccagatgcaataccgcggcatggtggccaccgccttcgggattgcgcgtgaggagggcgccctgaagctgtggcagggcgtaacgccggcgctctaccgacacgtcgtctataggtgggcattcccaaaactcctcattctagcatctagatcaccgccacagccaatctgcgccagcagctgttagccatcagccattagctcagcaagttctaacccaacttctccctgtcctcccatgtccatccgcagcggtgtgaggatctgcagctacgacctgatgcgcaaggagttcacacagaacggcacccaggctctgccggtttggaagtcggcgctgtgcggcgtcacggccggagccgttgcccagtggcttgcctcgcccgctgacctcgtcaaggtgcaaatccaaatggagggccgacgacgtctgatgggcgagccaccgagggtgcactccgctggccatgccttccgccagatcgtgcagcgtggcggaattaagggcctgtggaagggcagcatcccgaatgtgcagcgagcggcgttggtcaatctgggcgacctaaccacatacgacaccatcaagcacctgatcatgaatcgcctgcagatgcccgactgtcacacagtgcacgtgctggcctccgtttgtgccggattcgtggcagcgatcatgggcacgccagctgatgtggtgaagacgcgcatcatgaaccagcccaccgacgagaatggccggtaagtgaccaatggccgcatttaactattggaacgcttaatcacctatgttattctcgcaggggcctgctctatcgcggatccgtggactgcctgcgacagacggtttcgaaggagggctttgtggcgctgtacaaaggctttctgccctgctggatacgaatggcgccgtggtcgctcaccttctggctgtccttcgaacagatccgcaagatgatcggagcctccggctactgagcggtggctcaatttaagtttaggtgtagatgtacatacaagcacatgtataacgcagttcgttcatgttaccccgcctttaagtcggtcataatcctattttccgtgcctgaatgcccaaatgtcaggaggatgttgtgcggctcctggccaagcttagcagcatatactctgtccattttagtctgttatgccaatcagatctttcaggtttctttctcttaccttttgttattgttgttgccttaagattaaaatcaaaacttacaataaagcgagaaacttgttatttcaacggatattacttaggcgattacttaagaatttcccaagagtcgagcgaaatcgaaagagacagcaatgctggtggtcaatggaacttgtataatcctggcaaataaattattaataggatttttcccttccttcagtgaaagtgaaacagttttaagtattttatcaatagattttttttggtatatgtatattcctaaccagctcgagtgcaattaagtaaaatcaagaaaataaaattggtaataatacctaggaggcatacacacaggcacacatatgtacataaatacatagctacgtataatatatagatatagatacatatatccaaaattgcatttacgtttcgattaaagactccaatggaaaaggaaaatttgggtgcccaaaagcaaaccacacacagaactggaaacccgcaaacagattggatggcaatggcattcgtctacagatctttcatccgtcatcgtcatcatggttcaggttcatgtaatggagtcgtggaggggagcgggggaatgaacggcgacggtactagtggtgcgggtgtttcgcagcccctccaggttggtctgtcgttgtttctccatcgtcgtgttttccgtgtggtttcatgtgcaggacttaatccgaagtgtgtgtgcttgactagacgccgaggaaagctagtgccggtatcaggatctactccagtcccagc

SEQ ID NO: 14018 - DNA, 1023 bp, DROSOPHILA
atggccgccaagacggacgaatcgtcgccagccgtggcgtcaagcacaagcagcaatcccgctccctccagcggacgccaccagttgcgacccgtgaagtttgactacgcggactcattcgcctgcacttacatcgtttccgtggtggccgcctccattgcagagctcgcgacctatcccttggacctgaccaagacgcgtctgcagatccagggcgaaggagccgcccattcggcgggaaagtccaatatgcaataccgcggcatggtggccaccgccttcgggattgcgcgtgaggagggcgccctgaagctgtggcagggcgtaacgccggcgctctaccgacacgtcgtctatagcggtgtgaggatctgcagctacgacctgatgcgcaaggagttcacacagaacggcacccaggctctgccggtttggaagtcggcgctgtgcggcgtcacggccggagccgttgcccagtggcttgcctcgcccgctgacctcgtcaaggtgcaaatccaaatggagggccgacgacgtctgatgggcgagccaccgagggtgcactccgctggccatgccttccgccagatcgtgcagcgtggcggaattaagggcctgtggaagggcagcatcccgaatgtgcagcgagcggcgttggtcaatctgggcgacctaaccacatacgacaccatcaagcacctgatcatgaatcgcctgcagatgcccgactgtcacacagtgcacgtgctggcctccgtttgtgccggattcgtggcagcgatcatgggcacgccagctgatgtggtgaagacgcgcatcatgaaccagcccaccgacgagaatggccggggcctgctctatcgcggatccgtggactgcctgcgacagacggtttcgaaggagggctttgtggcgctgtacaaaggctttctgccctgctggatacgaatggcgccgtggtcgctcaccttctggctgtccttcgaacagatccgcaagatgatcggagcctccggctactga

SEQ ID NO: 14019 - protein, 340 aa, DROSOPHILA
MAAKTDESSPAVASSTSSNPAPSSGRHQLRPVKFDYADSFACTYIVSVVAASIAELATYPLDLTKTRLQIQGEGAAHSAGKSNMQYRGMVATAFGIAREEGALKLWQGVTPALYRHVVYSGVRICSYDLMRKEFTQNGTQALPVWKSALCGVTAGAVAQWLASPADLVKVQIQMEGRRRLMGEPPRVHSAGHAFRQIVQRGGIKGLWKGSIPNVQRAALVNLGDLTTYDTIKHLIMNRLQMPDCHTVHVLASVCAGFVAAIMGTPADVVKTRIMNQPTDENGRGLLYRGSVDCLRQTVSKEGFVALYKGFLPCWIRMAPWSLTFWLSFEQIRKMIGASGY

SEQ ID NO: 14020 - DNA, 17048 bp, DROSOPHILA
ttgacactattgatgctacccggcttgatgccagcatccaaaagaagccggcacacatgtgtattgcccgatagagcggcgaaatgcagtggcgtataatcagctccatgctgattgaggtttatgtcggcaccctgtggaagaaaaggcggttatttcatgtttagagcccaagcggtggttgcctggcagatgtacccaccatgtccaggagcagctgcaccgcctcgcggtttcccttgaagctggcgtgggccaaacacgacatcccggtgtcgtccacgaaattaacattcctcactccgctcagcagctgcttgaatccactggtgtcattcttggccagatgatccagcaactggcgctgcacgtcgtccagctgtacgatcttcttgctttcctcggtcattgtgattcgattgtttgtttttgttggatttttcaagtgctcttcggaatatggaaatcaagaaactccactgttttcggcgtgcttacagcgatactgtcacagtttcacaacactgtccggcggttggcgtgcgatatatcgttacgatatggtacaataagaaactaaaacaatatcatatatatcttgagttttataaaatcagaaaatatggaaattggcatatatggaaaaattactaagtataagtattataatcttatatatttttgtattgttatattatattatattatataataaaattttcttaagatatgttggtaggtttcagttaatctctctttgcaaaatttgtttctttatgagccataaatttgcttatacataaatatatataggttaaataagttgttacgttattgaataattttttatttatcatgaaattgtgtgtttctcaattcccatcactaaggtgttgttagcattagtattttatatgtggaggcccgttttggttgggctttattcgactagccccgctacggtcactctgctgttttgttgttgtgttttttgtcggcggcgtgtgtatcgcattcgcatcgcatcgaattgaatttgattggattggcttgaactgaaatcgtgtgttttgtgtttttgaaaaaactgatacaagcatttgagccccgcgagctgcccataatgttgaaggcgcccttgcgctactaggcaattaattaaaaaaaaataatttaaaaagtaccgcagtgtggaaaaaaggtgataagcgtggtgcagaaaaatgatgaaaggaagaaattccaatgcagacgaaacccttttgcatggggaaatgtataaataatataaaagtgaagataagcgcgcaaaatagcgaagcaagtggaaaagggacggcgagagagcgagataaggaaaagccagataaacaaaagccgtacacacacacgcacacatggccacaattctttaacaaaaacaagcccgttttgttgctcctcttttttcgcaatatgtgtttacatgtgctgctgctcgagcaggaaaatggccttttcccacttagcgcaatgtgtgaaaattggccttgccgattttccttttccttttttgtttaccgatttcgatctgtttcgatttcgcagtatttcctgcgaaacgcacattgccaagaaaagagatagagagagagagagagagagtatggtcttttcataatcctctctccctcgttctcctcttcaccccccgcagtgcaatttgtgaggtcgaaaaaatacagtaaacattggttagagatgaaacaaagcggaaaatcgtcgacattcctttgatttcaatatataaaaatgttttttaaggggattttttaaaagtataatttgagtatattaaagttagttaaatatatttaaatcaaatgaaaatatcaggaaaatatttttcttgaaaaaataatttaaatttaatcttagatgaagatatattattatgtattttcattcgtaaaaatcaaaaccattgttagttcaaaatcaacattcaagaacttccttgaaccccaaccatctgtgttattttttcccatcttcgaagggggctgaaaacatagaaaacgcggggttttgttgtcaccgccttttcccacccttgaaactgcccttttccattgtcctccgaaagatgaaacaagttcctgaattgaatgcagcttcccccaccatcaacctccacaatccactatccactatccctagcaacttttgcagctgccttttgggtaaccagcccatttattaggcccttttttcgtgacaacaggtgcaacagctgctatatcttctgtattctttgtgttcccactccctttcagtgctccaaataaataaaacaacaaattccaaaaaagtgctaattaataacgcaacgaaatagaagcaaacaccaatactacgaaatcccccaaaactacaagtattagttaatcaaagaaaatgggaaagctgctgagcctgctgtcacgcgacgactccaattgttgcgccgccaaatcctacgatgtcttcctggatttcgagaacgccgcgcccacggaaacggagcgtgccgtctacgacgaggtggagcgggtactccgggaatcggaggtggtgctcgacgagatacagatctatcgggtgagtctcaactggtcatatgcgtcattagccacgggctaaaccgcaacccctgccaaccggttattgggcatttgtccgatgattcctatagttcgagtcactaaatggtgatcaaaacgattttttaaagaaaatatcagtactttatatataacataaatgtaaaaagtacttttaaaaggattataagcattataaaattttaaatgatatattttcaaggcatttatgcattatcaagctagtttaaaaactattttaggtagtttgattatgcctgggcttccccgaaaagggaggtactgtataagactgataatttcaacaacttgctaaaaataacaacaatcgccgggaaattgaaagcaacaaataagagcaaccataaacgagcaacaaattgagtatttaaccttttgccagggtgagaaaagagcggcactgagcagagcgctatcttttgctctctttaaatgctgttactccaacgccctctgaaactactaaaaataaatgtaatactattattaaaataataaacaaatgattgtcattatgtacacgctattttggtaataaaacctagcattttatggccgcattaaaattagcatgtcaagactgtaagtaagcgtaaatattttgttaactatagatcactaggctttaggcgcctatacttagaatccatttattaaatatccctcagagtaatagatttgagtagactaattagttaaactggccctaagaagaagagcattttacgatgtatccaatgtggctcctccaatgtgaaatgcccccccaaacatggatctctttgattgcctgactcacgcacgtgcccacatgatccgatccggtgagcggacttctttcattatcgtcgctccactgacgtcattaaccaacttttgccgccgctcttcgcactcccataattctccttctccgtctcgcggcgggaagaattagtcaccccattcttcgttactcacacagaaaaaaaaaatgtctatgatgggttttgtaactactcttttatcaacaataacttacgccttttaaaaactgattagcatagttttcttttctgtcaaaaaaagctgacctaataatgctgtcattaaatagtttggacatctttgatttgataatgataagatatgataaacttatgtgaatctgataaagatatttgcgatgtgtaaagctaaaagtccttaactgagaaccctaaaaataactactacaatatatgcaatttataacgatttaaattgaatacaaaattattggagcatatattttttttctgtgtgcatttgaccttttggcgacaaattctaactcacattggtgtgtgcaaattattaattgggtttcagacgcaaaaataaaaagaagacggtcaaagcggaaaaaagggtagttaaagggggggggggtaaagggtgggggtaggtggaaatgaggggcggcagacaaacaaatgtcaggccgaaaagctttaatcaacgcaaatgaactggaaaatgtataccaatgagctcatttcctttgtgttgacccacttaaatgggaccgaaagcaacaaagacgacctcgtggggcatttaaccctttggtgcagcgattcccgttcgcatttgtttctttttggttctacaccagaggtatttaaaatgcccgcttaatttgcgggctgcattttattttcattgcaatttttattggactgctctgtgcgcgttcattttgttagccccaaaaaagaatgagtgggtggcttttgggttggcacaactggttgtcaaggcaaacaaactggttgtggagtaggtgattctccactcaccccctcatccccctcaccatccaaacaaaaatagttggccaggcgccaaaagctggcaaaatggcaaaaacttcatgttctgtttggttgtttttgttgcacttattcctgcaagtcggttgctataaatagaaagaaaagtgcaaagaggaaaaatcaaagcttttctttttattttttgcaccccggcatttcttgtttctttaagttggtaattgacatggctttaaaagaaatcgtttattgcgatttctgcttataaatatttaacatttcacgcctttataaaatattagtgatttgttaggattagggtacaaaaattagatcaatccaaaaaatcatctacaatggcattcttttcattcgtcgcaaacattgtgcgactttttcccagcggtaataggcttttctatctgatttatcagcacttgttagtgacgcttttgttaaatattggcctagactagatatggcatacaaggcgcccattgtgtgtgcgtaataaacagtaaacaacagggtcaacaaggggccgcaaataataagagtaacagaaaaagtcccatttcggtgcaacagatgataatcatgatgataatgcttacgcactcacctggaggaaaatgagaaaaataacaataaatgtgaaatgactatattatattaacaagcaacaacgtgtgggtgctgcacatgtaataaaagtttgtcggttttgtgggccaaagtcattgaaatccaataaaatgctttgatatatatgtacatatatagactatgtgaattaagccattagttttgtggttttccataccgctgacagtctgggctagataacgattacatatggccagacaaacatatgtcaaacacatggagtaatccaatacacaaccttggatggccaaacccacatgagaaacaagtgcaaagtgctccatatcagctaggtttattgtggtttggatggccatattacgcacgatatggctttagatttgatgtataatacatatgtatatacttactctcagtcgaaatgagtttgaccacaattgagtcattctgcgaatgcttttttataatttaaagaatatgtatccaacagtttttgagtcattaaaatgatatccgccctttttgcgttacgcaaacttaagattacatatttatcaattttaagaaaaaaatgtatattttattctgtactaggaaactattccaaaacataactcatatagcttcatttcaatttctagcctaaagcaactgaaacttgcctatcgaatagcataatgatttgtcatatacttccaaattttcccacaaactcaaaactcagtcacagctgctttcactcgaaaaaaaggggaaaagccccatttcaaattggcgacccatttcgaaagattgcaccacatacaaataaaaaaaagaacgatttggcatcgtatgaataaaaatatatgcacatttaagtatttaatgagagttatacactcgagggcgaaaggcagacagacagacagacagccagcggcaatcagaataatcacagaatcggaatgagcagtcattagatagacccccccccccctcccaataccaccctaccatatagaatacctctcatctcggcactcccacctcttccagtttccagttcccattccacgaataacttgaatgatgtgcgcgaatgcaaaagcacaagcgggaaataaaagccaacttccggttggtcattcagtttggtcagtcgatataatcgctataatgtgcgtgccagagatcggcatttgaatattataaaattatgatacggcaagaactcgaaaacggttgtgttcaaagggaatgttatcaaatttgcagtttaaaagtatttattaattatctcagaccatatgcagatattttatgttaccttattataggtattattgattaaaaaactaagtttcaaactttaatgctcaatatattcattaaaaaaggtgtaataatagataatcacaattgcatttagcttaactaaacaatttttaatgacgttattcgtaaaatttgtatagcttttcactgcataaatgttttctcttttcttccacgtcataaaccacaaattaatttcgacgaaaatagaaaaaaccgccgacataaacaaatcgaagtgtaaacaaatacataaaccgcctttttaaggtcagcagtttaatcaatctattagcttcaacaaatttccttacaaatcaacttccgcatttgaaacatttacaaaacttcccaaaaaaaagtgggttaatccgcaaatggaaatccccgcaaggtttaatttctacaaccaacatcataaatgctttccaaaacagttgaatttgattttgtaatgcctaacctttattgtccaaattagccgcaatttaaattgaaattcatcgttcattgcatttcactttttcaagtccgtttttgatggttggccactgccaaattgtttatagcacacgttaacatatttattttcgaatttccgacgtcatcagccgcaaatcaatttgcgccaaaaatagacaagtttaaaaacgtaaacaaatggaagtaaattaaagtgtatacacttttagagtgtaaagctcaacgaggaatttgttttaacagctatgcatcaagtatcattttctcgagtttttgagtgcacttaaaataatttcgtgtagcctgaaaattaaatcacaaatgtagcatttcagtgcgcccacacacacacacacttgaagtgcgtttaaaaattataggctaattaaataaatattgcatgcataatgaaaaataaatgaaattgcaaggtgcacgtgtgaaatgaaataaatttattttgattttcatcgatgcattttacagtactgaaacgcactgtgcgtttgtgtgacacatttttgtgatttattaaaatggcactgagctgatttcatttaaccgaatttaatttaattgaataacgccccggacaatcgtggtttattgtattttactttgttttgatggctttgaacaagggttatgctatactagcttaaacgtcagactagaacatggcctcgaaattgagtttccacggccgtctggacaggatggtcaattattttaaatactcgcctcgttgaaatggccttaaagttgccaagtgagccatttacgacttctgggcaggaacgtatgtatgtacgtccaggtctgggtgaatccctctaagcagcttagaaacccagtgcattgcatgcacaaagtgcaatggcgcaaagttttcagcagctttttttttctttttactgcgcggcgtctgtgctgcagaaatgtatttacattattttatatcttttttacgagcaactgtttggcatctccgtttatgcgtgtaatttgcacaaaataaatacgcctttcggaccggagaaatgtgctgtttttttcaggaatttctttgatttatttatcttgtttttttttttttcttttcaaccattcagcaacacagaaggtttttcattttttttacgccgctggtaacccaattttcaacagctgtttatgagttttcagccattgggtatagttgtgagaatcgataacataaaaaccttgtgaaaaagaaatgtgatttacacgagttaattgagaacgaggcagtgacacatgttgtatgggtatgtgacagatattttcccactccttctgccaatttccacatggtttttgcccactccttcggctcatttccacagcatttttcccatggggggacattgacatttgtttggctgcaccgatgaagtgcgtcaaactcgggttaccgataagcgaacttttgtcgataattaattgctattattttgcatatcgttgcgtttgttttacgtactccaggctagagattaattaatgtcaactttattgaaggatcacaatcgaagagattgttaaaaggacatatggtattatattccttaaaaatcctcttaaagcttaagatcgttaaagtttttctttattgaaagcaatgaaagtaatcccttggattggtatttcatattcccatgaattttccgtgttttccagcgaaaaaccgcacattatcccctcgcgttcacacctgacattgataatgcccgggtttatcttatctttattgcaatcgcagcgtactgttgtaattgctgctgtttttcgactcttttttttctgctttcgcttcgattatcttgataaattatgtccgtgctcgtgacaaacaaaatcgccattggccgtcgaggaaataaagctattatgttttatttaaatgtaaatggtaattgaatttacgactcacgcaccagaagaatttgaatgagtttagttttattgttttcggttcattatatgattctcaaagaccctaatgattcacacagagctgatttcctcccgtttctgtgtaatgcccgaatatgtcgagaagattgttttcattggaaatcataatcacatttggaatttacgcaatattggttagactagcaaatctctatttataaagcgatgcatcaacttaaagtgatcgttttaattgtcaaatgctattgtttagcaaatgacttttaatgatgcacagcatcgttgcattcttgtgaaaatgaaaagttaaacttgcacctctggttttctatctctatagcaccctctctctctctcacttccccgtctcgcttccgcaacaaaagcagcagtcaacgatcgttcagattcaaaaaatgactcacaaaagccatagttgcgagttcttgtccgagtcagcagttttacaagtgtaacgcaacatcaacaataacaaagaattttgcaaggcctacacagggaaaaaaattgtgcaataatcctgataaattatccttaaattaagcaaatatttgcttaatatatctgcttgaacgaaaattaataatttaaaatattttttagaatactttgatcaaaaatcattcatgtaaactttgttatttcacaatttgatgcttgtttattcataaataaatatgtataaaaattgttatgacttgatttttaataacttaatgacttaataatattttgaatcaaatgactgaaaacagctcatatgaaaataatttgttgcgcgtatttcaaaatttaaaacttatctttttgacagcattaactataaacaaagccaaatgtattcaacataagctacaaagtttatgaataaatatgcattaggtaacttatttatagttttaaactacacattttttccccacttatttatatgttcgtgctgagattccagtttaaaactggagcaaaatatagaagaacttttattttccatgttcaacattgaattattaaaagattttcgtcaccggaaggcgcagattcaagcagcagaatttgttgaaaattatgaaacatttacgattaggttagtcatctgagtggctctataagaaaattgtatattcaatatgtcgtcgtcgttgtcgccataatcttcatcgtcatcattgcacttgcacttgttttttttttttattattttattgtgtattttatttataccctttcgtaattcatggttgtcatgaacggcgaccgaatgtctgtagaatcagcttcatttgtttcgttttctgcttttcatttgagtttttcttattaaaaaaaaaattatgagaaattatcggtcatcaaagagattcgcccctctgggaaatggtttttgtttttcgaaattcccggaattcatttgcattgatttgtggctcgccaattttatcacaagcaagaatgaatattttgtcctttttagtttgtctgcggttcattcattgattcattcactttaacgtgctgggaattcgaatgcggtgttttgatgatgcaagcaaagcatggcgaaaattagaaaagcgcagtcatatgcgttattttttatttattttatgaaaatgaaaatgtcagcagaagccagcgaaaaatgtgcggcatgtttggcatgtctgtctgtttgtcttcccaagagcactgtattttgttgtttaacacactgcaaaaggggtgtaaacaacttctgtggcattcacgaaaacatacgcaattcgcctgctgctgcaacaccacccacacttttccggcgaacacccccccccccccctttccgtgtagcccaaacgcatgacatcaactgttttatagcgtcacgcgtttccattgtgggcgaaagtccaatggcaagtcggagttgcactttagcgccacttgggataaacacgtgcacagtgcgaaaattctactaaaaaactttataattatactaaaataaacatcttactcataacaaggatttgcattaggcctttaattgtgggtttaactatagcagggtgtataacttaaagtttataacggaaatgaacgagtttttgaaaaacataataaaaagtggagtggttttttgaacaattcatttattcaagacattatagtattaaacatcctataaattgttaaaaacagaacattaacattattttatagataaaatttaaaagtaggtgtactctttgtaagttaacatgcatttgcatgattacatttgtgttctgatctaataatttctttcaaaattacatctcctctaaaaataagtcatactcttactcagaattgtagctctgcaagatctccccctttttttttttaatgctgtagctgcaagataaagccatcgctgtgtagcaggttcgaagtttagttagtgagtgagtgagttggggggctgcgattaaaacacgatcatgttcgctaatgctaaacaacacttgccaagtgtcaatggcaattatctggggcacaacgaccattctctgcacaattcacaatttctgcatttccgcattgctgcctccgatttcgatttcaattaaaaaaaaaacactgccattctgcggcagatgcaacactcgcctaaagttaattaactattcatctaagtgtgtgtgtgtgtgtgtagcatgtggtgcttatgtgtggttggcattgtgagtgctttggggtttggttttttcatctttcatccgtttgctgcatgatggagcaaatgaaacgctgactgattgcgctgctatgctgctgctcgcagctgatgagcaagatgggcgcaagtgttttaattaagccccaaactagaaacagaaacagttacaaaacgaggcaaacggttcttggcttattatgattacttttcaaccgaacaagcgctcgactataaaagtcttacaagttcaagtttgttgtggtcttgtgggtgatttcccccaacgatttccctccccacattttcttggcaaacagacagcacgtgcttatccaaatggagcgcatcggtgttttgctgtgaactcaagatgttttgcagtgatgaatcaacacaattggtcactggacagaagatgcaatgcggcatctcgatcccgtttccttgagttgcagttctgccccacaacaaacacctacgccttttgttttgaaactgaaatgcacatgacgcaggataaaatgcaggcgacatgccaaagtagttggggaaagtaaacttacatttttacaagaattttaaacaatttttagtaaaaaaaaaattgtttaaattgcaaatgtgctcattttttcaagcatctaccgtatttttatgatttttccgagcaagtgagttagttgcgtctgcccgattcgaattacaattacaatttttctccagcagtgctcaatattttctacatacaccaacaattattattcccccaagaaacgaatgaacttgctaccacccctaatcataatatgccccccgcaagggtaataaacaaaagtgagctgcctaatgacacttggccatatgtacatgtaggcaaccccaagaagtcctcctttgctccgacaatctcagccagcaatctctggaatggaatgcacagccgagaacagtccgcccacacaggccacgtttatttcaaaaccagacacaatttttgccaccaactcaaaggagaagcgagcagaaaagacctggccagaaccagaaccaaaaccaaaaccatttccgttgcatgaccgtgcgcttggttggtggcatcaagagtccttagagagtcactggcgtaaatgagacaatgccggtgaataaagtgggatgaacactgggagaaatacttgtgagcaagatgagggtactttgaatatacccaagaatataatatatcaagaattatatgaagctatttccattctcttaaaggactatataggaatatattaaaaaaatgttcaagcattattctattcttattcctagctgtgtataatggtccattgagtccaagtcaacgacagaagtcctcatccttctaacttgtatatatatacatctacttttttttgtaactcccccgcacattttgtttacttgtttgcgcgcgttaaacattctgggccgcttgaagagcagcggccaaggacgtgggatcttgacttacagacaggtgtaaattatgtagagtgaaaagaaatgccaacacatagagtccgagaaggaaaaacaagagaccaaacatcacagatgttgtgtgtttttgctcggcgacgagctgcagacagttgcattcgtattattatgattatgccaaagaactcggcagctgtattacactgaaagaaaaatgtatgtcttaaactataatatattttagaaaatacagaactcctgttaagatgacaagtcttttgatactttaagtaatatactctaagtactggactgtttcagttcttggcaagttcttaatctttcagtgcagcgctgcattttgccatccactcagactgtttgttgatatgcgcagcgatttaattataaacacacaacacgtgctagtccattacagtacaaagaggtgtgcaaaccaaaaataacatgcgtttactttttaatagagttaacccaccactccgacatatccatgagcttgaactttgcaggccactgagccgtgtgtaattcgcatgttatctaagccatccaaactggagttttgggtcgaatcgaaggcggggtttggctatatttaattctacataatgtatgccataatatgctataatcgcttaaacacgcgaacccatcagatgggggcatatatatataattatccaattatgtgcgttgtttgaccaaaagaaactgaatcgaaggcctataattaagttaactaactttgtttaggagcatcatatacattagtagtagaaatatactgtattccaacagcgaatatttacgattaaatttattaatcgcacagggcagtcaattcttgaaaaattattcactcaacggaaatatgacttttgaaactatttcaaattttaaaagcggaaaaagtatatcagactaacaatcatgaaaatctactattaacagagtcgaaaacggttgcactcattattttcattccataaattatatctttaacactaatttcgctgacaatttagctggccgtctaaagaaaataaaatatttacagtattattagccacttaaaatgcatttgaaaaatgccaaaagacctcaattgaaataatcaacgccatttgctgattgtacgactgtacgaagtgaactcttcacaacatgcaatgaccgttcgttagctccagtttagttgttccgctgccgtgtgggttttcattcgactattttatgttatttcattattatttttttgtagatcataaagcatcgataaaaatcgctgcgctgccggtcaatggacgcggcttgccacatcgttattgttgcatgtgccacagaaataaagacgcagagtttttctcgatgaaaactcgccggccacaatggcttggcacgcagtttgctgattgttataaaacaaatgcatgaaatgtggtcagcaggcgtagtttttctccagggtaccgtaaaaactagaacccctaaaagagtgcactgtaagaaaaaattatggatattttagattagtgtattacatacgtaagacctagtttatctatcagaggttaaactataactatatataggaaagtctatctgtatctgtagtctgtatctatagatacaattaacattttttttttaaattgcaaaaggtttcgagtgtaaaaatgttccaagtctaaggttcgcatgccaagctagcatttaatccttcttagagccaaatgtattgacttacgcttttccgccttcgttcctgcgaatatttacagggtgccggcaaggaaatccgagaagccatcgccgatccatcgccggaggtgaccgccaaagcctgggcggcggtgctgccgttggtgaacaagctgaagcgctgctacgagcattccatggagctggacaagattgtgcccaagctgctgggccagctggtgggcggaaaactgaatccgacacagcatctggagacgcagcaggcgctggtcaagcagctggccgagatcttggagttcgtgctgaagttcgatgagtacaaggtgagtgagttgagtttagtttaagtttgctcactttgacagctgggtgttacaagctctgtagtccatatttggatgtaacgacgcccacgacgttaacccattaatggctggaggtgggaaaaccaggcactgacaacaagacattgcttgtgtttgacagggcaacattagtgggaaatgggtgggttattaaattaataaaacaaagtgattgagagggctctttaattataagtaaacattttacagtgaaacaaaaacctttgcagatacattttatgtcaataatacttaaattttcaataacaaagcactaaaaatggcataaaaacttaaatggatttttacataaatcttaataaatctaaacgagagactagtaatcactgcaaacgaactggtaattcctgtaactttgcagatgccacaaacagcaaagagatgcaaatgttgacaacgtcttatgaaggcttaattcaatttaatctccgtctgtttgcaaaaatgttagtgggttaaattcagtcttcttcactgtttgtttaccttatgtgggcgctgtcgacagtcgagccaaagcaaagcaatatgtatctaaaagccgagtcaaatgaagccaaaccgagttccactgccaactcatggtgcgcgtggttgcatttttaattgactgactttttttttgcccaccgactactgcctgtttttgcttggctaactgactgaatggctgactgactgattggctgactgactggttggctgaatggccaagacgagcgcgtgctgcggcccattgatgaaaaatctttcgggccactcgtgcacattcgttggggggccacagtggagcatcgctggcacttacgcgcacgcaagccaaatggcccacgacaaacgaccgatggccggatgaagatgtaaagtgtattatgtcggcttcggtggcctgacagtgcgggtcattaaagtagaatatctcacttatataagaaaattataaaaatgtatgtacaagacggaaaaattagattgagaaagatttacaagggtacaattcaaaaagtaaacaagaggttatttatgagagctaacaaatgtttattaagtgcgtgtgtaaaaactatacagcgttttttttttttgtgattattataaaaggaacgttgttcagtattttttcattttcctaattttattttaaattaccttttccgttcttgtttgattatatattactcattgcaactaacgcacaataaccacactattttcctagcataaactctttaaaaaatgcccacaaaatcaataggtttttaatgaaattcaaacactcaattatgttggctaacctgaagtgtttggccataacaaaggcctgtgaactatgcaaacacaaacgtatccccgcactgggttaaaacacattacacagagccacatcagtttctgcggcagttggaggatatgccggttgattgtctggagtcaaataaaatcgatttgtttaatggcaaatccctgtgaatggcgcatttcccatggttcgcttccgtttggcgaaactttcattcaaatcgattgtggagcactatatgtatagctgaaagctgggatctaggacaatcgggtaaataatggtggaggtagggaatggcgaagtcatcgccatcgtcggtttctagtctctgatgtctagtgtgtctgcaactttgtgctcccgacgataatggtaatgataatggcgatgatgatgatgatgatgttaaacgctgcaaactgcacgttcattgtgtgctcaaagtgtcagccgccgggcgctcacagattttcccgtgtaaaaagttgcatatatgtatacaccgatatatatatatgtatgtatgtacatactatatagcccaaacgtgcttcccaacta

SEQ ID NO: 14021 - DNA, 801 bp, DROSOPHILA
gcgtgtgtatcgcattcgcatcgcatcgaattgaatttgattggattggcttgaactgaaatcgtgtgttttgtgtttttgaaaaaactgatacaagcatttgagccccgcgagctgcccataatgttgaaggcgcccttgcgctactaggcaattaattaaaaaaaaataatttaaaaagtaccgcagtgtggaaaaaagatgggaaagctgctgagcctgctgtcacgcgacgactccaattgttgcgccgccaaatcctacgatgtcttcctggatttcgagaacgccgcgcccacggaaacggagcgtgccgtctacgacgaggtggagcgggtactccgggaatcggaggtggtgctcgacgagatacagatctatcggggtgccggcaaggaaatccgagaagccatcgccgatccatcgccggaggtgaccgccaaagcctgggcggcggtgctgccgttggtgaacaagctgaagcgctgctacgagcattccatggagctggacaagattgtgcccaagctgctgggccagctggtgggcggaaaactgaatccgacacagcatctggagacgcagcaggcgctggtcaagcagctggccgagatcttggagttcgtgctgaagttcgatgagtacaaggtgaacgagcgcgtgctgcggcccattgatgaaaaatctttcgggccactcgtgcacattcgttggggggccacagtggagcatcgctggcacttacgcgcacgcaagccaaatggcccacgacaaacgaccgatggccggatgaagatgtaa

SEQ ID NO: 14022 - protein, 199 aa, DROSOPHILA
MGKLLSLLSRDDSNCCAAKSYDVFLDFENAAPTETERAVYDEVERVLRESEVVLDEIQIYRGAGKEIREAIADPSPEVTAKAWAAVLPLVNKLKRCYEHSMELDKIVPKLLGQLVGGKLNPTQHLETQQALVKQLAEILEFVLKFDEYKVNERVLRPIDEKSFGPLVHIRWGATVEHRWHLRARKPNGPRQTTDGRMKM

SEQ ID NO: 14023 - DNA, 2717 bp, DROSOPHILA
gccactttgaatagccattatcctaattgtttattatggattttgatcggatactgtgcgagcataatgtctgcgttttacgatctaatcttttgggcccacacagatgcacattaataaagcgtaataaaaacgccataaatgagccgggggacaggtgttgataaccgagttctggtatcattactattgttcgtaagtgaagtgtgaaatgctcggggaaatggagttgaacccgtggagtttgacgcaacccctgaacctggtgaatttgacctgcagctctgatattgacaattaagagcggcatgcaatttgaacaatttgcggcagagagacttgattggcatgctgtgacctcgctttgcggattcaccacctccacgttgtcatgacgagcagctggccaactcaatttgattgcaatttggccacaacacactgatttgcagcgtagttaaatagagaaatattgcataaaaaagtgagaaggatattatgagctgaatttgtgggctgaaagcaatagcttaaagcattcatttaagcaaatcttttctcgaagctatgaaacgtactcttttttgactttccactgtgaaccatttatcgtttaaattcttctgatataaatgtctgtattattaaatttactattcgtaataggaattaggtttaatatatttgtattatttatctcttaaattatacacttatttgttttccatttctcgtttaccatttaaatataattaattcgatgttgtgcgacattaaacatatttgttttcattatgcaagcattcaattgacatcgatattatttatttgatactcgatatattgcgaatattcccactcgatggcggctttgataatatatgtgctttatgtattccgagagatggatgtcaatgcgataggaatttcaatattcaacgttaggcgaatctcatatacacagggttaagtacgtacatatacatatatttataccgctatgctgcgcttgcttcagcccatccgccgcatccacctggcacccgttctccgtttgggagcaccggtgaatgccactgaaatacgcaaagcactgaagttcgagttctccaaggataaccagcggagggtgaaggccctgctcgcctggtatccgcaggcggagtggaagggagcactcctgccactactggatattgcccagcggcagcagggatggctttcgatcagtgccgttcaggccgtggccgagaccatcaagatagatccaatggaggccttcgaggcggcgcagttctacaccatgttcttcatgaagccgcgcgggaaatatgtggtcagtgtgtgcacctcgacgccctgcaaattgcgtgggggcgacgaaatctttgaggcgtgcaagaaaacgctcaatctggagcacggtcagaccacgccggacatgcagttcacgctcaaggaggattactgcatgggcgcctgtgtgaatgcccccgttctggcggtcaacgatgacatgtacgaggacctggacgagaagagtctggccaacatcctggcggatctgcgcaatgacaagttgccgcccgctggtccgcgcaacggtaggtttgccagtgagcccaagggtggacttaccaccctaaagatccagccaccgccgcccggcttcatgatgcagaaactaccagatccgaagaccaagaagtgtcagtagccattgattaagtcttaaagcaataaattccgcctgccttcgggaatgcaattcgcccaggcatctggggtcgggggtcgcgggccagcagctgttgttttgctaagctcctgcccagtcgcattctcgcgtcctgcgctcgcagtcgcctcctttcgctgccgctgcactttatccttggccaaaggacatgctttcgagttttgcagcgctggcacaataaacagacagcagcaatgacaaaacaacggaacaacacaagatatggggtatggtagatggagttggcaacgaagtcacatgccctttcccactttaatagtcattggttgaaatcacattatcagtatagtattttttattatttatttatttgtgtacttgatctaaaggtatttaatcggatttttttgaagcaagagacttccttttatgcgaataaccgtgctgttatagggcatagtcaagccccatgtcctgtcagccattgcagcaagcaatcagcttcggtcttgtcctttcgtcttcgcccctaacccctcgcccaacacccgctggccactcccacttgccactcccggtggccagcgctccttgacaccgaccccccttgcggtttgacccggacccggcctgcattctaataaaatgttgccaacagcgaacaacccgcgcaacgagcagcaaacaactggcaactgtgaaagctggcggcgatggcaacaacccgatattgttttggccaaaatagttttaattgttgccagctccgcagcagcttaccatcgctggaggagcaggtcctttggcactcgcgcagtcaaattacaatggatatttttcagttttcataaatctgtttgtcgccccacttcaatggccatcaacaagcggttgctagccggaatgccaggctagctcacccacatttttcccattttccccagcacatttccctaagcccccgccaccattccccaatccccacaccgcctgtccc

SEQ ID NO: 14024 - DNA, 717 bp, DROSOPHILA
atgctgcgcttgcttcagcccatccgccgcatccacctggcacccgttctccgtttgggagcaccggtgaatgccactgaaatacgcaaagcactgaagttcgagttctccaaggataaccagcggagggtgaaggccctgctcgcctggtatccgcaggcggagtggaagggagcactcctgccactactggatattgcccagcggcagcagggatggctttcgatcagtgccgttcaggccgtggccgagaccatcaagatagatccaatggaggccttcgaggcggcgcagttctacaccatgttcttcatgaagccgcgcgggaaatatgtggtcagtgtgtgcacctcgacgccctgcaaattgcgtgggggcgacgaaatctttgaggcgtgcaagaaaacgctcaatctggagcacggtcagaccacgccggacatgcagttcacgctcaaggaggattactgcatgggcgcctgtgtgaatgcccccgttctggcggtcaacgatgacatgtacgaggacctggacgagaagagtctggccaacatcctggcggatctgcgcaatgacaagttgccgcccgctggtccgcgcaacggtaggtttgccagtgagcccaagggtggacttaccaccctaaagatccagccaccgccgcccggcttcatgatgcagaaactaccagatccgaagaccaagaagtgtcagtag

SEQ ID NO: 14025 - protein, 238 aa, DROSOPHILA
MLRLLQPIRRIHLAPVLRLGAPVNATEIRKALKFEFSKDNQRRVKALLAWYPQAEWKGALLPLLDIAQRQQGWLSISAVQAVAETIKIDPMEAFEAAQFYTMFFMKPRGKYVVSVCTSTPCKLRGGDEIFEACKKTLNLEHGQTTPDMQFTLKEDYCMGACVNAPVLAVNDDMYEDLDEKSLANILADLRNDKLPPAGPRNGRFASEPKGGLTTLKIQPPPPGFMMQKLPDPKTKKCQ

SEQ ID NO: 14026 - DNA, 6461 bp, DROSOPHILA
tgcgtcctccggtttctgataaggcggattggaatgaatcacccgattgtctgtgatttacaattagaggttttgttgcgaccattgagattactcaaaatgtccgcaatggggctatctaatcgaattggaggagcatggtgcgcacgtgagaagtgccaaaaaaaaaatcagagcatagtgaaacaataaataaataatcattacattccatatgtgcatacggaccaatgcaaacagtaggcgattaagcgttctacattctatcgtagcatgcaattttgagtgactaagctccatgaaacgttgtttctgagacctaattatcttaaaacagcattgaattgcttcctgtttgccgaaagaagcgcaagtgtaatcttagcatcagaaatattgccaactttttgggtcgtttcttatcatataatttgaaaagtgtgcagttttgggacaattgagataaagactatatttgtcccagtttgatgaaaaatggttcagatacttcagggcactgagcgaagcccctagcctcgggctatcgtcaagtgtccgccgtaatcttcaaaagtggtcaatacacttgactttgatgttttagtacacaatttaaattcaaatctttagttcggcgcgcagatctctgtcaacagctcgataattatcgaggccatatagaatgctgtcgttttccggcttaccaaatacggtcataccacccaaagctctccagaattttgcaataaaatcgcaaacaaaggtattaggagtattaagaggcgtaaaaaattcatttgaggagccaatagtttcgtgaaatctagtgtttcctcttttaagtggtcgccaagcatgccgttcgttggctgcctctaaaaacagtcaaatgcctgtgcaaatttctcgtgaaaaatccatagaatgcacaaaaaatgtttatcagtcactcacaaacacacgcacgcgccagcagtgagtgggagagagcgagagagagcacagctgccgccggtgcatgtcattgctgtgtgtgcgtgtgtgggtgaacttgagtgggaggcggaagatattggaaaaattcctccgcttttcggtttgtttatgtttaagagttgcctattgatttttaacaggcgcccgaaattttagtgccatttcggttcaaagtgtctgttgtactagttgaactttcccatttccactcacctcgtgcaaatcctaaaattaaaagaatcaaaaactttgtggtattaaattaaccccaaatttgagctcatttgagctattacgaagtgcacaaaataacttaacttagcaagtaaaacactcaccaaaatattttttaaaacttaaaaaaacaacgaatgtagcgtagttgataataacttattacttagtaaaaaaaatattacgataaattagttttaaaagtgttgctcataaattgaaatcgaatgagtcctataattgtagcattgcaaacgacgaatcccaatattaaacctacaccttaaaaacgaagtactattcttataaaaataatagatctctattatgtaactgatacaccctttaaaaatgtaacttgtgaaatacacccacaattaaattgtatttccccaccaacagatgtcttagctttagctggacgcaaaacttaaactgcagacagtaaaggacgaaatcacattactcgactcaaaagaagacacacggaagagagataccaacaagatggccatgtccaaggtgatccgtgtgctggagaagtccattgccccctcgccgcacagcgtattactggagcatcggaacaagagcgacagcatcctgttcgagtcccatgcggtggccctgctgacccagcaggagacggatgtcatccggaagcagtacaccaaggtctgcgacgcctacggatgtctgggtgccctccaactaaacgccggcgagagcaccgtgctgttcctggtgctggtcaccggctgtgtgtccatgggcaagatcggcgacatcgagatcttccggatcacacaaaccacttttgtctcgctacaaaatgcagcgcccaacgaagacaagatcagcgaggtgcgcaagctgctcaactcgggcaccttctactttgcccacaccaatgccagtgcatcggcatccggagcgtcatcgtatcggttcgatattacgctttgcgcccagcgacgccagcaaacgcaggagacggacaaccgtttcttctggaatcgcatgatgcacatccacctgatgcgcttcggtatcgattgccagtcctggttgttgcaagccatgtgcggctccgtagaagtgcgcaccgtctacatcggtgccaaacaggcccgtgccgccatcatttcccgactgagctgcgaacgggctggcacgcgtttcaatgtccgtggtaccaacgatgagggctatgtggctaactttgtggaaaccgagcaagtgatctacgtggacggcgatgttactagttatgtgcagacgcgaggatcggtgccactcttctgggaacagccaggcgtccaggttggctcgcacaaggtgaagctatcacgaggattcgagacatcggccgccgcctttgatcgacacatgagcatgatgaggcaacgttacggctatcagacggtggtgaatctgctaggcagctcccttgttggcagcaaggagggcgaggccatgctgagtaatgagttccagcgtcatcacggcatgtcagcccacaaggatgtgccgcatgtggtgtttgactatcatcaggagtgtcgcggcggcaatttctcggcgctggccaagctcaaggaacggatcgtagcctgcggtgctaactacggcgtcttccacgcgtccaatggtcaggtgttgcgcgagcagttcggtgttgtgcgcacgaattgcctagactgtttggacaggacaaactgtgtgcagacgtatctcgggcttgacacgctcggtatccagctagaggctttgaaaatgggcggcaagcagcagaatatttcgcggtttgaggagatcttccgacagatgtggatcaacaacggaaatgaggtcagcaagatctacgccggcaccggggccatccaggggggatcaaaactaatggatggtgcgcgatctgcagcaagaacaattcaaaataacctactggacaactcaaagcaggtacattgtggttttcaattaaaaattcaatttattatttacattactcccgttttttcatatttaggaagccattgatgtcctgctagtgggctccacgcttagctcggagcttgcggatcgggctcgcatcctactgccctccaatatgttgcatgcacctaccactgtgttgagagagctatgcaagcgctacactgaatatgtgcgtcctcgaatggcacgtgtagccgtgggtacctataacgtcaacggcggcaagcacttccgcagcattgtgttcaaggattcgctggccgattggctgctcgactgccatgcccttgcccgctccaaggcgcttgtagatgtgaacaatccgtcggagaacgtcgatcatccggtggatatctacgccattggattcgaggagattgtggatctgaatgcttccaacataatggcggccagcaccgacaatgccaagttgtgggccgaggagctgcagaaaacgatctcgcgggacaatgactacgtgctgctcacataccagcaactggtgggcgtgtgcctatacatctacatccgaccggagcacgcgccgcacatccgggacgtggccatcgactgtgttaagacaggattgggtggtgccactgggaataagggtgcctgtgccattcgatttgtgcttcatggtacttccatgtgcttcgtgtgtgcccactttgcagccggacagtcacaggtggctgaaaggaacgctgactacgcggaaatcacccggaagctggccttcccgatgggcaggacgctaaaatcacacgactgggtgttttggtgcggcgacttcaactatcgcatcgacatggagaaggacgaattaaaggagtgcgtacgtaatggagatctctcaaccgtcctcgagttcgatcaattgcgcaaggagcaggaggctggcaatgtgtttggcgaattcctcgagggagagatcactttcgacccgacgtacaagtatgatttgttcagcgacgactacgacacctcggagaaacagcgagcgcccgcctggacagatcgggttctctggcgtcgcaggaaggcgctggccgagggcgactttgctgcctcagcctggaatcccggcaaattgattcactacggtcgttcggagctaaagcagagtgatcatagacccgtgatcgctattattgatgctgagataatggagatcgatcagcagcggagacgtgctgtattcgagcaggttatccgagatctgggtccgccggactccacgattgtggtacatgtcctggagtcttcagcaactggagatgaggatggaccaaccatatacgacgagaatgtgatgtcagccctgattaccgagctatccaagatgggagaggtcactttggtgcgctatgtggaggacaccatgtgggtcacatttcgggatggagaatcggctttaaatgcgtcttctaagaagagtatccaagtatgcggattagatcttatcctggagctgaagtcaaaggactggcagcatctggtggacagcgagatagagctatgcaccacgaacaccataccgctgtgcgctaatcctgtagagcatgcacaactcctgcaggccattacgccggagttgccccagcggcccaagcagccgcccacacgtcccccagcccgtcccccaatgcctatgtcgccaaagaactcaccacgccacctgccccacgtcggggtcatcagcattgtgcccaagccggcaaagccaccgatgccaccgcaaccgcaatctcaacctctaattccgtcgccgcttcagccgcaggtggcgccgcctcgtccgccggcaatggacaccacgccatcctccaaatcgcaatcgccaacggaacttgtatccgctagttcttcgacgtcctcttcgggaaagacttcgcccacagctccagctgtgctctccggtccgccgacgccgccgcgccaaatgcagagcaagcaggccacacccgtctcgacgcccacgcgccaagtcggttcgcccaaggatccgattccatctgataccgcctacgaaaccgccagtaatatttacgaggagattcaggaggatgtgcctgcgccacgccatccgccgccggctggaccgccgccagtgataggagcaccaatgggcccgccgccaccgctgccgaatcgcaggggcccaccacccataccaaataggagcggcaatgctccaccgctgcccacgcgacccgccaacaactgagctgcaggctacgcacacggggttggttaagaattcaagaaatatcaagcgtaatccgcaactaatcatataatggctatatttacagctcgctgtcttgcactccgattgcattccgaatcgctgtatttaatgttatatatactcgaatatattgggccactctggaggagaactcctggcaatatccgcacttcgcatggaatctatgttactacctgtttgtttgtttcgatagtttctagccggaatcaaactgaatttaaagtaaacaaataagttccacatagctaaagcccaaactaccccactccggtactctcttttttttttttttacttactggccagacgtactcaacccaattgcaccggatttgccgagggcgaagaatgaatataatgaagtatatgggcgacaaagtattacactaatctgcataaatgtaatgtttaaataaattatagccgtactagtcaaattatgaagtaaagttataaaaactgaagaagcaatagaactctgtaaaagattccgattcgagcgacacacccaaacacatgtatccattgttattgaacaactattgagataaattacatattattccacattgttaaactatcgttgtattccgtcaatttgaggctacatccggatttctgtttcagttgactacaaatatatatcaatgtaattgagaaattccaattgctctgttcaaaagttgaagttacgcctaagattaaccaagtagcatactacaaaataaaaaagttggaccgtcgtagtcgctgctccaagtgaatattcgcaaaatgcattggaagttaataaaactcaatacaagagtcaagtaaaattacctgagagttttcgtaattaattgatttatttattcaataccagcttatcaagccaactcaattcaaacagaaacttaacaccgggagctgaacaagtcagtagtattgggcagctggatggactagaaccattt

SEQ ID NO: 14027 - DNA, 3858 bp, DROSOPHILA
cacagctgccgccggtgcatgtcattgctgtgtgtgcgtgtgtgggtgaacttgagtgggaggcggaagatattggaaaaattcctccgcttttcgatgtcttagctttagctggacgcaaaacttaaactgcagacagtaaaggacgaaatcacattactcgactcaaaagaagacacacggaagagagataccaacaagatggccatgtccaaggtgatccgtgtgctggagaagtccattgccccctcgccgcacagcgtattactggagcatcggaacaagagcgacagcatcctgttcgagtcccatgcggtggccctgctgacccagcaggagacggatgtcatccggaagcagtacaccaaggtctgcgacgcctacggatgtctgggtgccctccaactaaacgccggcgagagcaccgtgctgttcctggtgctggtcaccggctgtgtgtccatgggcaagatcggcgacatcgagatcttccggatcacacaaaccacttttgtctcgctacaaaatgcagcgcccaacgaagacaagatcagcgaggtgcgcaagctgctcaactcgggcaccttctactttgcccacaccaatgccagtgcatcggcatccggagcgtcatcgtatcggttcgatattacgctttgcgcccagcgacgccagcaaacgcaggagacggacaaccgtttcttctggaatcgcatgatgcacatccacctgatgcgcttcggtatcgattgccagtcctggttgttgcaagccatgtgcggctccgtagaagtgcgcaccgtctacatcggtgccaaacaggcccgtgccgccatcatttcccgactgagctgcgaacgggctggcacgcgtttcaatgtccgtggtaccaacgatgagggctatgtggctaactttgtggaaaccgagcaagtgatctacgtggacggcgatgttactagttatgtgcagacgcgaggatcggtgccactcttctgggaacagccaggcgtccaggttggctcgcacaaggtgaagctatcacgaggattcgagacatcggccgccgcctttgatcgacacatgagcatgatgaggcaacgttacggctatcagacggtggtgaatctgctaggcagctcccttgttggcagcaaggagggcgaggccatgctgagtaatgagttccagcgtcatcacggcatgtcagcccacaaggatgtgccgcatgtggtgtttgactatcatcaggagtgtcgcggcggcaatttctcggcgctggccaagctcaaggaacggatcgtagcctgcggtgctaactacggcgtcttccacgcgtccaatggtcaggtgttgcgcgagcagttcggtgttgtgcgcacgaattgcctagactgtttggacaggacaaactgtgtgcagacgtatctcgggcttgacacgctcggtatccagctagaggctttgaaaatgggcggcaagcagcagaatatttcgcggtttgaggagatcttccgacagatgtggatcaacaacggaaatgaggtcagcaagatctacgccggcaccggggccatccaggggggatcaaaactaatggatggtgcgcgatctgcagcaagaacaattcaaaataacctactggacaactcaaagcaggaagccattgatgtcctgctagtgggctccacgcttagctcggagcttgcggatcgggctcgcatcctactgccctccaatatgttgcatgcacctaccactgtgttgagagagctatgcaagcgctacactgaatatgtgcgtcctcgaatggcacgtgtagccgtgggtacctataacgtcaacggcggcaagcacttccgcagcattgtgttcaaggattcgctggccgattggctgctcgactgccatgcccttgcccgctccaaggcgcttgtagatgtgaacaatccgtcggagaacgtcgatcatccggtggatatctacgccattggattcgaggagattgtggatctgaatgcttccaacataatggcggccagcaccgacaatgccaagttgtgggccgaggagctgcagaaaacgatctcgcgggacaatgactacgtgctgctcacataccagcaactggtgggcgtgtgcctatacatctacatccgaccggagcacgcgccgcacatccgggacgtggccatcgactgtgttaagacaggattgggtggtgccactgggaataagggtgcctgtgccattcgatttgtgcttcatggtacttccatgtgcttcgtgtgtgcccactttgcagccggacagtcacaggtggctgaaaggaacgctgactacgcggaaatcacccggaagctggccttcccgatgggcaggacgctaaaatcacacgactgggtgttttggtgcggcgacttcaactatcgcatcgacatggagaaggacgaattaaaggagtgcgtacgtaatggagatctctcaaccgtcctcgagttcgatcaattgcgcaaggagcaggaggctggcaatgtgtttggcgaattcctcgagggagagatcactttcgacccgacgtacaagtatgatttgttcagcgacgactacgacacctcggagaaacagcgagcgcccgcctggacagatcgggttctctggcgtcgcaggaaggcgctggccgagggcgactttgctgcctcagcctggaatcccggcaaattgattcactacggtcgttcggagctaaagcagagtgatcatagacccgtgatcgctattattgatgctgagataatggagatcgatcagcagcggagacgtgctgtattcgagcaggttatccgagatctgggtccgccggactccacgattgtggtacatgtcctggagtcttcagcaactggagatgaggatggaccaaccatatacgacgagaatgtgatgtcagccctgattaccgagctatccaagatgggagaggtcactttggtgcgctatgtggaggacaccatgtgggtcacatttcgggatggagaatcggctttaaatgcgtcttctaagaagagtatccaagtatgcggattagatcttatcctggagctgaagtcaaaggactggcagcatctggtggacagcgagatagagctatgcaccacgaacaccataccgctgtgcgctaatcctgtagagcatgcacaactcctgcaggccattacgccggagttgccccagcggcccaagcagccgcccacacgtcccccagcccgtcccccaatgcctatgtcgccaaagaactcaccacgccacctgccccacgtcggggtcatcagcattgtgcccaagccggcaaagccaccgatgccaccgcaaccgcaatctcaacctctaattccgtcgccgcttcagccgcaggtggcgccgcctcgtccgccggcaatggacaccacgccatcctccaaatcgcaatcgccaacggaacttgtatccgctagttcttcgacgtcctcttcgggaaagacttcgcccacagctccagctgtgctctccggtccgccgacgccgccgcgccaaatgcagagcaagcaggccacacccgtctcgacgcccacgcgccaagtcggttcgcccaaggatccgattccatctgataccgcctacgaaaccgccagtaatatttacgaggagattcaggaggatgtgcctgcgccacgccatccgccgccggctggaccgccgccagtgataggagcaccaatgggcccgccgccaccgctgccgaatcgcaggggcccaccacccataccaaataggagcggcaatgctccaccgctgcccacgcgacccgccaacaactga

SEQ ID NO: 14028 - protein, 1218 aa, DROSOPHILA
MAMSKVIRVLEKSIAPSPHSVLLEHRNKSDSILFESHAVALLTQQETDVIRKQYTKVCDAYGCLGALQLNAGESTVLFLVLVTGCVSMGKIGDIEIFRITQTTFVSLQNAAPNEDKISEVRKLLNSGTFYFAHTNASASASGASSYRFDITLCAQRRQQTQETDNRFFWNRMMHIHLMRFGIDCQSWLLQAMCGSVEVRTVYIGAKQARAAIISRLSCERAGTRFNVRGTNDEGYVANFVETEQVIYVDGDVTSYVQTRGSVPLFWEQPGVQVGSHKVKLSRGFETSAAAFDRHMSMMRQRYGYQTVVNLLGSSLVGSKEGEAMLSNEFQRHHGMSAHKDVPHVVFDYHQECRGGNFSALAKLKERIVACGANYGVFHASNGQVLREQFGVVRTNCLDCLDRTNCVQTYLGLDTLGIQLEALKMGGKQQNISRFEEIFRQMWINNGNEVSKIYAGTGAIQGGSKLMDGARSAARTIQNNLLDNSKQEAIDVLLVGSTLSSELADRARILLPSNMLHAPTTVLRELCKRYTEYVRPRMARVAVGTYNVNGGKHFRSIVFKDSLADWLLDCHALARSKALVDVNNPSENVDHPVDIYAIGFEEIVDLNASNIMAASTDNAKLWAEELQKTISRDNDYVLLTYQQLVGVCLYIYIRPEHAPHIRDVAIDCVKTGLGGATGNKGACAIRFVLHGTSMCFVCAHFAAGQSQVAERNADYAEITRKLAFPMGRTLKSHDWVFWCGDFNYRIDMEKDELKECVRNGDLSTVLEFDQLRKEQEAGNVFGEFLEGEITFDPTYKYDLFSDDYDTSEKQRAPAWTDRVLWRRRKALAEGDFAASAWNPGKLIHYGRSELKQSDHRPVIAIIDAEIMEIDQQRRRAVFEQVIRDLGPPDSTIVVHVLESSATGDEDGPTIYDENVMSALITELSKMGEVTLVRYVEDTMWVTFRDGESALNASSKKSIQVCGLDLILELKSKDWQHLVDSEIELCTTNTIPLCANPVEHAQLLQAITPELPQRPKQPPTRPPARPPMPMSPKNSPRHLPHVGVISIVPKPAKPPMPPQPQSQPLIPSPLQPQVAPPRPPAMDTTPSSKSQSPTELVSASSSTSSSGKTSPTAPAVLSGPPTPPRQMQSKQATPVSTPTRQVGSPKDPIPSDTAYETASNIYEEIQEDVPAPRHPPPAGPPPVIGAPMGPPPPLPNRRGPPPIPNRSGNAPPLPTRPANN

SEQ ID NO: 14029 - DNA, 4050 bp, DROSOPHILA
atttccatgtcctattcccattctcaatcactcgcagaaaaagtgtgttctaaacgcatgatcttgccacaagaaaatgcggatgccgcatttaaaggtatcaatgccactattggattaagtttaggttacattaaaatatttcttaaaaataaatcttgttttccttgatttgctcagtgcatccgtacgtggaatgctccatctccaccagttgtccattcagcagccatgttttccaattttcggcgcactgcgttgcattcagattcgttcagatgcaacagcagtggaacaacaacagcaacaaaagtcgctcgcttttcccaaaatttagtcattgttcgcgaaattgcttatagacgcggcactattgccaccaccaccccgtcgttttgcccaattttccggactgcccaatccgacctgccatgtcgacgcttctcagtgagggaaaattcggatggcagggagtccgtggagctgattgcaactctttggctttggctttggcggtggacaaccgcaacgagccgctttttgatcgtcgggcgtagcacaagtaaaaatattattacactctcgcgacccgcagtaaaatggggctccccagtgggtcagcgcacaggcggaacaaaggccaccgccactcgaaaaccattcgcgaatttattcgccggaaaagttgtaaaattaggaaaacgatttagtggaagaaccgcgcatccttttgctaaataggctgttttgggtgtctatcaataaatggtttggggatttgttattatgcaggtaactataccgcatcaggtaagctgaagcattatggtaaaccatacattaagttcgattctaattaagattatgtattgaaacatattaaatgaagttccttgcgtttttcaaaagtttatagtataattaaactttatgcctttaagggtaggtatatttataaatattggaatatatttaacaactaatattgcgttggactgctttatccctcggcagtgacaggcaccccagcgcttggcttagcctccatcactttatcctggggctgcaccagtgccttggtcggcagtaagtgcttcaagggctcaagaatgcgagtctgctgcaagtaggtgagctgctgttgctccagctgaagcaagctaatgcccaagtgaacggttagcgactgcggggggaagactccatggatgcacctctgaatatagggtaccaggtcgtaggccagacatgagcagagccgaacaaatgcctctcgttcgctgccggcgaaggcctgctgctcttgccgataaaaggcaagcacacgctgagcagcctgttgcagggagtgctgcagacagcgggtaacatcggtggccaaggccaagggagcacacagacgcagctcgttcaacgcgctcagatagccattgcacaaagcggccaggggatagaaatccaatagagcttcgggcggcgcgtaggactcctgctcgggatcaacctgcttgcgggcgtgagagtgcagcgccaccttgttgatcaaggtgaatctctccagttcccgctcgaactgctcgtcgacctgttccacgctgctctcaaagcgacggcggatcacgcccacgaaaattggagccataagggcacgaaaatcagcgccgacacggctaaacgacagcccaaagtacatgcactgcccaagcactgtttcgacggagccaactcctagctgtagatcacgttccagagtctgcagaaagtcgctgatctgaagaaacagacagaaagtagtatgcaaagaaataaaccagtcaagcagtagcaaccttattgtgcagccaggcctgaaaaagtctgtcaccgttgcagctgacgccctgcagcggtcttaaagaactctgagtctttagagtgccctcgtcttccgggaaaattgcgcgatactgggtgattatattgaacagatttatgcgagtaatctcgatggttttcgatagatgctgctgggctgtaaagagcaagatgaaaattgttagtttcattgctgtggtccgaagcgccttttgctacttctttgagcttcacactaaccatctgcagtgggtatggcctccaggcaagaagttaaccacgcgtcccttgcctgcagaaacttcaatcgcagttcgttgtcaccgaatgcctgcatccgtcgaagatagcccacgatttgcaggcacttgggtagctggagatccgtccgcagttgtgcaaccagctgcaccagcatgttgtgccacagggcttccacggagcgcacaatgctctgaaagtattcgcttaataaaggagaatgaagaaaatcaaactcaatgataacgcactgtgaccacgggaatgtgtccctggtgctggcccaagcgggtggcgtaggcggccagttccagagcctcctcgtagcggccctcgcgaatacagcgctccatgagttgcggcagttcgagaacttccagcaactgggcgttcttttgcagggtaatggaattcagtcgccgttgctcattcagctcggcggagtcctgcaggaagcgttcgcactggacactgaggtcgggaagcttggacaccagtgtgtccagctgctgctccgatcgcaggaactcgctgaaaatcgaacgcgagttctccgcggtggtgatgaaagttctgtagttggagatggccagatcctgtgtctgctccagaatggtgcgcgcctcttccgccagtcgcgtctgctccttcttcagctgctccaccttgcaggtacccagtttggcgaggtagttatccagctccggattgccacgcagattgtctgatgatgcgtttggaacacgaaacataagttatctgcccattccggcggctttaaatgatgcactcacctggcacaccgtcggggaatatcagcttcagtaccctctcgttctccaaatccattttgtccggaaagtccattgttttcaattataaatcaaaaattatccaatttgttgacgtctgtgaaaaacagctgattcgtgcggttcgtgctaccagatcgacggtagccagtactgccagattgccgcgaatattttcttttattgctatttaaaaccattttaggcacctttctagattctaagatcaatacaatccgaaaaagctttctatagaacgcattttaaaaattaagcttactctggaatggttgcgataaagtcacatatgagaaaagtagtgttaaaaattcaatcatgaagtctgacagaagctgaccaatatgaaactcgcctaacgtcttttcaaacatttagctatatgatttttgttttaaaatatattttaattgttaaatttaaatatatatatttacattaaatctatacatctttaaaactcagggctgcacaaagtacaatttttttacatggcattaaaagttttaattgttatataatttaaagaatcagtcccttaaaatacaatgccattaaatgaaagttaattgttagggaacaatgaagctatttagtacaatttaagtaacgatgaaaggttgctaagaaacgcgatttctttttccctatgaataagattgaaatagctatattaatggattagattataacattcgaatcattcattcattggtcttatagtttcgatacgcactttactttcctggcccagacctccgattaaagcgctcaactggagtgaagtgaacctgcttctcaggcgcaaccgcagccacagttattatttttgcactttcacttgctctgacccaaatatcgatggcacttagctgatacgattcctttatttcgggtgtcactcacacaaaatgatatgatttagcatgggctatatcatagatattttaacttaaccgtaagatacaacattattgcaaacttaggcacttttcttatgaatgctgtggagccagccgcttttgcacaatatttcgcaatagcaattatttggcaattgtttgggggaaaaccagttttttttttgcggtcagaaaagggagcg

SEQ ID NO: 14030 - DNA, 1781 bp, DROSOPHILA
ccgcacgaatcagctgtttttcacagacgtcaacaaattggataatttttgatttataattgaaaacaatggactttccggacaaaatggatttggagaacgagagggtactgaagctgatattccccgacggtgtgccagacaatctgcgtggcaatccggagctggataactacctcgccaaactgggtacctgcaaggtggagcagctgaagaaggagcagacgcgactggcggaagaggcgcgcaccattctggagcagacacaggatctggccatctccaactacagaactttcatcaccaccgcggagaactcgcgttcgattttcagcgagttcctgcgatcggagcagcagctggacacactggtgtccaagcttcccgacctcagtgtccagtgcgaacgcttcctgcaggactccgccgagctgaatgagcaacggcgactgaattccattaccctgcaaaagaacgcccagttgctggaagttctcgaactgccgcaactcatggagcgctgtattcgcgagggccgctacgaggaggctctggaactggccgcctacgccacccgcttgggccagcaccagggacacattcccgtggtcacaagcattgtgcgctccgtggaagccctgtggcacaacatgctggtgcagctggttgcacaactgcggacggatctccagctacccaagtgcctgcaaatcgtgggctatcttcgacggatgcaggcattcggtgacaacgaactgcgattgaagtttctgcaggcaagggacgcgtggttaacttcttgcctggaggccatacccactgcagatgcccagcagcatctatcgaaaaccatcgagattactcgcataaatctgttcaatataatcacccagtatcgcgcaattttcccggaagacgagggcactctaaagactcagagttctttaagaccgctgcagggcgtcagctgcaacggtgacagactttttcaggcctggctgcacaataagatcagcgactttctgcagactctggaacgtgatctacagctaggagttggctccgtcgaaacagtgcttgggcagtgcatgtactttgggctgtcgtttagccgtgtcggcgctgattttcgtgcccttatggctccaattttcgtgggcgtgatccgccgtcgctttgagagcagcgtggaacaggtcgacgagcagttcgagcgggaactggagagattcaccttgatcaacaaggtggcgctgcactctcacgcccgcaagcaggttgatcccgagcaggagtcctacgcgccgcccgaagctctattggatttctatcccctggccgctttgtgcaatggctatctgagcgcgttgaacgagctgcgtctgtgtgctcccttggccttggccaccgatgttacccgctgtctgcagcactccctgcaacaggctgctcagcgtgtgcttgccttttatcggcaagagcagcaggccttcgccggcagcgaacgagaggcatttgttcggctctgctcatgtctggcctacgacctggtaccctatattcagaggtgcatccatggagtcttccccccgcagtcgctaaccgttcacttgggcattagcttgcttcagctggagcaacagcagctcacctacttgcagcagactcgcattcttgagcccttgaagcacttactgccgaccaaggcactggtgcagccccaggataaagtgatggaggctaagccaagcgctggggtgcctgtcactgccgagggataa

SEQ ID NO: 14031 - protein, 570 aa, DROSOPHILA
MDFPDKMDLENERVLKLIFPDGVPDNLRGNPELDNYLAKLGTCKVEQLKKEQTRLAEEARTILEQTQDLAISNYRTFITTAENSRSIFSEFLRSEQQLDTLVSKLPDLSVQCERFLQDSAELNEQRRLNSITLQKNAQLLEVLELPQLMERCIREGRYEEALELAAYATRLGQHQGHIPVVTSIVRSVEALWHNMLVQLVAQLRTDLQLPKCLQIVGYLRRMQAFGDNELRLKFLQARDAWLTSCLEAIPTADAQQHLSKTIEITRINLFNIITQYRAIFPEDEGTLKTQSSLRPLQGVSCNGDRLFQAWLHNKISDFLQTLERDLQLGVGSVETVLGQCMYFGLSFSRVGADFRALMAPIFVGVIRRRFESSVEQVDEQFERELERFTLINKVALHSHARKQVDPEQESYAPPEALLDFYPLAALCNGYLSALNELRLCAPLALATDVTRCLQHSLQQAAQRVLAFYRQEQQAFAGSEREAFVRLCSCLAYDLVPYIQRCIHGVFPPQSLTVHLGISLLQLEQQQLTYLQQTRILEPLKHLLPTKALVQPQDKVMEAKPSAGVPVTAEG

SEQ ID NO: 14032 - DNA, 7105 bp, DROSOPHILA
caaagggaaagtgtgtgtgtgtgtgtgtgtgtggtgagaccgagagagagcacaaaaacaaaaatgcaaaatgaatataatcaggtacatttgatatatcggttgtgtaaacaaaacaaaatgcagcagtaaatatgcggaaattaagcattaaacatttcgcttaaaaaaggactacaaatataaataaaataaaattacaaatattattgaatagattacgttttaaatcggaatcgatgtgaacacttgtgactattgtggttgagtggcatttgagtggttggatagtatgttggttgagtgtgggctattgcagtatttgtggttttttggctgttctgtttgcgtatatttattctatttgagtgtaattgaattttttgcggcaattacgaagcaattgttaaacgtagtaattatcagcgacaaatattgtaatgcatacttgcgggctgcgcggtctattgctatgtatatatgtacttatgtatttcggtgtgcatgtgctatgtttgtgtttgcatcgaaagcaacaataaattatgtttatgtgtaagaaaaagttacatgtaaaaatgagcctcaattaacgaaaaaaacaaacaaaaactaaacaaatacaaatacaaaagtacggtaaaaacgttgaatcgcgacaaaagtatagcatacaacttagcgtacgtgttctgtatacgagtgtacatatgtagatacatgtgtataaatattagcttaattaatcatttctcccatagttccatagtttcagttactaaatatttacatttataaaatgtactctttataaatgctaatcatcgtagtgatctaattatcatcattatctgcgtaatcactactcttttggaatgtttcgagctgtgaatgtggttttctctcctatataacttttcgcccatctcctttctatttctcttgttttattttgttttgcttgcttctatgttgtagcttcataaaaatactgcttgcttcacccattgggatccacctgggctcgtcgatggaccactgtcgccgctggccaagattgcttgaccgccgacgaatggtttacgttaacggacgccggtccgttggcaggaactttgcatgcattgtggctgaacgagatcggattgccattgcctcgcggctgacgctccttggcagttgctgatttctggctagtgttagtgctgctattgttattgttggtggtgttatacgtgccgccccccgatttggccacatcggcgggcagtttgaaaccattggtgaggcatacagccgcatattcgcgttccgaggtgggtgttaaggtggcagccgcctcctcctcggccagcaggtaaatcccatcatttgaatttgagtggcgcacgaagttggtgtgaaactgttttttactgctgccgttgctgctgctgctggcactgctgctgctcaggctcccactccttcgactggagccacctacacctccacctccgctgccgccgccgccgaccacacccagtccaggcatagtggtgaccaatggcagcgagtttggcggtacaatcacctccagttcggagccactgggcaccgcacactgtttggagctgctcaaagccaccgcgttgggtggcgtatgcctatagggtatatagaatgctttcgcttcctgcaacatggcatcctgcacggtctttcgctccggcgatgtacctccaactccgcacagcggcaactgcgataggttgtgcactccggctatgcccaagtccccctgagctgctccatcttgatccgatcgcctcgccacctggacactcccattgccgttggccagatgaacaactgccacggccgccgtgctggtctggtattccaaactgtgctccggtagcaattcaatgtggtaccgtgaacgcggaatgagagtttgcatctcatggcaatcctgctgcaatgttccaccactcagaccgccggcactatctcccggcatcccggaggcactgctcagattaccgaaattaatatcagtcggtgtggtcaggtgggtgggtccctgggcgcgggccttgaagttgcgctgctggaaaattataaacagcccgaagagaaagacacatgctattgacagcaaagagcctatggcaatcccactgtaaacctccgaatgcgatgattcgctttcctccttcagccatgtgtggttattatttatcatgtcgaagtacatgggagctcctgctccagtatcgcccattacgcgaactgccacatggattttcgccgtctcagagacatttggaaactaacaaagattatgaaaataaatatagcaaaaaggtactctattttttaattaccttatatgagcattttgtgcactctttaacaatagcttcgtgcgttacattgtccaacgaccaccggatatcatagtgatgaacacgaccattgggattaatcggtggctcccacatcaatttcaggccattttgtttaatcaactttgaattgctgatggtaccaggagctacaaaatacaatccttgtaatgtaaggcagataaaaagtgtgcgctttacttacgatcctgctcggtcttctcatctatgtcgccatagaaaatacgcgtcttgcagttgtagaaatgcagattgtaccgagtgtctggcttaagacctgtgaccaacagcaacgagttggcaatatttcgatcctgacactttggatcctgactgggtaatgacatttgtgcttgtatctccgtgtggcactccagcacgcaagtctcattgaggctatccagaaacttaaaggccaaagcccgagactcacgggtgaccagacgaaagggcatatttgactgctccgaagtgccattctcgatctgcaaggataaaatttgttcgagccataatagagcctgtattcagatggggtcctagagaaatgacaaattaatcccctacagtacagtctactcacaatcttccactgaacatagcgaaagtcctggcccaggaactcattctcggtggtgatgatcaacactctcattttgatgcgcgtgaatcgctgcaacaagattccggttacactggcatctaccactagactaaagatgtcatcctccagttctagagtgtcgtcgacaacgttgtcctcgtgctccacatttctcagcactgtggctgccgcagattgattaagaggctggatttcggtcagatggtgtcgcacctggtcagctttttcctcaacagaagtcagggtgccttgtagagatccatttaagagttgcgcaggatgcggatgggtgtggttgatcgagaactgcaggataaagtacttcttgttctccaactgaccctgcgaccacttaacaaacgtgtcattgcccacggcaatgggtcgaagcattactaaaatgtataaagcaaataagacattttgttggcaactcgaagatagttatatacacttacatccttgggtgcagcacgtgactggtgtacttcttaacgagctgagaatcatttgctggggaaccaaggttcctgtccttacctctgtagtgggaaataatactcgggtgatcaaggcaaagggctcgtaaacgggcaaatcagtggatatcaccacgtaggatgtctgattcagcttcatgggcgaaaacgaggtccaactgtggggattgttcctcacaatatacaccacgaacattgacgttagggtgcggctgtcaaatgtgatgttgatcgaatggaagctgtgcggatagcagcgtatgttctgcagtgggttgacctcctcgagctgtcggttgaatcgcagctcacccgtcgccgaatcctcaccagcaacatttctggccacacactggtagatgccctcctccttggagtcaaacgaatggacgtgcaactcattcccgctaatgtagcgtgtatatgagctgttcagatggacgccgttgtggtaccaggtaatactcggttccggatgcccctctgcccggcaggttagtgttcgcgagagaccaatatacaccacctcgacgggcaggcgactcacaatcctcggaggtgttgtcacaatcacctgaaagttttgcgtttccagtggggttatacaactgtagcgtccttcatgccgggctatgctagcattcgtgatggaataggctacactattgttgctcaggcgaaccatcttgttgtttggcggctggaggtaccacacaattggcacaaagtctgccaccgcgtggcattgtagcagcacggatccgccggcgggcacaaaaaccgttgcattctgaaacgccggcagtagttgggcctccgaaacggctgtctccgtaattcccgcctcgtttttgggataaaatgtagcatccttcggctccacttgcagttgccaaatgaactggcggtgcgtcttgctggcaaatgtgttctgcgccacgcacctgcaacgggaatagtggataatggataatggatagtggtcagtggtctcgcgcgataattgacatggacaatggccacaattacagccagcactcggccgccgctaagtgttaattaatgcattgtttaagggcacaccggcggtgcgagtggtgcgtgaatgctagtatgtgtgccatgggagtgggtctgctgatggagtgccgcaaaaggtgttgattttaccacaaaggcgaaggtggagcgcagcggcggcagcagccaaatggaaaattgccttcggtcttaatttagttaaactgcgcagttacccagcagggaaactatacagataacaagttaaatgcggcatgtgtttaaaagtgcaatacggaaactagcagttaactttaaatgcactttaaagggtgagttaaacggattttgattgggttgtcttaaactagatgttctttatactcacttatatttacccgcctgttcgagacgcaaatgcctcaatattaaggtgccattggtcaggatgagagcactgcagtaattagaaatttattagaaatttaataaagaaaatggaatcgtcaatccaagcgtgggtcaatccatccagctggcaagctctacaagtataagggcttacatacaagtcttggcccgctgctagatgcttcaacactgatctttactcgcctgttgtcattggtcagggaatcgttgccaaagtaccagctaaaacgcgcagctggaacactcagaaaggggcagctcagcacgagcggtttgttttccaacgcactgatattggccgcttgctgttggccaggaaataaacgcttgagcactgaatgggataaacagattaattggaattgaattcatgaatttatcttataattttagttagtttaaatgaccaactcaccaggatactcgactgtgattctgtcggatatcaccgctgactcatcccactcgatcttgcagtaatattcgccgcttgccttttcattggtgggcagacgcagcgtaccattgtcatagataaagaagtcatttttgcgatatgatacttgttcgacaaccacgtcatttcgataccaactgcagtagatgggctggttgtctgtgtcatagttcaaaaatgttagtaagtacctataggaaagcaatcgcgaaaaaacacacttaccctgatcgtgattgtagggcgttaggatgggtatgcatggcaaatagtacggggagtggggcttgctgatggtcagtcttgtgacggcgtgcttctggatctgcagatatggctggagtgctgttgagttcttcggttgggcgacggcggcagcaactgcaaaagagcaaaaacaattgattaagaatctgtgcttggcgcgacgcggctaaattattggttccaataatcctccgcccattgcccagacaatagacaaaaggcggacaatgagccggccgggcaaagaaaccgggccacaaaaaaaaaatgaaaatgttatttatattctagcttaatctattggctgttataaatttcacgcttttcacttaacaccgccccagtccgcccatcctcccacaactgcatcgaggtttttactgcaatgcccataaatacccggagcacacagaaaaaatctgagaaatagaaactgccaaacaacggagccgtgctggggatgcactgaaagaaaatcactcggtaatcaaggtaatcatatattttgttaactaagtatataatcaatcaatcaataatagaatcaaataatattcgataagctgaggccagataaaattatgtgtacactagaggggcagatttttctttcagtgagctttgaggtaatgcttctagctctggttctgggcaagtccagggctctggttttcggtctggctccgagtccgagctggagtctccgctacgtgctgcaggcgtgtccaggcagacttggcgtgttaattaatttttctgctgctgttctgctgttgacgcgaccatggcgacgtctgcgcccgtagctgcaacggtccgactgtgcgtatacgtgatattaagcagttgaaacaattacatggccagcgggcagcagtggagatttgcatacaactttgtcgaaagtcgtccatcaggcatcacattatctattagcagaacgagcaagttccagggaagtggaaatgataatggccaatgccaggttgagtgcttgacgggtgaaaaatggcaaagtgcggcagtgggaccccttaacaaatgtcgggacattagtcaaatgcgttgaaatttatgctaaaaatgcaatcaacttgcgttccgctcgacggacatcctcaagcaccacctccccccccccccccgaaagtccactcctagaaaaaaaaaaaagccccaccacaaccatgcagctccaatcagcctgccacccaagtggccaagtgcactcggttgttgccaaatgctgaatgtgctgactgctcgttagtcagtcacaaattgtggcaagacgttctgctcttttttgctagctgcgctcggaaaccgaatatttgtttcggttttgataaatggactactataaattagataattgctgaacacgctgcga

SEQ ID NO: 14033 - DNA, 3915 bp, DROSOPHILA
atgggcattgcagtaaaaacctcgatgcagttgtgggaggatgggcggactggggcggtgttaattgctgccgccgtcgcccaaccgaagaactcaacagcactccagccatatctgcagatccagaagcacgccgtcacaagactgaccatcagcaagccccactccccgtactatttgccatgcatacccatcctaacgccctacaatcacgatcaggacaaccagcccatctactgcagttggtatcgaaatgacgtggttgtcgaacaagtatcatatcgcaaaaatgacttctttatctatgacaatggtacgctgcgtctgcccaccaatgaaaaggcaagcggcgaatattactgcaagatcgagtgggatgagtcagcggtgatatccgacagaatcacagtcgagtatcctgtgctcaagcgtttatttcctggccaacagcaagcggccaatatcagtgcgttggaaaacaaaccgctcgtgctgagctgcccctttctgagtgttccagctgcgcgttttagctggtactttggcaacgattccctgaccaatgacaacaggcgagtaaagatcagtgttgaagcatctagcagcgggccaagacttgtatgtaagcccttatactttgctctcatcctgaccaatggcaccttaatattgaggcatttgcgtctcgaacaggcgggtaaatataagtgcgtggcgcagaacacatttgccagcaagacgcaccgccagttcatttggcaactgcaagtggagccgaaggatgctacattttatcccaaaaacgaggcgggaattacggagacagccgtttcggaggcccaactactgccggcgtttcagaatgcaacggtttttgtgcccgccggcggatccgtgctgctacaatgccacgcggtggcagactttgtgccaattgtgtggtacctccagccgccaaacaacaagatggttcgcctgagcaacaatagtgtagcctattccatcacgaatgctagcatagcccggcatgaaggacgctacagttgtataaccccactggaaacgcaaaactttcaggtgattgtgacaacacctccgaggattgtgagtcgcctgcccgtcgaggtggtgtatattggtctctcgcgaacactaacctgccgggcagaggggcatccggaaccgagtattacctggtaccacaacggcgtccatctgaacagctcatatacacgctacattagcgggaatgagttgcacgtccattcgtttgactccaaggaggagggcatctaccagtgtgtggccagaaatgttgctggtgaggattcggcgacgggtgagctgcgattcaaccgacagctcgaggaggtcaacccactgcagaacatacgctgctatccgcacagcttccattcgatcaacatcacatttgacagccgcaccctaacgtcaatgttcgtggtgtatattgtgaggaacaatccccacagttggacctcgttttcgcccatgaagctgaatcagacatcctacgtggtgatatccactgatttgcccgtttacgagccctttgccttgatcacccgagtattatttcccactacagaggtaaggacaggaaccttggttccccagcaaatgattctcagctcgttaagaagtacaccagtcacgtgctgcacccaaggattaatgcttcgacccattgccgtgggcaatgacacgtttgttaagtggtcgcagggtcagttggagaacaagaagtactttatcctgcagttctcgatcaaccacacccatccgcatcctgcgcaactcttaaatggatctctacaaggcaccctgacttctgttgaggaaaaagctgaccaggtgcgacaccatctgaccgaaatccagcctcttaatcaatctgcggcagccacagtgctgagaaatgtggagcacgaggacaacgttgtcgacgacactctagaactggaggatgacatctttagtctagtggtagatgccagtgtaaccggaatcttgttgcagcgattcacgcgcatcaaaatgagagtgttgatcatcaccaccgagaatgagttcctgggccaggactttcgctatgttcagtggaagattatcgagaatggcacttcggagcagtcaaatatgccctttcgtctggtcacccgtgagtctcgggctttggcctttaagtttctggatagcctcaatgagacttgcgtgctggagtgccacacggagatacaagcacaaatgtcattacccagtcaggatccaaagtgtcaggatcgaaatattgccaactcgttgctgttggtcacaggtcttaagccagacactcggtacaatctgcatttctacaactgcaagacgcgtattttctatggcgacatagatgagaagaccgagcaggatcctcctggtaccatcagcaattcaaagttgattaaacaaaatggcctgaaattgatgtgggagccaccgattaatcccaatggtcgtgttcatcactatgatatccggtggtcgttggacaatgtaacgcacgaagctattgttaaagagtgcacaaaatgctcatataagtttccaaatgtctctgagacggcgaaaatccatgtggcagttcgcgtaatgggcgatactggagcaggagctcccatgtacttcgacatgataaataataaccacacatggctgaaggaggaaagcgaatcatcgcattcggaggtttacagtgggattgccataggctctttgctgtcaatagcatgtgtctttctcttcgggctgtttataattttccagcagcgcaacttcaaggcccgcgcccagggacccacccacctgaccacaccgactgatattaatttcggtaatctgagcagtgcctccgggatgccgggagatagtgccggcggtctgagtggtggaacattgcagcaggattgccatgagatgcaaactctcattccgcgttcacggtaccacattgaattgctaccggagcacagtttggaataccagaccagcacggcggccgtggcagttgttcatctggccaacggcaatgggagtgtccaggtggcgaggcgatcggatcaagatggagcagctcagggggacttgggcatagccggagtgcacaacctatcgcagttgccgctgtgcggagttggaggtacatcgccggagcgaaagaccgtgcaggatgccatgttgcaggaagcgaaagcattctatataccctataggcatacgccacccaacgcggtggctttgagcagctccaaacagtgtgcggtgcccagtggctccgaactggaggtgattgtaccgccaaactcgctgccattggtcaccactatgcctggactgggtgtggtcggcggcggcggcagcggaggtggaggtgtaggtggctccagtcgaaggagtgggagcctgagcagcagcagtgccagcagcagcagcaacggcagcagtaaaaaacagtttcacaccaacttcgtgcgccactcaaattcaaatgatgggatttacctgctggccgaggaggaggcggctgccaccttaacacccacctcggaacgcgaatatgcggctgtatgcctcaccaatggtttcaaactgcccgccgatgtggccaaatcggggggcggcacgtataacaccaccaacaataacaatagcagcactaacactagccagaaatcagcaactgccaaggagcgtcagccgcgaggcaatggcaatccgatctcgttcagccacaatgcatgcaaagttcctgccaacggaccggcgtccgttaacgtaaaccattcgtcggcggtcaagcaatcttggccagcggcgacagtggtccatcgacgagcccaggtggatcccaatgggtga

SEQ ID NO: 14034 - protein, 1304 aa, DROSOPHILA
MGIAVKTSMQLWEDGRTGAVLIAAAVAQPKNSTALQPYLQIQKHAVTRLTISKPHSPYYLPCIPILTPYNHDQDNQPIYCSWYRNDVVVEQVSYRKNDFFIYDNGTLRLPTNEKASGEYYCKIEWDESAVISDRITVEYPVLKRLFPGQQQAANISALENKPLVLSCPFLSVPAARFSWYFGNDSLTNDNRRVKISVEASSSGPRLVCKPLYFALILTNGTLILRHLRLEQAGKYKCVAQNTFASKTHRQFIWQLQVEPKDATFYPKNEAGITETAVSEAQLLPAFQNATVFVPAGGSVLLQCHAVADFVPIVWYLQPPNNKMVRLSNNSVAYSITNASIARHEGRYSCITPLETQNFQVIVTTPPRIVSRLPVEVVYIGLSRTLTCRAEGHPEPSITWYHNGVHLNSSYTRYISGNELHVHSFDSKEEGIYQCVARNVAGEDSATGELRFNRQLEEVNPLQNIRCYPHSFHSINITFDSRTLTSMFVVYIVRNNPHSWTSFSPMKLNQTSYVVISTDLPVYEPFALITRVLFPTTEVRTGTLVPQQMILSSLRSTPVTCCTQGLMLRPIAVGNDTFVKWSQGQLENKKYFILQFSINHTHPHPAQLLNGSLQGTLTSVEEKADQVRHHLTEIQPLNQSAAATVLRNVEHEDNVVDDTLELEDDIFSLVVDASVTGILLQRFTRIKMRVLIITTENEFLGQDFRYVQWKIIENGTSEQSNMPFRLVTRESRALAFKFLDSLNETCVLECHTEIQAQMSLPSQDPKCQDRNIANSLLLVTGLKPDTRYNLHFYNCKTRIFYGDIDEKTEQDPPGTISNSKLIKQNGLKLMWEPPINPNGRVHHYDIRWSLDNVTHEAIVKECTKCSYKFPNVSETAKIHVAVRVMGDTGAGAPMYFDMINNNHTWLKEESESSHSEVYSGIAIGSLLSIACVFLFGLFIIFQQRNFKARAQGPTHLTTPTDINFGNLSSASGMPGDSAGGLSGGTLQQDCHEMQTLIPRSRYHIELLPEHSLEYQTSTAAVAVVHLANGNGSVQVARRSDQDGAAQGDLGIAGVHNLSQLPLCGVGGTSPERKTVQDAMLQEAKAFYIPYRHTPPNAVALSSSKQCAVPSGSELEVIVPPNSLPLVTTMPGLGVVGGGGSGGGGVGGSSRRSGSLSSSSASSSSNGSSKKQFHTNFVRHSNSNDGIYLLAEEEAAATLTPTSEREYAAVCLTNGFKLPADVAKSGGGTYNTTNNNNSSTNTSQKSATAKERQPRGNGNPISFSHNACKVPANGPASVNVNHSSAVKQSWPAATVVHRRAQVDPNG

SEQ ID NO: 14035 - DNA, 8399 bp, DROSOPHILA
cggcttcaatggacaatttcggttggttgccgatcagcagtatctgcattttcataatcttcttctcgattggattcggaccggtgccgtggctggtgatggcggaactcttctcggaggatgtgaagagtgtggcaggatcgattgccggcaccagcaactggctgtcggccttcgtggtcacgctgctcttcccaatcctcaagagctcgatcgggccgggtccgaccttttggatctttaccgcgatcgcggtcatcgccttcttctactctctgttcttcgtgccggagaccaagggcaagacaataatcgaaatccaggacctgctgtccggaggaaagggtgtcaaaagtgatgacaagagccagacgtgatgatgtcgcgtagtcttagtcgtagcgatactttttcatattctccttaagccaataagaaaatgttatgtataagaagtgaagagcataatcaataaagtagaatcaccatgtatataaactacccgattgaattttcgttcatttccgtcagtgtagttctaattagactcaattagtataattctaattagtttgacaagattttaagtcttggaaaaaaatgaggaaataagaaactttactcgtatggaggagggctgcaaacgaaggtctaaatgatctaaggatagtatgggtcaaaaagtgatgtgatatattcttaacaattggtattgattaagaattcaaataataaataattcacgaacttacactaccgaaaatgcttattattttgttgcagatttcgataaaaatggaaacgtttattatttccggaaggtatattattggcagcgagcatttcaaaacaaatttatttatgttgcggtttgtggtaataatttaagttcaaagaaccgcactgcgtagtgtgaccagtccgttttgaaacacaattcttaatacgtttgacacaaggcatcttataagagccgctggccactctgtcaccggcttctttgttctttaatcgtaaattatttgacttcaaattgtaatatcaaaatatcccgaagactctgtaaccaagagcgaagatatggaagatgtggaaatcaaggtaaaatgaattggcttgcgctctcgcttattgcaaaataattaacaaaatcctttccagcctcgcggctatcaacttcgcctggttgaccacctaacgaagagcaatggcattgtctacctgcccacaggatctgggaaaacgttcgtggccatcctggtcctaaagcgcttctcgcaggactttgacaagttagtagcgaatggatatacatatatatattattatatgtattacctatatccgatacttacatttatatatatattattatatgtaatacctatatcggattccgatttgtttacacagacccatcgaaagcggcggaaagcgtgcgttgttcatgtgcaatactgtggaattggcccgacaacaggcgatggccgtcaggcggtgcaccaactttaaggttggcttttatgtgggtgaacagggagtggatgactggacgcgcggaatgtggagtgatgaaatcaaaaaaaaccaagtgagtataggatggcggaggcattttttatatacgcatatgatcacgtacggactaaacactacactaccactacacactgcaattgcgatcaccacttgagtcgaaaaatttgggatcagcatttttatgggctcgtaaggggtcgtgttttgctaagccatcacaaaatcatcatttcgtcaattgatgtattttatttgtttttttttttttttgtagtatgtttatttgtttatttatttattttatttgtttatttaaaattaacttgagtttgtggattgttctggatcatcgagtagtagatttgatggtcatttttattacattgaattcatgttagacttttcagtgtaattcgaggaatatttatagttaataataatacactgcttccagaattaaacctacatgtgtaatttttggttcttaacaggttcttgttggcacagcccaggtctttttggacatggtcacccagacgtacgtggctttaagctccctgagcgttgtcatcatagacgagtgccaccacggcactggtcaccacccatttcgtgagttcatgcgattgttcactatcgctaatcaaacaaaattgccgcgcgtggtgggtctcaccggggtgttaatcaagggaaatgaaattacgaacgtggccacgaaacttaaagagctagagatcacatatcggggaaacatcattaccgtgtccgacaccaaggagatggaaaacgtgatgctgtaagagcgggtggcattttagctacagtttcccaacaagtgcatattcttttcaggtacgccaccaagcccacagaggtcatggtgtcctttccacatcaagagcaagtgctcacggttacaaggttaataagcgcagaaattgaaaagttctatgtatccttagacctcatgaatattggcgttcaaccgatccgaaggtcaaagtcattgcaatgcctgcgggatccgtcgaagaagagctttgtaaagcaactgttcaacgattttctgtaccagatgaaagagtatggcatctacgcagcttccatagccataatctcgttaattgttgagttcgatataaagaggcgccaggccgagacgctaagcgtgaaattgatgcataggacggccttgaccttgtgcgagaaaatccgtcacttgctggtgcaaaaactgcaagacatgacttatgacgacgacgatgacaacgtaaacactgaggaagtcattatgaacttctccaccccgaaagtgcagcgattcctgatgagtcttaaggtatccttcgctgataaagatcccaaagatatctgctgtctggtctttgttgaacgccgctacacctgcaagtgcatctatggcttgctgctcaactacatccagtctacgcctgagctgcgaaacgtgctcacgccccaattcatggtgggccgcaacaatatttctccagactttgagagcgtcttggagagaaaatggcaaaaatctgtaggtgtggaaattatcgttaattgctgatatttttcaaaatatgctcttaccgtctcgcaggccattcagcagtttcgggacggtaatgccaatcttatgatatgttcaagcgtcctagaagaaggcatcgatgtgcaggcctgcaatcatgtctttattcttgatcctgttaaaacctttaacatgtacgtgcagtcaaagggtcgggctcgtaccactgaggccaaattcgtgctgttcacagctgataaggaaagggaaaagacaattcagcaaatttatcagtatcgaaaagcgcataatgacattgccgaatatttaaaggatcgagttctagaaaaaactgagccagaattgtacgaaatcaaagggcacttccaggacgatattgacccttttaccaatgagaacggtgccgtgttgcttcccaacaatgccctggccatactgcatcgctattgccagacaattcccacggatgcttttggctttgtgatcccctggttccatgtattgcaagaagacgaacgtgatagaatatttggtgtttctgccaagggcaagcacgtaatttcaatcaacatgccagtaaattgcatgctaagagacacaatttacgtaagctagagattcagattgaaaatggcaaaatcaaatagagttaattgctttcatttctttcagagcgatcccatggacaatgttaaaacagccaaaatatcagctgccttcaaagcgtgtaaagtactctacagtttgggagagttaaacgagagattcgtgcccaaaacattaaaggagcgcgtagcctctattgctgatgttcattttgagcactggaataagtatggcgatagtggtgggttcacaagaactcgcataagatatgtttacttatattaatctttcaaccatagtgactgcgacagtcaacaaggccgataagagcaaggacagaacctacaagaccgaatgtccattagagttttacgacgcacttccgcgggtaggtgaaatctgttatgcctacgaaatatttttggagccgcagtttgaatcgtgtgagtacacggaacacatgtatttaaatctccaaacaccaagaaattatgctatattgctgcggaacaagctgccacgccttgcagagatgcccctgtttagcaatcagggtaagctacacgttcgagtggccaatgcaccacttgaagtaattatccagaactccgaacagctggagctgctccatcagtttcacggaatggtattccgcgatatcttgaagatttggcatccgttctttgtgctggatcgtcgcagcaaggagaactcctacctggtagttcctctcatactgggtgcgggtgaacagaaatgctttgactgggaactgatgaccaacttccgaagactaccgcaaagtcatgggtcaaatgtacagcaacgcgagcaacaacctgctccacgtcctgaagattttgagggcaaaattgttacacaatggtatgccaactatgataagcccatgctggtcacaaaggtgcaccgtgagctaacaccgttaagttatatggaaaagaaccaacaggacaagacctactacgagtttaccatgtcaaagtacggcaaccgcattggtgatgttgttcacaaggataagtttatgatcgaggtcagagaccttacggaacagctcactttctacgttcataatcgtggaaagttcaacgcgaagagcaaggctaagatgaaagttattttgattccggagctatgcttcaattttaactttcctggggatttatggcttaagttgatcttcctacccagcattttaaaccgcatgtacttccttctccacgcagaggccttacgtaagcgatttaatacgtatttaaacctccatctgctgccttttaatggaactgattacatgcccagaccactagaaattgattattcgctaaagcggaatgtcgaccccttgggcaatgtcataccaactgaggatatcgaggagccgaaatcccttttagagccaatgcccacaaagtccattgaggcgtccgtggccaatcttgaaataacagaattcgaaaatccctggcaaaagtatatggagccggttgatctgtcgcgaaatcttttgagtacgtatcccgtagagctggactactactatcattttagcgttggtaatgtatgtgagatgaatgagatggattttgaagataaggaatactgggcaaaaaatcagttccatatgcccacgggtaatatctatggcaacagaactccggccaagactaacgcaaacgtgccagctttgatgccgtcgaaaccgactgtccgcgggaaggtaaaaccactgctcattttgcaaaaaactgtttccaaagaacatataacgccagcggagcagggcgagtttttggctgcaatcactgcctcgagcgcagcggatgttttcgacatggaacgccttgagattctgggcgattccttcttaaaacttagtgccacgctctacttggccagcaagtattcggattggaatgagggcactcttacagaggtcaaatccaagcttgtgtctaatcgtaacctgttgttctgcctcatcgacgcggacattcccaaaacgctcaacaccattcagtttacgcctagatacacatggcttccacctggcatcagtttgccccacaatgttctagccttgtggcgagaaaatccggaattcgcaaagattattggcccacacaatctccgtgacttggctctcggcgatgaggagtccctggtgaagggcaactgcagcgatatcaactacaaccgcttcgtggagggatgtcgagcaaatgggcagtccttttatgccggtgccgatttttcatccgaggtgaacttctgcgtgggactggtcacgattcccaacaaggtgatagccgatacccttgaggcgctattgggcgtaatcgttaagaactacggattgcagcatgccttcaagatgctagagtacttcaagatttgccgtgcggatattgacaagccgcttactcagttactgaacctcgaactgggcggcaagaaaatgcgggcgaacgtgaatactacagaaattgacggctttctcataaatcactattatttggaaaaaaatcttggctacacgtttaaggatcgacgatatttgttgcaggccctcacccatccctcgtatcccactaatcgcatcactgggtcctatcaggagctggaatttattggcgatgccatactcgactttctaatctctgcctatattttcgagaacaatacgaaaatgaatccgggcgccctcacagatctgcgttccgctttggtcaacaatactacgctggcctgcatttgcgtgcggcatcggttgcacttttttatcctagcggagaacgcaaagctctccgagatcatatccaaattcgtgaatttccaggagagccagggtcaccgggttaccaactatgtgcgcattctgctcgaggaagctgatgttcagccgactccgctggacttggatgacgaattggatatgactgagttaccgcatgcaaataaatgcatttctcaggaagcagagaaaggagtcccaccaaaaggtgagttcaacatgtccacaaacgtggatgtgccaaaggcgttgggggatgttctggaggcccttattgcagccgtatacctggactgccgagatctccaacgtacttgggaggtaattttcaatctcttcgagccggagcttcaggagttcacgcgcaaagtgcccatcaatcatatacgacagctcgttgagcacaagcatgcgaagcccgtgtttagctcgcccatcgtcgaaggggaaactgtaatggttagttgtcaatttacctgcatggaaaagacgatcaaggtgtacggatttgggagcaataaggaccaggccaagctatcggctgccaagcacgcccttcagcagctaagcaaatgcgacgcctaatatgatgattccagcccagtctagtttctgctaaactgcattgaatttgctttctagccaagacgtaatcctttggaagaggacagcaaagggcacctaatgaacttaactgtatatcttagaattaaaaaatacttttccatcgctttaatagacataaatgtctaaaaccaaaaaatcatttttgatcaccataaattgttaagaccttttaaatcaaaacaaaaacagcccatttggaaacacaatctaaagatgctatgccaatttcctcaaatacaaacggtttttaattatttttttatcaattattgccatttaaaatgttttagcttcattgttattaataaaatttaatagcttccccaatacaatatttgttaccttgggtcgaaataaatatttttatacaattgaatttatcaatgggcgtttttatttaccgcgtgcatgcttcaatgggatttacaatcggcgacgtcgtcaacggcgtatcgctacttatttacattaaaaatgccgagtgtattctgttcatcctctagatcagatccatgtgcttatagccatacatcatttgttgctcgagggctctagtgcttcacgaattacaaattatagtaagtaacatttggggttaacccgaaatcataggttttcaaagtggtaattggttatgttaaaaaacaaatcgattagcattatgcttacaattggaatgattaatctagcaagacaaaatacatactaaaaaagtggacacacacaagtacacaatacaactaaggggtaatccgaatgcgcattccggtttgagattaaatggaaataaatcagcacaacttatgcgacttaaacgcgacaggtgcaatccggcttattgatgctgcgctgtcgtgtctgtaagttacggagagcagctccgccgtactgaataccgctgccgatgcgctcgggatccagctctccggtctcaattttggccagtatggtctttgagcacttgagaaaggcctcttcaacattctcccccgtcttggcgctcgtctccaggaagataagctctgcaacgacaaacagacgtagaattacgataggaaatttatggagaatcctaaaaaacagaccgttctcttgggcaaaggtgcttgcttccagaaaggtcacatcacgcgcctcctccaagtcctttttattgcccaccaaaaggatcacaatatttgggctggccagagtgcgagcatcattcagccagtttgtcaaagcattgaaagagtcccgcgaagt

SEQ ID NO: 14036 - DNA, 5387 bp, DROSOPHILA
ttgttctttaatcgtaaattatttgacttcaaattgtaatatcaaaatatcccgaagactctgtaaccaagagcgaagatatggaagatgtggaaatcaagcctcgcggctatcaacttcgcctggttgaccacctaacgaagagcaatggcattgtctacctgcccacaggatctgggaaaacgttcgtggccatcctggtcctaaagcgcttctcgcaggactttgacaaacccatcgaaagcggcggaaagcgtgcgttgttcatgtgcaatactgtggaattggcccgacaacaggcgatggccgtcaggcggtgcaccaactttaaggttggcttttatgtgggtgaacagggagtggatgactggacgcgcggaatgtggagttcttgttggcacagcccaggtctttttggacatggtcacccagacgtacgtggctttaagctccctgagcgttgtcatcatagacgagtgccaccacggcactggtcaccacccatttcgtgagttcatgcgattgttcactatcgctaatcaaacaaaattgccgcgcgtggtgggtctcaccggggtgttaatcaagggaaatgaaattacgaacgtggccacgaaacttaaagagctagagatcacatatcggggaaacatcattaccgtgtccgacaccaaggagatggaaaacgtgatgctgtacgccaccaagcccacagaggtcatggtgtcctttccacatcaagagcaagtgctcacggttacaaggttaataagcgcagaaattgaaaagttctatgtatccttagacctcatgaatattggcgttcaaccgatccgaaggtcaaagtcattgcaatgcctgcgggatccgtcgaagaagagctttgtaaagcaactgttcaacgattttctgtaccagatgaaagagtatggcatctacgcagcttccatagccataatctcgttaattgttgagttcgatataaagaggcgccaggccgagacgctaagcgtgaaattgatgcataggacggccttgaccttgtgcgagaaaatccgtcacttgctggtgcaaaaactgcaagacatgacttatgacgacgacgatgacaacgtaaacactgaggaagtcattatgaacttctccaccccgaaagtgcagcgattcctgatgagtcttaaggtatccttcgctgataaagatcccaaagatatctgctgtctggtctttgttgaacgccgctacacctgcaagtgcatctatggcttgctgctcaactacatccagtctacgcctgagctgcgaaacgtgctcacgccccaattcatggtgggccgcaacaatatttctccagactttgagagcgtcttggagagaaaatggcaaaaatctgccattcagcagtttcgggacggtaatgccaatcttatgatatgttcaagcgtcctagaagaaggcatcgatgtgcaggcctgcaatcatgtctttattcttgatcctgttaaaacctttaacatgtacgtgcagtcaaagggtcgggctcgtaccactgaggccaaattcgtgctgttcacagctgataaggaaagggaaaagacaattcagcaaatttatcagtatcgaaaagcgcataatgacattgccgaatatttaaaggatcgagttctagaaaaaactgagccagaattgtacgaaatcaaagggcacttccaggacgatattgacccttttaccaatgagaacggtgccgtgttgcttcccaacaatgccctggccatactgcatcgctattgccagacaattcccacggatgcttttggctttgtgatcccctggttccatgtattgcaagaagacgaacgtgatagaatatttggtgtttctgccaagggcaagcacagcgatcccatggacaatgttaaaacagccaaaatatcagctgccttcaaagcgtgtaaagtactctacagtttgggagagttaaacgagagattcgtgcccaaaacattaaaggagcgcgtagcctctattgctgatgttcattttgagcactggaataagtatggcgatagtgtgactgcgacagtcaacaaggccgataagagcaaggacagaacctacaagaccgaatgtccattagagttttacgacgcacttccgcgggtaggtgaaatctgttatgcctacgaaatatttttggagccgcagtttgaatcgtgtgagtacacggaacacatgtatttaaatctccaaacaccaagaaattatgctatattgctgcggaacaagctgccacgccttgcagagatgcccctgtttagcaatcagggtaagctacacgttcgagtggccaatgcaccacttgaagtaattatccagaactccgaacagctggagctgctccatcagtttcacggaatggtattccgcgatatcttgaagatttggcatccgttctttgtgctggatcgtcgcagcaaggagaactcctacctggtagttcctctcatactgggtgcgggtgaacagaaatgctttgactgggaactgatgaccaacttccgaagactaccgcaaagtcatgggtcaaatgtacagcaacgcgagcaacaacctgctccacgtcctgaagattttgagggcaaaattgttacacaatggtatgccaactatgataagcccatgctggtcacaaaggtgcaccgtgagctaacaccgttaagttatatggaaaagaaccaacaggacaagacctactacgagtttaccatgtcaaagtacggcaaccgcattggtgatgttgttcacaaggataagtttatgatcgaggtcagagaccttacggaacagctcactttctacgttcataatcgtggaaagttcaacgcgaagagcaaggctaagatgaaagttattttgattccggagctatgcttcaattttaactttcctggggatttatggcttaagttgatcttcctacccagcattttaaaccgcatgtacttccttctccacgcagaggccttacaaattgattattcgctaaagcggaatgtcgaccccttgggcaatgtcataccaactgaggatatcgaggagccgaaatcccttttagagccaatgcccacaaagtccattgaggcgtccgtggccaatcttgaaataacagaattcgaaaatccctggcaaaagtatatggagccggttgatctgtcgcgaaatcttttgagtacgtatcccgtagagctggactactactatcattttagcgttggtaatgtatgtgagatgaatgagatggattttgaagataaggaatactgggcaaaaaatcagttccatatgcccacgggtaatatctatggcaacagaactccggccaagactaacgcaaacgtgccagctttgatgccgtcgaaaccgactgtccgcgggaaggtaaaaccactgctcattttgcaaaaaactgtttccaaagaacatataacgccagcggagcagggcgagtttttggctgcaatcactgcctcgagcgcagcggatgttttcgacatggaacgccttgagattctgggcgattccttcttaaaacttagtgccacgctctacttggccagcaagtattcggattggaatgagggcactcttacagaggtcaaatccaagcttgtgtctaatcgtaacctgttgttctgcctcatcgacgcggacattcccaaaacgctcaacaccattcagtttacgcctagatacacatggcttccacctggcatcagtttgccccacaatgttctagccttgtggcgagaaaatccggaattcgcaaagattattggcccacacaatctccgtgacttggctctcggcgatgaggagtccctggtgaagggcaactgcagcgatatcaactacaaccgcttcgtggagggatgtcgagcaaatgggcagtccttttatgccggtgccgatttttcatccgaggtgaacttctgcgtgggactggtcacgattcccaacaaggtgatagccgatacccttgaggcgctattgggcgtaatcgttaagaactacggattgcagcatgccttcaagatgctagagtacttcaagatttgccgtgcggatattgacaagccgcttactcagttactgaacctcgaactgggcggcaagaaaatgcgggcgaacgtgaatactacagaaattgacggctttctcataaatcactattatttggaaaaaaatcttggctacacgtttaaggatcgacgatatttgttgcaggccctcacccatccctcgtatcccactaatcgcatcactgggtcctatcaggagctggaatttattggcgatgccatactcgactttctaatctctgcctatattttcgagaacaatacgaaaatgaatccgggcgccctcacagatctgcgttccgctttggtcaacaatactacgctggcctgcatttgcgtgcggcatcggttgcacttttttatcctagcggagaacgcaaagctctccgagatcatatccaaattcgtgaatttccaggagagccagggtcaccgggttaccaactatgtgcgcattctgctcgaggaagctgatgttcagccgactccgctggacttggatgacgaattggatatgactgagttaccgcatgcaaataaatgcatttctcaggaagcagagaaaggagtcccaccaaaaggtgagttcaacatgtccacaaacgtggatgtgccaaaggcgttgggggatgttctggaggcccttattgcagccgtatacctggactgccgagatctccaacgtacttgggaggtaattttcaatctcttcgagccggagcttcaggagttcacgcgcaaagtgcccatcaatcatatacgacagctcgttgagcacaagcatgcgaagcccgtgtttagctcgcccatcgtcgaaggggaaactgtaatggttagttgtcaatttacctgcatggaaaagacgatcaaggtgtacggatttgggagcaataaggaccaggccaagctatcggctgccaagcacgcccttcagcagctaagcaaatgcgacgcctaatatgatgattccagcccagtctagtttctgctaaactgcattgaatttgctttctagccaagacgtaatcctttggaagaggacagcaaagggcacctaatgaacttaactgtatatcttagaattaaaaaatacttttccatcgctttaatagacataaatgtctaaaaccaaaaaatcatttttgatcaccataaattgttaagaccttttaaatcaaaacaaaaacagcccatttggaaacacaatctaaagatgctatgccaatttcctcaaatacaaacggt

SEQ ID NO: 14037 - protein, 143 aa, DROSOPHILA
MEDVEIKPRGYQLRLVDHLTKSNGIVYLPTGSGKTFVAILVLKRFSQDFDKPIESGGKRALFMCNTVELARQQAMAVRRCTNFKVGFYVGEQGVDDWTRGMWSSCWHSPGLFGHGHPDVRGFKLPERCHHRRVPPRHWSPPIS

SEQ ID NO: 14038 - DNA, 2748 bp, DROSOPHILA
tgtataaaaaatacaaattgaagacttatgtttgaaatttagctggcgttactttaaaatccaattcacttctacaaatttggttgcatgtaatagataaagaatgccccatcacgtggcactggaagctttctcaggaactcgccaccatcgtatgaatcgctaaataattgggttagattggcgttgggttccatctgcttggaaatgggcattccgtggcacgtactatcgcgcgttaagaactagaaaaaagaatacaaaataattagatttcagtgaaaagaaaaaattgtctaaatatgactatagcttaatatttcaagaacgacttgctttaaacgcaccatcatctcccttatggttgtcaaattttgtggtggcggaggatgattgaatggctccttattgaatatgttatcgccacagcacttgagcagatgggatgttattatgttcctagatctggcctcgtctgcattttgtggtggttggcgcagcttgtccatccacatggtggccatcgttttggagcgaaagtccagctggcaaatgctttgctccaacttctgaatatcctgctcgaattcctcgtcgaatttggtgatttctggatttacccttttggaggaagtggatggctccttcctcagatgttcacgctgcaattccttttcacgctgacgttccttctccagttccttgcgccactcctgctgatgctgctttttctctcgttccttttccctcgcgagttcctttcgccgctccagttcccgcttgcgttccatttcctcctccctcctgcgctccttgcgatcctccttgcgctcgggactcggattcttttcgggcttctgcgattcggaatcctccacgacgaaggtcttctgtctgtttctgcgagcggtgcgaatcaacatcccaaaagttgattagaaaactaactaaataattttcaatttaccctttcatgtctcgtttgtaaatatttttgaatatgttcctaaatcccgtactgttttgcttgctcattttgacggatgtttcgaaatgatgccagataatatttcattgctaggcatattgcatacctaaaatcatgttcaaagtgataaacttattaagttgtattgtatatttctatttttcagatgaaaacccccgccatacagaatgattttagctactacagacgcatcgtcagccgacagcgtgtggattccacggagaatatgctggtcagcacggaactggccaaccggatgtccctgttctacgcccacgccacgcccatgctcaaggtgctgagcgaggcgacctcaaagtttgtcaatgacaatgccgatgatgtccagaacacgacggaaacgctgggcaccatggccaaggtgtgcctgaggatgctggaaaatccgtgagtttaaatgaatcactatcaatgataataagtattctaatcgatggacaatattgcttttagaaaactcctgcaacagatcgagcgtgaggacacgaaaatgctggtgctgcgcgtaatggtcggcctggtgatcctctacgaccatgtgcatccggagggagccttcgtgcgtggcgcccatgtggatgtgaaggggtgcgtccgactgctgcaggcgcaaccggccatcaaggcggagccgctgctgaatgccctgcgatacacgacgaagcatttgaatggggagaacacgccgaagaatatacagcgtttgttggccgcataatattggaggggatcggtgggcgcggccggtgtgggcggagagttcattaacgttaatttctatgtgtatgcgtatcgatttaaatggttttttacctttatttatgtaattagtaggcttctgtattatttgtaaaaaattgtgagcgagtgttgtgctagcaggaggcaacctctagttttatttttaccctgtgtgcatttccagcatttgtttcgtactgttttagactccagcctccgcgtaacgtagcaaagaagtcggacaaaaagtgggacgcatatatcagcagcaacaatatttagttgttaatctagccctaattttaagtaatgcaaggaacccaattaacctaaaaacaaattagcgcaaagtttaaactgatgtttgggtatacgagatgtatgagataaatcctaaattccactaatgcagagattataaatataaaacaaaaaaaaaaaaacatttttaaatcaaatctaaagtatttttttgtacatgacaatgtgtttagaacgtggtgtaaagatctaaagaatgcataaactaattgattactataacaaacgaattgtacgacctaaaatgcctacacacaactgaaccacaagctaaaaagcggatgcatttatatattttcacgccgtcaactttgataaacgtatttaaacaaatctacaacagaataaacttgagctgcgcaataataataatttttaagatttacaaatagaaataaaggattaataaaatggcaaaacttaacgcatacaatttgtaccaaaaaaaaaaatgaaagaataatgaaaattcacacaaactaaataaagatttatatatgcgataaaagcaagaagaatgagaagaaaaaactatagagaatgctgaatcaaaataaatatcacgcaaaatcaaccacattaatgtttgtttttggtgcatgtttttaaatcttgtaacgttctaaaatttattgaattttagttcaatttcttct

SEQ ID NO: 14039 - DNA, 543 bp, DROSOPHILA
atgttcctaaatcccatgaaaacccccgccatacagaatgattttagctactacagacgcatcgtcagccgacagcgtgtggattccacggagaatatgctggtcagcacggaactggccaaccggatgtccctgttctacgcccacgccacgcccatgctcaaggtgctgagcgaggcgacctcaaagtttgtcaatgacaatgccgatgatgtccagaacacgacggaaacgctgggcaccatggccaaggtgtgcctgaggatgctggaaaatccaaaactcctgcaacagatcgagcgtgaggacacgaaaatgctggtgctgcgcgtaatggtcggcctggtgatcctctacgaccatgtgcatccggagggagccttcgtgcgtggcgcccatgtggatgtgaaggggtgcgtccgactgctgcaggcgcaaccggccatcaaggcggagccgctgctgaatgccctgcgatacacgacgaagcatttgaatggggagaacacgccgaagaatatacagcgtttgttggccgcataa

SEQ ID NO: 14040 - protein, 175 aa, DROSOPHILA
MKTPAIQNDFSYYRRIVSRQRVDSTENMLVSTELANRMSLFYAHATPMLKVLSEATSKFVNDNADDVQNTTETLGTMAKVCLRMLENPKLLQQIEREDTKMLVLRVMVGLVILYDHVHPEGAFVRGAHVDVKGCVRLLQAQPAIKAEPLLNALRYTTKHLNGENTPKNIQRLLAA

SEQ ID NO: 14041 - DNA, 15233 bp, DROSOPHILA
tctggccaccgatttcactgggagttcgctgtgcaacaagcaatttaacgcattagcgcgactttctcctttctctgccaactgccaaatcgtggcaataaaaatgtagctctttgtttgctggtgtctggttttcgggtttgattttgaattcggtttgggttttgggcttgagtttcgtctctatatatcgaatgtcctgcgatgaaactgtttgtgattcaattagatagttgaatctttcccaagagggttttgatggggttaggttctgttactggttagaatttcaattacactctctaatcgcttaccattatgctagtatgtgttccccctttaagctcggcttcagtttgcttctgggtgaataaaagcgaaatcctttaaaattgaactactgaaaagaaggtgaatgggatgacgcgggaaaaagactgaagatgatatgatttgagaatatttgaaaggattcgctttttgtgaatttgcattgaaggaaccttcgtccatcgccacccagtttttggccatatttgagtaataactacacccacattagtatgaattcgtgcatggccaactgtgttgaatggaattggactctctcagctttgcataaataatgcgactggcagcataacgtaatgcaaattcccttttgcgattggtctaatgatattagcagcacagttttgcagccaaattagtatttattcaagcaaattaatctcagctctgtgctcatggccaatttccatctaaaatatttacctaacccttgagatgaatggcaagccctgaggtcatctttatacgagctgttaacaattgaggacagccctgtgtactgaccatgcctcaattgtctctaattgacaaacgataactaaatatggtcttgactagcaactttataacaatttaatatatgtatgtcaacagctgaccacaatttgttcttcaattaattgggtgcgattaaaacaacttaaagtgagaaatttcatgactcgtataattcttttactcaaatagcacaacatatacgcagatacatttgcatcagttatacacagaatgtatttacaaacttggcttagcctagatgtttacaacagttaaaacttacagctcttcgatggttaaagtgtcgatagattcttctatacaaatacatacaaattcaatttattggtaagtttttccttcttgctgaagtattttcttttgacaaccggaaattcgacttcgacttcacattcgggtggctcgatttacagaagtgcaaaagaactttaagtgaaatatgaaatgtatatagcggacagataaagttcgaaggggggaataataataattcattggaaacgaaactactttgcataactaagcacagaggctaacgatttaatagttaatattaagtacttaaagttcccactttaaatcgacccaccctgcaatgcaaacatgtttcatctctttgtgaatgtgagtatatgtacagagtagagcaagcagtggcaaattgcatttcccccgcagcgaaacgaggcgaaggccaggaggattcacaatctgttccagtggcaggacagatcgggataacatcacatctgcttgggactgagctccacgggattattgtcctcgtcacaggagatgtatttgattttcacgcgctgccgctcaccgatgctgttgttgatcgaaaggcacagcggcgaactggatccatccgccggccgttccataatacactcgacggctgcccgattggttccacttccgggtggctgctgctgctgtgcactccgctgctcccggcaagagctggtgaccggcgcctgctggatctgcgtctccatcgtgctgcgcttccactgactcttggtctccgctgcggaaggttgcgtgggatgtggtgagtggtgggacaagagcaactgggtctgaggcttaggctgagtcagagtctgggccaggacggccaaaagagtttgggtggtcgggggggaggagttggggagcgagtgggcgacggtgtacccacctcttgtgtgccggttcgagctgttcttgttcgtcaaccggctcttcggcgagtcgaatcgatggcgggtgaggcccacgcaacagcagcagatgatccgctggaagtacatccggaacctaaaaatataaatataagttaggaaaatatattaacacctttagttacattttatgcttctagcacttgcgaaggttttttacaacaaatttctttagtgccggccagaaatcttatatttcacttgtatagtcatatctctttctctaatttgatttgcttattcattgccaattacctcttattcatccagtagtaaatgagcggattgaccatagcattggacatggccagccagtagaaaccgagatacatatgttgcacgtacttcgtggatgccacctggttgttgtggtaggcgtagatgaagaacaggtgatacggcagccagcaaatggcaaagatggacacgatggcaataaacatgcgcaccaccttccgcttcgacttcatcgactccatctggcgatccgtgttctcgccgattgatctactgccccacaggacacgacccatgagagagtagcatatgagcatcacaatcatgggaatgccgtaggtcagtaccaggatgatcaggttgtatctgcaatttaatattattagattttgatcagcttatccgttcagtattatagttaatggatcatcaagtttgattataagcataatgattaatttatggttataaatattcagaattcacttagcataatgttaaacttacgcataatccgccatagaagtgggatatcgtccatctggccacatcatgaagcagactgtcctcgattttccattgtaatagctgcaaaaggcccatttcaataggttaacatggccccaataaagtagtcatttaaatatgcaaatttcgaaacctgataaatcaaaatttaataatttaattactccccagatttccctcgaacataaaaagctgtcaggtttcacacttcgccagttttaagcaccgagaaaatggcagaagggaattctgcctgttacaagcatgacaaatttcacttttggcccgtcatcaaattgaaaacttaatttgccaaattatgaggtcttttatggcgcagtattgtcgagcacttaaaagggacgttgtctcgagtccacacaaaaatcccctgtacctgtctgtttacctgtacttttccgaccattaataacacggctatggcaactggttgtggcagacaggtcataatttgaccaacaattatggccaaagtgcccgagagcgttggttgacaatcagattcaaatggaaaattgtggtatattatttcgggaattgatttaagctctgagtgatttgatttgtcacgcccgaatattaactctattaagattgttgtgaagatctagataattgtattattattaatattactttctcttccaattactacgttggctctcaggaatttcaacttgcttatacatttattaacaaaattaatccatttactttctgacatttatttccagactaattcctgggctcgactggtttacgttacatcactcatatgcctggaagccttttaactgtctatatccccgggggtttcttcgaaaacgttcatccaatttggcgttttttcactctccctaaaatcggcacacatatccatacagccgtatatccttcattttcactcccctttatatgctcctgtcggaatttgccatcgttcgactctcttgagcttcaccttggctatactttatcacattttgatatatgaacttgccatctttattatacctaaagtctgttaccccgggagaccttttattccgccagttgagagcctaaaataaaaaatgcttcaattctattaaacgggacacccagacgctccagttcggcagaaattcaccgaccgaatgttgcgaatttgcgtaaaattcaaatgaagccgtcggagctgaggcgacatggtgatttagatggatgcgaatgcttatatcaacatcgaaaatggccgacccaaaatagggagaaatgaaaaaaatatggaagtaattctggaaggtgcgcggaaattcgtttaatatttgcttggcctctcaaatcgatacctggagctgcgggagatgctccactaccactccacagggagcctggccaactcgtaagccaaggcttacaaacttgtttatgcattgcgttttgtgtttcacgcggaggttaaacagaaacaaaggggaggcagtgtttttgaaacgaactttcagtaccctagaaccatcattgaatagtaggtttgaattgattcaataagttatataaacaaaattgcagaatttaatgcgttttttcgcccttgccctctctttgatgctgactgctcgttaaaaaaggaatctagtaaattctaagaagattctagctgtgcaacctgctagtcagagcactaataccctatattgagagaaaccctcgattcgggtccaatcggccacttactgcttggtcatgatgctggagtagagcagacatggcgccgacagcacacagctgagtgcccagatcaggaccaggatgatgcgcaccttccgacgcgacgtgcggcgtttcagcggatgcacaatggcgatgtatctacaggatggcagaaagcggatgtgccgacgcaccgattagaagtcgatggaggagaattgagggtaggagttggggaaatcggaactcacctatcgaaacttatggccacgagcgtgaagaccgacgtagagaccgtgacgttggccacgaaattgttgattgtgcaataaatcgaaccgaatggccaatctgagttcagcatgaatataaagttgaagacgcagttcagcgacgacatcagcaggtcggcgatgctcaagttcagcaggaagtaatttgtgaccgtcctcatgctgcgatgtcctgcagagacatttggcgaaagaaaagcaggggattagaggaaaaaaaaactcggggaaacgagaaaatgggagatggcaaggcagacacgtgatggccaagacaaagaatgctagaaattagaggtaaggctatcgccaatgcagcgtatacgtgcttttgcaaagtgctttaaatcacctttcttttttgcaagcttacctgtaacgatccagagaacaataccattgccagcaatggccacaaacatcatcagaccgaaaattatagcccaaatcgttttctgctcccatggcaactcgtacggtcttgtcggcgatggaaacaggcactcggtcagaaagtctctgtggaaaatacaaaaatatcatcaatgttgtattgcaaaatttcggaaaatatcaagccagaggcagctattgttatttggtttagtgggaagcaattatgatggtgtacacatattttctaagaaataaagtttttatttttcggacattctgttcacagaatttctagtatacgggacctagctcaaaatctccattcaaatttaataagtctcacggatttgtaaattattccttaacttaatggcatattttgcagagagtatgcctttgaagcaaatccgtcttaaatttagcttttcgccacccttcgggcaaacaatatttggaaattcaatcacagactgcctgaaactttgtgatttggcaaaactcttcagaactgcgtgctcgtcttcgccttaacaataacaataagaaatcaatgaagcaaaagcttggcgaaaaattcttaagggaaacttgccacaaaggaatcttccttatcgatattgaaacagcagtagaactatgtagcagaaaatatgctgtaatttccttggaccgacaaccgtcgttggaggaagatccatggggtctgaatccatggaaatggaacaggggatccgattatcatatcaggcattatgctaatcatggcagcaggacttgggatgcgaagaacatgtcgctaattatttcgagggctgtctttgtcattggttcgttggttgtggagcttccttttgattcgaccgtagttgaatgaatggtaaatcccattaattaggggaaccttgttcgattatagccatgaccattcatatccacagaccatgttctctttacttccgtagccagtcggtggcttttgtttgcgcgtcacagggcgtatgagcaatatcaatgagccgtgcctcgcccttttttccattcctatttttaccaccctgctcaaaatgcagcagacacaattccaacgaaaattcaataagcgaattgttcacattcatccattttcactcctattgccagttgtctctcggacatcaaatttgcccactttatctaaccatgattgatgccctgattgattgttattgttcgacccacaaaatacttttgactaacccacattagatttaaataattggggtttcgtggtcccaattaaatgcccgcaagacggctggaattgaattgtgaaatatttagctctaaaactttcaaattaccaaaaattgttgcattgttttttatagttctttacattttagttgcgaatgttgtcaaaatctccgctcagttagctgcagtttaccatgtagaagtatttgttcaatcaatccaatcaataagaatgatattctggtcaaaaagccgttgaattgtgaagtggcgaaaccaaattgagggaaatattgtgtgtttgcagctttgtattccgaaaagataaatttttgccaattgattcacttacacacgttatttgtacttaaagtctggattcacttgctaaacatattatcaattaattacgtatttaattccgcacacatcctttacaaactaaactaaatttgatttcattccgacttatgttatgagctcttcacataattatcgagcgttcatattacaagtttggttggccattaatctgcttacagatggctaactgagtttttgttatttcggactgggctgtgatacacgcatcgcattacattcgaagtatttacttgctattcgactatcgatttcacatttaattagatattttgcgatgtacagaagcaaacaagaactcaattaattacatacacacaaagcccatgtaacaatggcccataatcaacattaaatggacatgatctacaataattcccgaaaatataaaactacgttattgacattttggctaaatttgtttacatgagctgccattaccaaatttgagatataattagtatgactatttactaattcaaatgtgctataattagcatttcatttcattaaagagaaattatgcacgcattataatggaggcactgagcatgtgaaattcaaacagaattcgccaataatttcaattttcatttgcattatgtttaaattccgttaaatatgacaaacaaaagcgcccacctttcaatttaaacaattttcgctgcatactttttggaacttccctacttttgcttgtttcttccaattatgataattgctgttgtctgagagactttttacttattacaaatacgggcgaaaagttcccagcagatttatggcctcctgccattgcagctggcttttaaagcaccaggataacgaaggacaaaggagtcagtttccaccccgcctcggatggtgtacattttcagcctaatttaagcaaatttaacttgattaacgtaatttgtgtttttttcctttttgcctggcttcccttacggccgccaaattagatttaatgctattgtaaatccgtgctaaacttcagtttgttcctgttattaaaataatcattattcatggacggaagtgtttggccatcagaagtgaactaattacatccgttggtaagttttttactttgtacttccgtgcacacttataatttttgttactgtttactagaaattcgcctaatgacagcacaattttccccgtcgattttggcagtataagtgctggaagttttattttggccctgagtatgcaaattttcgttggaacaaattccgcaaattccttaaaaattgtgccgaacatttggcaggcaagggaaatcgattttttttttattatttgattgcttccgcaaaagtcccaaaagtgtcagctgctttgattcgttaaagagaaagaatttcgagtgtcttttttacgaatcgcccagaatcaatacgtgtgccaaacttatttttttttagcattttcaatctgatggaatttgcagttgtttactctgtctctatgtgagtgcattcatccatttttaccatcacacagacttccgctcaactgaattggtctcatgtttaaatgatgacctttgctgggtgataaattgtggtaattatttcaaatcaatgagctatttttgtattcaatggagaagaaatttcaaatataattcatcagcaagttatcataacttttaaagaataattattactcttcactaataatcgtattattgaaatctagttgttttataggttcctgctaaatcacagtgttatgaattgagtttttccgagttaattagacacattaaagaaattatcatcgattatagtttaccctttcgtaatttcctgttcatgggggggggcaccaataaattgcccgtcattatgtggcactcaagaaggtgagttacccacattaactcggctaatagtcgtcgacccccttttagagcctccttgggggtctcagcccccatataacctccgtttgacgtcctggcaatttgcgcactatgtatttccttggagccgtttcagctaacaggtttcgcattcgcatttcgctttttaatatatttcactgaatattttatgcatgacgaaccgggcaatgcaacccaaattggcggtcatgcggctactttatttccctagctatatattttgtgcctggttctctggttgccttttctccggttccccggttctctggttcctttgagtgtctttttcagttactgcactgttgtgatggcggaaaactgggtagatcaaggtcccaagttctcgacaaggacctcattgggcatgccgcacgcaggttgcaagttggcccaccgtgtgtttatacttttgggtgataacttctgctgccaacggcagttgccaaagtgggaaaagtctgttaagttacggaactgcaagtgtcacgtagtttaaaggctttccgcataaagttggtgaaatactaattagccggcgcgacgaagcgactttgaggggggcttataagtgctcggtaattggttttcttcgaagtaaatactttgaaattcatatttcgaaaatgtttcaacgcaaggcaagaaaatagcacgtatctcactaaatataaaacgtttgcctcagtgtcatccttgatcatgtgtgttgtgtcggagacagtagataagttggatctaatgctcatcgatgcctgacaaatggagactgtcacaggcacctatccaatccgcccccaaagtaatcatcgttgaacgaacaaaaacaatgcgagcttaaagtggggccagcagtcacttgaattttcgacacgcttcgcaaatgaggccattttcaatttcagaatttatgaacggaggtgtgcttcacatgtccctcaatttcccgccagcccttcgaacgagagccccagtttctgccaccacactctgtgtacggcacaaatgcacttgacggagcaatcgagagtgttgatgacaatggtggcaggacaatgcgtaaatgaaactgttcatgttgtttgccatcgagtggccattaaattttcatgcccctgtccgaatatctgtttcatcggcctcgcttgccatattaatgttgccatctcctctcacccactgacggataatccgcatccgcactgggaacttgttttatgtttggcgagaaaaaagtaattgaaaaatttgtcatatgcaaattactcagcttgtacagattgtacccttctcgtccagtcccctcgaaatggccaacattattttttcgaaatccattcctaggccccgtagccatttctactgagctgcggcttagccatcgatgaatagacataaaaaaagtgttcccggctgcgagacaaggaatcatccttgctggctccctattcctccgttccggacctaatccaaaccatttctttcgaatttcctacgaaatgtcacagttcgtggcgtctcgaaggggttcctcagctaaacaagttggctacatgagccacttttgtctcggccagataaatgacacagtttagagggattttgtaactggcttggtttttatcccagtagaataatagtaagcaaagagaaaaagttgcaaaaaccttagacaaatcatacattacaatatttcttttactgtgtatgattccttaccctgtattaagtactctactatttatatagctttattactgaaaaatctataaaattacggaaaagttaaaaacatttccccgctatttgatctctttttttatgcaccatctgctctaattttggaaaagcattcgaaattcgatgctcgccaatatcgatgaacacttcttgtttttatgtagcccattcattctgattggatttgagtctggccataaaaatgccagggccccgatggacaccaacagcagctacagccgtcaggatgtggactaatgtcatgtgtcctttgttgtgctgtgctgttatcgttgggcaagtatcaaaatcaataagcgaacgaaacgccataaacatcaaattcgaaaggatgcgatctctttaaatcgactcaagcaagccattccatcggtttgtaatatactatggcattgtgtatacgcagcgtgggccgccaacgcgcactgaagtgtgtggacaatgtgggcaaatcccatacgcgtgtatgacgaaggcgaagctgtcaagttccttccatcaataatccatgggaaatgtccgaaacatttgctctgattgaagcaaacataatgagcttaacccgagacaagcggcaggcaattcacctgctcaaatgcccgcacataaacaaaggatatgcacagtaaaaaatttggttgtaccacacaataagtggacaacatattcttgatagcagtgatcgccaaaaggaattaatattcgttgctaaaatattttactttgaatttttcaatttgcacgccttgcaaccagctacccctttttctagctgtgcatatttccactttcacttactttctctttcacaaagagcattaaacctcgaggcttagggaccaaatatagaacatcgaacaacaattcgaaggacgttttgtttgtgtcaaagtttttctaggctttagtttgggtggccagcagagagctttgcatttgtcggaatttaattattttttctctattttccccttttctagtagtttgtcacctaaaacaggatgttggggtggaaagcaattagtaaacttgtgtgtgaatgagtcctttcagcttattgtggcactgggctattctagactaaaaggaagcaattacaatgaagtttgcaggggggggggggttaaattactttaaattgcaaattatgggtaggaaaccgcgaccacttcatgcttaaatataaaatatttctgctagactgcattttcccaggtataacattaagtttaaggcagcctctgagtaactttgttctctaaaacataaccggttattaaaatcattactctcgaagccacacctactatgttatatatgtattagttgtattagttatttcgcagaaatcgttttaattaaagcttaaagcgcccgtttaaagtgcaatgtgagaggaggaattctaaggcaaaacgatacatattttcctgtaatttaaataataagcaataacatattctttatcaaacatgtcatatataatatatcttatatattttatatttatatatattttatatataaaccagtttgtacggactgttgtgggccaataaagcgaaataaaagcataaataacttaatctcctcttgaattttccgctacaaaacaattaaaggatatccagcaaaaacaaaagcccctgtaatgaggctgaaaaacagtttaagcgcctaattaaccagttccaaaagagaccgaaatccatcactggtataattaaggcaaagtcgagggaatatttatccgccggttggaactttcaacgattgcccttgttttttttattttgttatggcgcaaacttttgagttattacgcaatagtcgcaattgcggcaagtcattaatttaactttgcggttagctttcgatacaaatgaaagcgctggtatttatagtacactcggtttccttggtaaacttaaaataattgctctgattaaaacataccaacgcattaaatttgtctttgccaactccttcagaggctaatcatcaattcaattaccacggatcccaatttctcgttcatttgaactgagtatatgctgaaggtatttatccaaagtgtgatatttcaacaatgtaagtgtttgtctaactaatcctattatcataattttattgaaattgcgcttatttgtggaatctgtttttaattaaactgtcataccctaatcaccacatcgctttaaaaactatatgcaaaattaaaaaaacaaaaacactcagaataaattgttattatttgaagcattcatttgttctcgctttttaataaaggatatgcaatttacaggatacaatttaattacacaatgaaacccttttttaaattgcattaatttacgaaacatgcagcgcatgtaaattatagttgaaagacaactaaagaacattgagtgtgaataccacgatttgttttcggtatttaagaaatccgcgtacgtaaaacatttatgatttaagcgtgaccaagagctgtggatctactttcaaaagcaatcagattaggcctaaacaaatgtacacaattttcttactgctaccaaagggctttcaagattttagactaagaatgtttgctcttgcaaaacaacactcaaaaaaatgctgatcaacaattaaagtttgcaggaaaatccaatagctgcgtatcctaatttgtataagtaactctactttttagtccaagtgcatcgacttaaccggacgaacgccaaatgtgcttatcagctgccagacccacgaaactttattcaatttaagccttcatcagggaaaactggccgcttccgcgaatcgctgataactctaccgtttaatttgcataactttgtgcgggggctgctagaagatctcggtggaaataaataaaggacgcacgcgagcgtggagtcgaagtacctggaaggctaaataaaaggacgcagtacttcctgcccactcacttggcctcattgatgctctcgagattatcccgattgtcgataatgctcgacaagaggctgaccacctcggttctgttgagactgcccaggagcgtggtgttcacaatgctattcagctcgaatcgacggacggcgaggatggtgcagttgaccagcagctcggtgtcgacaatctccgacattttgcagtctgtaatcaggatagagggtggtttccgtaatgatcccgctgcacttatgccacatttaataacgcggtgccatagaaaccattgagctcgacggatttcttccggaaggtgactcttaatttcttcgtaaatgctgtgctttcagttgatcctcttttgtggcgcgttttccaaggagctttcctttttatgttctttgaactgtcagccacatgcacacacacttttaattttggcctgtggtcaaggacgagttgcgtttaacactgcatgtggccctttggtcacaaaactgtcaaccttgcaatcgttaaatataagtttaagtgtcgaagtaaattatctgaggtttaaacgcacatggattttatatagttaaatatttaaacttgcttcgaaaatcaaataggaataatttgattccataaatgggttgcatttaagtatattgtttcacttcaatacttcgtttaattgtatccaattattattcacacttatccagaagattacgaactaataaaaccttaatctgcattttgtttttatatgaagccccttttttttagaaaacatttctatttatactccgttagaacaaaaaatatgcttttaatcacatgttacaaaagttatcgcacaatttgatgctataaatagcgtttaaattgaatttcttaaatcacaacactgcacatattttgcaacccacttgtatttacattacaaactttttgcacaccttgtaaccactttttttggccactatttttcattgcgcttttcgctggctttaagccagcacaacactcatacagtggcaacaagcccacacgcacacactacgaaaacaccgttagttggcaacaatcttattttcttaaaatgcctcccgagtttccgttcgctgtgctacgcgtgtccttagcgctgcaagtgccgccgccgactgaatgctttgcatgaaaataccaattctgcagtgttcctctgctggaaacatacctgttgagagaatctagcaacattacttcgctggcaacatgttgcaggatatgtttttatagcaagtaataaataggttcaatgaatgttttgtacaataaaaattggtaatttcgttttaaaaagtaaatttaataattttcaagttattaactattcgtctagtaaaataaactctcccttataatggcaactttacgagaacgcttaaaactcttgtaagcaaatatgatgttttctaaggcttcctaaactttcttgagtgctggccaaaagtaaattatcgaaggtttaccaagttgttattttcattgtagaaactccaaaatccgcttaaaaccccttgttcagcacacctgataccccaactacataaacttggtgagagggtgtaagtgtggtttcacttcgtggtgctgtgatgaatgacctgtaaatgatggcagaggacgcggttcacaccccacttacacattaccctactgcggaacacccacacacttgcccgaacaatgaacaattca

SEQ ID NO: 14042 - DNA, 2666 bp, DROSOPHILA
aaggttttattagttcgtaatcttctggataagtgtgaataataattggatacaattaaacgaagtattgaagtgaaacaatatacttaaatgcaacccatttatggaatcaaattattcctatttgattttcgaagcaagtttaaatatttaactatataaaatccatgtgcgtttaaacctcagataatttacttcgacacttaaacttatatttaacgattgcaaggttgacagttttgtgaccaaagggccacatgcagtgttaaacgcaactcgtccttgaccacaggccaaaattaaaagtgtgtgtgcatgtggctgacagttcaaagaacataaaaaggaaagctccttggaaaacgcgccacaaaagaggatcaactgaaagcacagcatttacgaagaaattaagagtcaccttccggaagaaatccgtcgagctcaatggtttctatggcaccgcgttattaaatgtggcataagtgcagcgggatcattacggaaaccaccctctatcctgattacagactgcaaaatgtcggagattgtcgacaccgagctgctggtcaactgcaccatcctcgccgtccgtcgattcgagctgaatagcattgtgaacaccacgctcctgggcagtctcaacagaaccgaggtggtcagcctcttgtcgagcattatcgacaatcgggataatctcgagagcatcaatgaggccaaagactttctgaccgagtgcctgtttccatcgccgacaagaccgtacgagttgccatgggagcagaaaacgatttgggctataattttcggtctgatgatgtttgtggccattgctggcaatggtattgttctctggatcgttacaggacatcgcagcatgaggacggtcacaaattacttcctgctgaacttgagcatcgccgacctgctgatgtcgtcgctgaactgcgtcttcaactttatattcatgctgaactcagattggccattcggttcgatttattgcacaatcaacaatttcgtggccaacgtcacggtctctacgtcggtcttcacgctcgtggccataagtttcgatagatacatcgccattgtgcatccgctgaaacgccgcacgtcgcgtcggaaggtgcgcatcatcctggtcctgatctgggcactcagctgtgtgctgtcggcgccatgtctgctctactccagcatcatgaccaagcactattacaatggaaaatcgaggacagtctgcttcatgatgtggccagatggacgatatcccacttctatggcggattatgcatacaacctgatcatcctggtactgacctacggcattcccatgattgtgatgctcatatgctactctctcatgggtcgtgtcctgtggggcagtagatcaatcggcgagaacacggatcgccagatggagtcgatgaagtcgaagcggaaggtggtgcgcatgtttattgccatcgtgtccatctttgccatttgctggctgccgtatcacctgttcttcatctacgcctaccacaacaaccaggtggcatccacgaagtacgtgcaacatatgtatctcggtttctactggctggccatgtccaatgctatggtcaatccgctcatttactactggatgaataagaggttccggatgtacttccagcggatcatctgctgctgttgcgtgggcctcacccgccatcgattcgactcgccgaagagccggttgacgaacaagaacagctcgaaccggcacacaagagcggagaccaagagtcagtggaagcgcagcacgatggagacgcagatccagcaggcgccggtcaccagctcttgccgggagcagcggagtgcacagcagcagcagccacccggaagtggaaccaatcgggcagccgtcgagtgtattatggaacggccggcggatggatccagttcgccgctgtgcctttcgatcaacaacagcatcggtgagcggcagcgcgtgaaaatcaaatacatctcctgtgacgaggacaataatcccgtggagctcagtcccaagcagatgtgatgttatcccgatctgtcctgccactggaacagattgtgaatcctcctggccttcgcctcgtttcgctgcgggggaaatgcaatttgccactgcttgctctactctgtacatatactcacattcacaaagagatgaaacatgtttgcattgcagggtgggtcgatttaaagtgggaactttaagtacttaatattaactattaaatcgttagcctctgtgcttagttatgcaaagtagtttcgtttccaatgaattattattattccccccttcgaactttatctgtccgctatatacatttcatatttcacttaaagttcttttgcacttctgtaaatcgagccacccgaatgtgaagtcgaagtcgaatttccggttgtcaaaagaaaatacttcagcaagaaggaaaaacttaccaataaattgaatttgtatgtatttgtatagaagaatctatcgacactttaaccatcgaagagctgtaagttttaactgttgtaaacatctaggctaagccaagtttgtaaatacattctgtgtataactgatgcaaatgtatctgcgtatatgttgtgctatttgagtaaaagaattatacgagtcatgaaatttc

SEQ ID NO: 14043 - protein, 504 aa, DROSOPHILA
MSEIVDTELLVNCTILAVRRFELNSIVNTTLLGSLNRTEVVSLLSSIIDNRDNLESINEAKDFLTECLFPSPTRPYELPWEQKTIWAIIFGLMMFVAIAGNGIVLWIVTGHRSMRTVTNYFLLNLSIADLLMSSLNCVFNFIFMLNSDWPFGSIYCTINNFVANVTVSTSVFTLVAISFDRYIAIVHPLKRRTSRRKVRIILVLIWALSCVLSAPCLLYSSIMTKHYYNGKSRTVCFMMWPDGRYPTSMADYAYNLIILVLTYGIPMIVMLICYSLMGRVLWGSRSIGENTDRQMESMKSKRKVVRMFIAIVSIFAICWLPYHLFFIYAYHNNQVASTKYVQHMYLGFYWLAMSNAMVNPLIYYWMNKRFRMYFQRIICCCCVGLTRHRFDSPKSRLTNKNSSNRHTRAETKSQWKRSTMETQIQQAPVTSSCREQRSAQQQQPPGSGTNRAAVECIMERPADGSSSPLCLSINNSIGERQRVKIKYISCDEDNNPVELSPKQM

SEQ ID NO: 14044 - DNA, 5254 bp, DROSOPHILA
ggatggacgtctactgtttgggtagcaggcccattgaatgcataagtggcagacatatttgtgcattacaacgagagttggcatcctcatcatcatcatcagcacaatccggcgaataaaggatgtaaactgttttcgagaccatcggtgtgtgagtaaaaagcatatcagtaattatggctcctgtgctcccaatccctgattcttcatacatgtctgcataggacgggcttttggatcctttcaagtgcttctcttcacctgtctgctgaatggtaatatggtatttcatcccatcctttcatatctgcgtgtatttgctttgaccggtgcaatgattgcaacttttccatttgtatttacaaaagcgaaacaatgccgggcatatagatgcggatacgactgtatgaaatgagcttaacaaatttgagctgaaaacaatgtgaagtacgcagattcgagggtgattttaaatcacttaaaaataaatatataggtattaatttgtatgtataccggtaaataacaataaacctttacattaaagtgaaaagacaaaaaattaaatgcatatattatattatatattatattttattaataatatatttttacattttatatttaaatattttatattggttctgtttctatttagtactatttgcatttttgttgtgaagatcggtttcatcgaaaaacactgctcgacgcctcctcgtttgttttaatttcatcacgcccttgttggcaaatgttgaaatgaacgggggtgcaaagttgttggaacgtgggcaacaatgggttaagggtacacagcagtcacggatttgccagagattagcgctcggttcttgtggctttgtcggttttgctttagttctcggttgctggagctgaagttaattaattttcgcttatttgattgtttgccaggtgaaatgtgtgtgcatcattataaaaggtaagtaatgtatgtatgtagaaaaatttggtattcctattttttcttgttatggtaatctttctcgacgcgtttcagaatatcatccatattgttgatcaacttttccagaatttcctcaaggaggcccacacggttattgagactaaatttaaactgcttggtgaaagttcaaatgaaaagaattcaaatgcttaccgaaccatatcctggttttctccttgtggaatatccttaaagtactgttgcctaaaatatagtaagtttcaatagtttactagaaatggtaaaaaaatggggcgtaattactctgctggtgtcatgttctttcgaatttcgtgagtttcatcgtgcgcggcgccaacatcatgttccgcatccttgtcctcggtttcagacgcttgagggtggtggcgtctttttcgcccacaatgggtgatccagtagagcatgcccgacagtttcctgtagatgtacgatcctaagtgactgcgtccttgggtgatctcacccttcaccgtattgtaggtttccatgataatggccaggaacatgttctatgtaagtagaagtctcaaagtcacgttaacttatgatttaactggacaaactaaccaaaagaatgaagaacacaagaaggatgtaggtgaggaaataaatgggacccagcactcgattcgcttgctcaatgaggttgtactgaaagtcgccaagaatcatccgaatcatggtcaaaatcgaggtgatgaagttacggaagtctgggtgcttggtgccaaataaaagtagtcccaattgggcataggccagaaagacaataccaaacattaaactaaagccagccaagtctttcgagcactagaagcagaagatttatatgtcacaaatgacgtactattcctttttttttaaggaacaaacccttttcagtgtggttgtgaactgcaccagggtcttgttgaagctgatgaatttaaatattttaatccacacaagaaaggccagaatggccatcatatcgacataaataatattccagaaacatagaacatccagactttggtacgtcacatctgaatgggctctggcagtgagggacatcactttaaaactgtgccaaatgttgtacactaaagcgaggtaacaacccttgaaaagtaataactttaaaggttaagaatattgggaaaatataatcgagcaagattttaccagtaatatagcgcagtcgagaatgttcagcatcgaacagaagtaaattttaattccagatttgcgaatttccgtgatttcatagatggtgtagtagataaccattatataccagaaaatgtagataactgtcatgagcatactgcgatccgtaaaaaaggaatacatcttgaccgtttgcagatgggcttgcggtataacaccgcccgtgggcggaatttccgctattaatctacgaacacaaaatttaaaatatacgaaagagaatgcagttggaacttacttaatgctctgaaagatgtccgtattctcgttaaacaaattaaactcaaccaaacacagacgcgagccccgatccagccagtgaatatccttcagatcgttaatgatctttacgttcctatctttgtcgtagtccaagttcactgtgtatcctccggtgcggtagaaggccagcaccgtccagatgggcgtggagtccagatcgtgcatcgtccggaatggtgaacccttgtgcatcggctttcggtcctccgctccagaggaatatgcagcatagcaggtgttaaagtaacggatgaaggcgtcgtttacgtagcagctttccttgcgcacacgtatctgccggagacgtggcggtcccaagagaaggttttcatagagaaagacgcggccctatacaaaaatttaacaccatatttagatcttattgcaaagtattcgatgctttcgacttaactcacctccagatgatgaaagctcatattggcctgaatgctatccgaatcatcttttagataattgccagatacatcttcgctaccgtcctcgctgttcccatccacaccactctgtcgcttagctctcctgtgccccctgaggtcaatgtatggatttccattatatttaaaatcctcttgcaatctgtccatttctggggcctcttcaggggcttcgcccacgacttcttcaggtgattgctcactaccctgctcactaccctgctcactaccctgctcactaccctcaggtggcattgacgtgagattcgcttgggcgtcgtccataaaagtcaaatcgccgtggagtgttacaagaaagttatattttagatagtcccaccaatccggcacagtgattagcttttcaaagccaacagtgaccgaaggagccactaccatttcccgattcgtaaatagtttcttcatcgtgtcattgaaataaaacatatatgtatgccgaacggacaaaacaacttggagatacgtaagaatagaagaatagtaattaagctaaattaggaaagtatgcgacttacccagtgatgttagaatcagaaaaatgatgaacacagagaactcgacgagggcttcgcgtacctcctcatcggttgtgtaaaggatgcgattggttttggccctattttgcagggctgaagccgcgattatcgaaggagccctatgcccacgtgatggtgaaggtggcgtacttgagcccacggatttcttcttccttttaaacaagctaaatccctccttttctggtggctttgcgggtcgaggttcagatgcagctagcttgaccacttttgcagacgtcgatggtgctgcttcctggaaagttatacgcccagattcacgagtgctaacgggacgagagggagatgaggatggacccggctcccgaacagttgtccgtgcagatgtcgatggcttatcagaagtcgatggcttatcagaagtcgatggcttatcagaagtcgattggccaggatcccgaagacttggcctaggcgatgtcgatggaccggtgtctctcactggttttccggcagttggaggcggaccggttggatcagttgctggtggtggggcagaacgcgtggaacccactcctattgaaacgcgtttggtcgctggcggtggcggaggtcctcgagccggagtcacatcgcccggagtcgagtctgctgttggcgttccacgtggcgatgcgcccggcggcgtttttggtggacggggtggaggaggtccgggcggaccacttggggatcttccactctgaccctgctgggccattttcaatgcaaatttctattttttttaagcaagttttgcgatgaaaaaaatattcgttccagttgcacgctttgagccagactgaataatgctgcgagctgaccccgatgacaggcacgcattttgaagtttaaaaaatgtttacttggatctggttaagaaacacgacaaagttcttctatatgtgaacaaaggaacagtttcttgttgtatataattactgcatccataaacttcggctttccacaaccagctttctttcatgttgatttatgttattaacagtggcgtatatcaatttattcaaatataaataaataaaaagtgagttttaccatatgtttacacttttttcgtcggttttgggcgttcttgttgaatccaactccgctcacaggtaacagatgaaaaaaacaagatccagacaacagctgcacattcggcgactcctagcatatgcatatttcatgcgttaacgccaacatttgaattgcagcaggagaaggagtggagtggttggagtttaaggactcgcagccagcgcagaatacttttgatttatggcaatcgttgctggattccaaccacccactgccccacccactcaaacatcgtggccttctggtccgcagctatcagcgccagttgagttgtcagttggcgcataaagaatgcatgtacaatagcataaatgtgataacatctccctcaacttgcacatatcgggctttctgggcggatgcaagttgaaattctttaagccgactccgcaacttttaccataaccacctttactgctaaaactgaaccgtcttgttagacagaacaggattgaaaatcaaaaacagttatatatgtttttaaatatgttttatttgtaaatctttgaaaccgcttgattttatttatgttttctatacctttcagtaaaatgttaagctaattacaaactacattacattttacatttatttgtctgattttattcaatttaattttg

SEQ ID NO: 14045 - DNA, 2694 bp, DROSOPHILA
atggcccagcagggtcagagtggaagatccccaagtggtccgcccggacctcctccaccccgtccaccaaaaacgccgccgggcgcatcgccacgtggaacgccaacagcagactcgactccgggcgatgtgactccggctcgaggacctccgccaccgccagcgaccaaacgcgtttcaataggagtgggttccacgcgttctgccccaccaccagcaactgatccaaccggtccgcctccaactgccggaaaaccagtgagagacaccggtccatcgacatcgcctaggccaagtcttcgggatcctggccaatcgacttctgataagccatcgacttctgataagccatcgacttctgataagccatcgacatctgcacggacaactgttcgggagccgggtccatcctcatctccctctcgtcccgttagcactcgtgaatctgggcgtataactttccaggaagcagcaccatcgacgtctgcaaaagtggtcaagctagctgcatctgaacctcgacccgcaaagccaccagaaaaggagggatttagcttgtttaaaaggaagaagaaatccgtgggctcaagtacgccaccttcaccatcacgtgggcatagggctccttcgataatcgcggcttcagccctgcaaaatagggccaaaaccaatcgcatcctttacacaaccgatgaggaggtacgcgaagccctcgtcgagttctctgtgttcatcatttttctgattctaacatcactggtggctccttcggtcactgttggctttgaaaagctaatcactgtgccggattggtgggactatctaaaatataactttcttgtaacactccacggcgatttgacttttatggacgacgcccaagcgaatctcacgtcaatgccacctgagggtagtgagcagggtagtgagcagggtagtgagcagggtagtgagcaatcacctgaagaagtcgtgggcgaagcccctgaagaggccccagaaatggacagattgcaagaggattttaaatataatggaaatccatacattgacctcagggggcacaggagagctaagcgacagagtggtgtggatgggaacagcgaggacggtagcgaagatgtatctggcaattatctaaaagatgattcggatagcattcaggccaatatgagctttcatcatctggagggccgcgtctttctctatgaaaaccttctcttgggaccgccacgtctccggcagatacgtgtgcgcaaggaaagctgctacgtaaacgacgccttcatccgttactttaacacctgctatgctgcatattcctctggagcggaggaccgaaagccgatgcacaagggttcaccattccggacgatgcacgatctggactccacgcccatctggacggtgctggccttctaccgcaccggaggatacacagtgaacttggactacgacaaagataggaacgtaaagatcattaacgatctgaaggatattcactggctggatcggggctcgcgtctgtgtttggttgagtttaatttgtttaacgagaatacggacatctttcagagcattaaattaatagcggaaattccgcccacgggcggtgttataccgcaagcccatctgcaaacggtcaagatgtattccttttttacggatcgcagtatgctcatgacagttatctacattttctggtatataatggttatctactacaccatctatgaaatcacggaaattcgcaaatctggaattaaaatttacttctgttcgatgctgaacattctcgactgcgctatattactgggttgttacctcgctttagtgtacaacatttggcacagttttaaagtgatgtccctcactgccagagcccattcagatgtgacgtaccaaagtctggatgttctatgtttctggaatattatttatgtcgatatgatggccattctggcctttcttgtgtggattaaaatatttaaattcatcagcttcaacaagaccctggtgcagttcacaaccacactgaaaaggtgctcgaaagacttggctggctttagtttaatgtttggtattgtctttctggcctatgcccaattgggactacttttatttggcaccaagcacccagacttccgtaacttcatcacctcgattttgaccatgattcggatgattcttggcgactttcagtacaacctcattgagcaagcgaatcgagtgctgggtcccatttatttcctcacctacatccttcttgtgttcttcattcttttgaacatgttcctggccattatcatggaaacctacaatacggtgaagggtgagatcacccaaggacgcagtcacttaggatcgtacatctacaggaaactgtcgggcatgctctactggatcacccattgtgggcgaaaaagacgccaccaccctcaagcgtctgaaaccgaggacaaggatgcggaacatgatgttggcgccgcgcacgatgaaactcacgaaattcgaaagaacatgacaccagcagagcaacagtactttaaggatattccacaaggagaaaaccaggatatggttcgtctcaataaccgtgtgggcctccttgaggaaattctggaaaagttgatcaacaatatggatgatattctgaaacgcgtcgagaaagattaccataacaagaaaaaatag

SEQ ID NO: 14046 - protein, 897 aa, DROSOPHILA
MAQQGQSGRSPSGPPGPPPPRPPKTPPGASPRGTPTADSTPGDVTPARGPPPPPATKRVSIGVGSTRSAPPPATDPTGPPPTAGKPVRDTGPSTSPRPSLRDPGQSTSDKPSTSDKPSTSDKPSTSARTTVREPGPSSSPSRPVSTRESGRITFQEAAPSTSAKVVKLAASEPRPAKPPEKEGFSLFKRKKKSVGSSTPPSPSRGHRAPSIIAASALQNRAKTNRILYTTDEEVREALVEFSVFIIFLILTSLVAPSVTVGFEKLITVPDWWDYLKYNFLVTLHGDLTFMDDAQANLTSMPPEGSEQGSEQGSEQGSEQSPEEVVGEAPEEAPEMDRLQEDFKYNGNPYIDLRGHRRAKRQSGVDGNSEDGSEDVSGNYLKDDSDSIQANMSFHHLEGRVFLYENLLLGPPRLRQIRVRKESCYVNDAFIRYFNTCYAAYSSGAEDRKPMHKGSPFRTMHDLDSTPIWTVLAFYRTGGYTVNLDYDKDRNVKIINDLKDIHWLDRGSRLCLVEFNLFNENTDIFQSIKLIAEIPPTGGVIPQAHLQTVKMYSFFTDRSMLMTVIYIFWYIMVIYYTIYEITEIRKSGIKIYFCSMLNILDCAILLGCYLALVYNIWHSFKVMSLTARAHSDVTYQSLDVLCFWNIIYVDMMAILAFLVWIKIFKFISFNKTLVQFTTTLKRCSKDLAGFSLMFGIVFLAYAQLGLLLFGTKHPDFRNFITSILTMIRMILGDFQYNLIEQANRVLGPIYFLTYILLVFFILLNMFLAIIMETYNTVKGEITQGRSHLGSYIYRKLSGMLYWITHCGRKRRHHPQASETEDKDAEHDVGAAHDETHEIRKNMTPAEQQYFKDIPQGENQDMVRLNNRVGLLEEILEKLINNMDDILKRVEKDYHNKKK

SEQ ID NO: 14047 - DNA, 5142 bp, DROSOPHILA
attttattcacttatccgctttatcgcactcatattatcagcatgatgcggtattttttccgcagacttcgcggaaacttttgtcacgagcatgacgattaatggcccagggatttgcttagattagagtgggggcactatgagaattgaagggcgtgactcggttgctactgggtaagagatttccctaatggttgataaacttgtatatatcactggattcgagtggttagttccagggaatttccaaatgtatccgtagctatcggtcatccatgatccatggcgatatccgatttagttccaactaacgcgaaccggatcgactttcctgcggctatagtggccaacttcttgacattccatatccctaagaaattcggtattttgctgaatcgttagctaatggaatttcggatttattgcaatcagagctaacctgccttgattttaaaatatacccttgtgcgccttaacttttgctgatcacttcgattggaataaccaatgattaaattgcaaaatattttaaaatattatcgatcaaaggattataataagtatttatttcgtcacaactgtttcgaattactggcctatcgaacggatgtgtgaaaatcaaggcattcctatataatgtttatgatgcacatatatctatatccgttacggtctggccacagaaaaaccttcaactcgtcgtgccgattatattagcagaaacggacataatcgagccccttaaaacgtagttgtattatcgtcgaaatccccgccgatcctctccagcaaaatgaatttcaccattggcattataataattagcgtcgaaatttgctacgataagtcggggggctcgataagtttcctgtcactcaaagcgtttgacctctaaaacaaaaaaaagaaccataatgggactttcacccgaatgaaaaaaaaacccaggaaaagataccccaaccacaataacaaatccgttttgcgtatttgattttttagtagaatcttttaaatttatttctttttagtgtgttgtttgtttgttttttctttcttgttgatttttttgcttttgcttgcatcaaattcttgttttgttttcttagaagctcattatgttcactatatcacgtggccttacgaatagatttgtgtgttttataaatataattattctttgattagacttaagagcgagagaaaccctaagcggcttagctggctatggtacaaaacctatacttaaatggagatgtacgactatgtgtaagagttatgcttttgcgtttatctttttcataaaaagtatttcagcttttcaggtgcttattttcgcattttcattttctgtgtttggaagacttttgctgatttgctgttattcaaagagtaatacatgatacatgaggcaattcaacaccaagtacttggactgaggtagtttggcgatgtcctggtagaataccgttctctcaaatcgattacataatataataataaataaattataacaacgtttgcgtgtgtgtgtttgtgtgtgggtgcgtctgatgaaggtccttagcctcgtcgacgggtttccaggatataagccaggaaactaagccaacgaagttgtgaaccgagtttaggattcgcatgtttgcaacacttcaaagcaacatttgcgcaatcccggcgaatgatgtgaaatgtctacgcgcatgcgcacaacgcctgcgcatgtgtgcgagttggatgagttgtggggggtcagtcttaaaagcgggagattcgataggggtggctatgctatatgatatgcatatgcagacaccctctaccagggccgccagggctgctcctcctccttgatctgcttcttgatcaccagcgacaggggctgctgctccattggcacgcgctggatgaccgatggcttgatgtccatgggctcgtagctagagttggccggactgggcggggcgtagctacagctgctgctgcttccgggcgccgactcgtatccggcggaggagtgcgagctggcggatccggtgctggctgtacgctggggcatgctgaccaacatgggttgctgttgtgctgctgctgcggccgctgctgctgctgcgacggcgagttgctgctgctgctgttggtgctgcagcaactgttgctgctgctgctggggcaggctctggggcaacacgagggcaatgctaccgttgggcagcttggtggggatcacctgcatgccattgggcagaaagtaaccgctggccgtctgctggataccaaagaggtagggtgccgctgctccctgctggctatcctgctccggcgagctgggcggcgagggcagcatctgggcgtggatggactgctgttgctgctggcgctgctgctggtgcagctctgtcttaacgccattgatgcagttgctcaggtgctgtagcaggcgacgacgctgggcgggctcgatgccgggaaagcggctaacctcgttcacacagtcggcgaatccggccttgaatttgttcacaatcttgggatcggcggcctgctgcatggctgcctgctggcgctgcagctcctgcagatgctttactgtcttctccagaatgtcggccttttccaatttggagtggcgagccggctaaaagtagagagagaaaataatttggaaattagtcaatgatttaaacttttaaaaaatatttgagataatttcaaatatgtagttttttttattttatttgtggctttaaacttatatttttgtcagatacttacgtcttttttggtggcatccagaatcagagtcttgagttcattgagacagttgttaatacgggcacgtcggcgtttctccatgatgggcttgttcgactgcaagaggcaagaaatggaaaaaaaaaacatcgattagtcacggcttttgcacggctaatttgacctcatgcaacgacccaaaaatagaggaagctgcatgggtcttcaattggattggaggagatcaaggaggaggcggcgtaggttggggagcggattgactggctggcggccaaatttagtcgcacggcgcgtgctctatttatagcgccactcggccgaggcatttatttaaaaatagtttggcggttataaattacaggcagtggctataaataaaccaaccaggtatgagcaaaaataaagagaatgtgacaaggtcagagcgggaaattcgaagatgccataactaggtacattattatctagggagcacaagttgccaaatttggactcgcatgaagtcagtttttttttttctggccaactcattgaaccggtgccgttcgaatggccaaaaacggcggctgatgaccgacaattgcagccaccacgcgacgcacgcgccaagtggcagccaaatccgaatccgagtccgaatctggggagctggtgggcagctacgccagccaattttgggcggcactcatgaatggatggagcgtgtgtgtagtcggagtagtatgccatatgccatatagtaaatgccaccaacgcgacgcgagataaattcgctttgtgttggcgcgccgacggcagttgcggcctttttttggtctggctcagagtgtttttcttttttcgtatttttattcccagccagccatgtgggagatggctaaaaaggaaatgcatttgggcagcgggattgatggggccagtcgcccacagtcgcgaatggaaatcaacttgagctcgaagtgggtggctctcaattaggggaattctcggtttggttcgcttcagttaatccacagatttcggggaactagaggttctgatttaatccattgacggggttttttgtttttggctttggattttttttttcgagtcttatttttctcgaaagaaacttacccgacggtcacttttgagcggcgtctccttgagctgggccggcacaacggcggtgcccagaacgttggtcatgttggctgctgttacgccggtaaccatttcggtcagatattgtttgttgagtttgaggcacagtttggttttcacttggcagcaaatctgaatttgctgctctttgcaatataagttcactgcttttttgctttttttagaataactcaagttgtcagtttttttttttttcaagttcacttggtggtttcactttcgcgcagcgtcgcagagaagcacgtaaaatggtattgtgtctgggggggttctctagatttcgattcggtttatcaaagcggagcgatagaaccgcacgctacgaaatacggcaggcgaatgagcagcaggttctggctgcagtgcgattaaaagaccgaaacgactcggcacgaagcagaagatcgatcgttcggctttcggatggttgcgctatatatatgtatgtatatatatatataagtatttgctttactgcgtctggatgttgcggagcgtagcgggactaccttatcgctgggctctcggcggaagactgacgattgatcgacaggttcgtaggctaaatcgccgctgcgagacgcgagcgcgagccacacgaccgcaccaatacaattgcactggcattgcggctacctaggggtatacattatgcgctacctgctcgcttcagtgtgtgtgtgtgtgtgtgcgtgctcacgcttgtgagcggtacctaaagtacacaccgcgttactcatacgcccccgtggctcgcgggaatgggcatttcttcctttttggaaatcacactgcgaaacccccattggtgatcgtcggtcggtcggtcgatcagcgatcggtttggcttgactctgctgggctctgctaactgagggattcacaagaggctgtgtttctggctgtgctgttggtgatggtcgcggtggtgttggtgttgttgctgcttctgcggtggtttctggtggctcgccgttcgtggtttgctgattcatgcggccaacgcgacgacgtcccatagaaggtgaaaatagctggctatatgacgccaccccagtgcgacaggttcggttttttgtgctgtgtactgtgtatctgcggctcgggggtcgctaaacagtaaacaagatcacaaggttgtgcgcacgctaggcggaagtgggtggttgggtggttgggtggttgggcgatcgggca

SEQ ID NO: 14048 - DNA, 1982 bp, DROSOPHILA
tgaaaaaaaaaaaaactgacaacttgagttattctaaaaaaagcaaaaaagcagtgaacttatattgcaaagagcagcaaattcagatttgctgccaagtgaaaaccaaactgtgcctcaaactcaacaaacaatatctgaccgaaatggttaccggcgtaacagcagccaacatgaccaacgttctgggcaccgccgttgtgccggcccagctcaaggagacgccgctcaaaagtgaccgtcggtcgaacaagcccatcatggagaaacgccgacgtgcccgtattaacaactgtctcaatgaactcaagactctgattctggatgccaccaaaaaagacccggctcgccactccaaattggaaaaggccgacattctggagaagacagtaaagcatctgcaggagctgcagcgccagcaggcagccatgcagcaggccgccgatcccaagattgtgaacaaattcaaggccggattcgccgactgtgtgaacgaggttagccgctttcccggcatcgagcccgcccagcgtcgtcgcctgctacagcacctgagcaactgcatcaatggcgttaagacagagctgcaccagcagcagcgccagcagcaacagcagtccatccacgcccagatgctgccctcgccgcccagctcgccggagcaggatagccagcagggagcagcggcaccctacctctttggtatccagcagacggccagcggttactttctgcccaatggcatgcaggtgatccccaccaagctgcccaacggtagcattgccctcgtgttgccccagagcctgccccagcagcagcagcaacagttgctgcagcaccaacagcagcagcagcaactcgccgtcgcagcagcagcagcggccgcagcagcagcacaacagcaacccatgttggtcagcatgccccagcgtacagccagcaccggatccgccagctcgcactcctccgccggatacgagtcggcgcccggaagcagcagcagctgtagctacgccccgcccagtccggccaactctagctacgagcccatggacatcaagccatcggtcatccagcgcgtgccaatggagcagcagcccctgtcgctggtgatcaagaagcagatcaaggaggaggagcagccctggcggccctggtagagggtgtctgcatatgcatatcatatagcatagccacccctatcgaatctcccgcttttaagactgaccccccacaactcatccaactcgcacacatgcgcaggcgttgtgcgcatgcgcgtagacatttcacatcattcgccgggattgcgcaaatgttgctttgaagtgttgcaaacatgcgaatcctaaactcggttcacaacttcgttggcttagtttcctggcttatatcctggaaacccgtcgacgaggctaaggaccttcatcagacgcacccacacacaaacacacacacgcaaacgttgttataatttatttattattatattatgtaatcgatttgagagaacggtattctaccaggacatcgccaaactacctcagtccaagtacttggtgttgaattgcctcatgtatcatgtattactctttgaataacagcaaatcagcaaaagtcttccaaacacagaaaatgaaaatgcgaaaataagcacctgaaaagctgaaatactttttatgaaaaagataaacgcaaaagcataactcttacacatagtcgtacatctccatttaagtataggttttgtaccatagccagctaagccgcttagggtttctctcgctcttaagtctaatcaaagaataattatatttataaaacacacaaatctattcgtaaggccacgtgatatagtgaacataatgagcttctaagaaaacaaaacaagaatttgatgcaagcaaaagcaaaaaaatcaacaagaaagaaaaaacaaacaaacaacacactaaaaagaaataaatttaaaagattctact

SEQ ID NO: 14049 - protein, 337 aa, DROSOPHILA
MVTGVTAANMTNVLGTAVVPAQLKETPLKSDRRSNKPIMEKRRRARINNCLNELKTLILDATKKDPARHSKLEKADILEKTVKHLQELQRQQAAMQQAADPKIVNKFKAGFADCVNEVSRFPGIEPAQRRRLLQHLSNCINGVKTELHQQQRQQQQQSIHAQMLPSPPSSPEQDSQQGAAAPYLFGIQQTASGYFLPNGMQVIPTKLPNGSIALVLPQSLPQQQQQQLLQHQQQQQQLAVAAAAAAAAAAQQQPMLVSMPQRTASTGSASSHSSAGYESAPGSSSSCSYAPPSPANSSYEPMDIKPSVIQRVPMEQQPLSLVIKKQIKEEEQPWRPW

SEQ ID NO: 14050 - DNA, 7018 bp, DROSOPHILA
cacttgcaatcgttctggctgctttcattattactgattgccggccaaaactcggattatggtttgtttttgtaatgtatatatatgcacgtatatataagtctaagcgggtttatcttacactttagatatttttgatttaactttatgcctgctctctaacaatacaatacaaaaaaaaaaatattggataatcgctcttacttatttccgattattagatattattacgatatttaacatagtttcggtaattcgatagataggtagtattgtttatcgctcgtagatgatagactgttgcttatacacacactttggtttctcccgtacttagtatattcgctagctcctttcgaacgctaattacgcatattgattagtgttacattagattgcaaaaaaaaaaaaggattaataaatacatccatattgtaactagttcgcttggttatagatatacacacgcacgcacacaaatccttaactttacatcgacctatcttaggcgctttacatctaacgcgctggatcatcgtggatctggccatcatacctcatctacaatccatctagaaatcatccagctccagctacttctatacaacgttcgccgtggaaagaacattctttagcctcgcactaaactaaacttaaataataatcaacaacgttgctccaacagacttaaaatggaattagaacaaaaatcatgtgtgcttaagtcgtgtgcagaatgtctcaatatttacacatcaaagttcacttttgccaattgccctctagctcctctagctcctcatcatctatctctcttcatctgactctactctacgatcctgcggctccttcggattcgaaggacacatggaaaatcgaacagtgatcggtggggatgtttagctctctcgatttcgcaggtccacaaatccgattctctccaccaggccgcccttgtcattcattccacattcatcagtttagtccttcgtttatttttttttttttttaactttttggcactgctttgaatttcttttggcaccgcacgcttcgagcgtgaaaataaaattatttatgcatatacatagataaatacgaatatatctatatggagtatgtaaaaaaaaaaaaaggatcccgctaatacgtcaacagtttacaaggaaaatatgtacagtatgtagtggaaacgaaaataaaactagtttaaaaacaaatggggcggttattctcgaatagaactaagtaaacatattgtctcttaaatgttaggatctaaaaatgtctgcaaattcagcaagtacttttctgtaggctaactaaactaggcctttaaaactataaaacttgaactcagtcaaagcaaacgaagatttgaatatcgattctggatttctgcatcctttccgctagcgttttctcgcccgtcgatttcctcagttgcggttgtaaaactttctttggtagcgcttgcagccgcttccgatgctgccaacgcctcctcctcctcctgcccctccgcctggtccaccggcggatcctgctcctcctcctcctactcctccaccgccgcccattcctaggcccaatcccatgagctgttgctgttgctgctgctgttggtgatgctgctgatgctggtgctgatgctgcagcccgaagcccgagtagaattgctgactcgccgctccaactccaactccaactccagcgccgactccagatcccggcacaacagccccagcggcacccatgcccagggctttattttagctggacgcgcccagttgattcttcatatgggcagcggcggcggcggcagcagcagcagcggcaaacggtgagccaccgccggtcggtgtctgtgggccattgttgttgttattgtgatcgccaggggtgcgcggtccgttgaccatgcccacgccattcacattgccgccaccgggtccgccgcccagcaatccaccagcggtattctgcgccccagccgctcccgtcggtgagccctggcccaaggaggagacgtgtcgcttgagcatcggatgattggccatcgatgcgaagaccaggcgctcctcatagtcgtactcgcagagtatcttgttctcgcacaggtagaaacggtcgcccacacagaatctgaaataaccggaaaacggcagtggttagtactacggcacaacaagtcgcaaaggaagtggaaacgatttttccacacgcttaggcagacccagaaatcggtgggggggaatcaaaggcataaacacaacgacaaagacaacgacagcaacgatgagcgatgacaattgacagcggttatggcgactgtagctgccagccagcccggcaactcaggaactgtcgtctaaaaacaaaagcaaaacggttccaaagaacaaggacagctactcagggaatggcagacggggcgggaccgaaacaggaccagcacaaggacaaggaagtcagataagcgctaggcaatgtcgctccgctgtcagcaacagttggtgtggcaggagcatgggtctggagcagaggagcctggagtgctggctccacttcggttggagtacggagtcgagagtgtacattcagccaactgcaaataaagttggctcccggcatggagccctttgtcaaaatatttatgttagcacctgtacggatggcggaggcggatgccacgcccactccggccaacagcaaacagatacactcgatgcaaaccgaaagggagctcgcattacaaacgaaaaaagccgaaaaaagaatacgattcacttggggatgagatggagtcgcgttgagcagacgagttgatgtcctttgaaaccagctagatctggtattgaaaagtgagaaagaccaacgatgattgtgcttattccttagaataaaaaagacaaggggtaaacgtttagagatactactactactactttcttatccgctacaacttgcaagttgcctcgaactttatccatcctttccatcacatattctgctatcctgatgcaatactctacgccctcctcctccgccggcgtatgcaaaaaagaaacgtttaaagtttgattccccgaggaggacggggcacgggaacacactgcatccgttttggtaaggagtctgagtaaatcagcttacagcagacttacagcggatatgaaatttggcttttgatttacgtcaacattttgttggcccgctgctttcggttgcgtggccaaatcgattgacggcccatgtgggcgtggcagggagcagtgcacagaaatctggccggccggagcgggcaaaaaagcgctttgtttatctaccaaaacagggcaacaaaagtccatgaaaacgagtcaacaaagtcgaaacttttgcttcttttgccgctggcctggcattgagcgcacctgtgacatggcgatggcgatggcgatggcattggcattggcgatggcaatggtgatggctatggaaatggacacggacatgttgataagtgagtgcctctgtgcgggactcgcacatccgggcatttcgttcgcctcctctccggctccattccccgtcgttcacaagaaaccaacagcaaattgtcaacaggaagcacacataccaaaataaaatgggggggaaaaaaaattgtgaaaaattcgcgtggacgaaagatttgacttggatgcgactccaatcgcaggagagcaaggatgtcgtcgtccagtgctgacgacaggaaattatgcaaacctcaccgacgactgcaatgcattttgcagcatttcccaaacagcaacaggacccaggactcagcggtaggactcaacaggaaaagtctttttgtttgccaaatgaaagcccgcattttaaatgtggccattcgaaccatccgaccaaccaacaaggcggagcgaagcagccgctggccatgtggccacgcctcaatggattttttcggcaattgaattaatttacgtgaaaaattgattagcaacaggaggggatgcatctccactggtcatttttatggataacgtggtgaaatatgggataaccatgacccatcatactctcaatcttttgatattagtctaagctaaatttgcattagttctatattatattattctagcgtaaacaggattatagaaaagtcaaaagttaaccataatggcatctccgcaagggtgaacttctccaagttcgttgctcctgttgcatttttaaagccaattctcggcaatgcaaaaacaaagggccagcaggagcgcaaaaagcggggagattcccggataaggagcggtggccaaacgggtggagacgattctcacaatatgccaatatgttataacatttatttcaatattttttaccagccagcaccgtgtggcggcgcttttaatatttaatgttcgctcccttgttgcgttgcacaatcgacgactatgccggaggtttctggtggaccgggagccacgaaggcatatgtgcgccctcattattaatgcagaaacccgaaacgaaaacgaaaccaaaccaaaccaaacgaaacgaaccggccaaaatggaagaatgagacgcgaccccatccaccgggcaatcgggctgcagtttaaagctctccagagtgacatttcacgaattggccaagtccaataaaatatttgaggccttggaatgctgggcgttgacttgatggcacccaaaagggttcggttcgttcggttcgttctgttcaatgcgaaatttatgcggttttcatagaaaacgtatgacactaaagggccattcttcccaccccgtttgtttagccgttagcttgtaaacgatggcaatttgctgtctggcggcacgttaataaaacttcaagtgccactttgggcccgctccgatgggccaaagattaaaaagggattcatgtggccaccttcaatgcgaatctctgtgcaaattgcccataaaaatgcatgcgaaatcgtttagtcgcttctcccacacaatggatgatgtatggtctgccccacaatggggcaatgggccagtttggccaaattcctttcgatgctcacctgtggttacactgctgacaagcgaagcactccaagtgatagacattggtccttgcacgcatcaccatctcgaaggctgggatcaccttgctgcaggcggcgcagtagcccgtgttgccaaacaatctgcggggaaaagttatgaacagattagtaaaaagtttgaagtttatatggtttacatggttctgacttctttaagtaaacatctttactctttgctattaaattgaatatgcgtaaaaaaaagctttaggtagaataggtactgtttaaatataaattactcttagcaagaaagcttcttaaagtcttataaaactaaaaataagtcacagaatataatgaatactttatctataagcattatagacctgagttctcaagaattggtatcatttttaacttctaacatgactaatgaataccatcgtctattatacttctaggtatattacactatcaaatggttttagtatttcttaaatcgcagctaacctcaagtagtcccgcttgcagagcatcaggttgcccttggtgtagagcgtggagcccacctcgcccaggcggcagtcgcagcagccgcacttgaggcagtcctcgtgccacagcatgtccagggcgcggaggagatagcggtcctggatgtgcttgccgcagccggcgcacaattggctgccgttgttgttgttattgttattattgttggcagcggcggcgatgctctggacattcccgttgccattgttgccgccaccggcaccgccggagttgaccacattgaccacgttcccattgccattgggattgggcccgttgttctggccaccgctgttcatgccggcgttgctttgctgcgactgctgctgctgctgctgctgttggttggaggaaagcccgacgagaccgggttcggttttggtaatgtccatagtcatcatctgcaaggggacaggagaagatatagttattactcaaggttccatcgccggagttttgtgtgtgtgtgtacattaaggctaccgaatccctggtaataactgtaagcggaaggggcaaatccccagggccactgataagcgtactggggcacgtattgccgcaggatcgcctgctgctccagctcaatcgactgcacgtggggcacgaagaacttgtccatgttgtagaaattgacgcgttcttcatcttcgcaatgcatactagcgttgtagaggtactccatttcgatgttttcctgtttccttcgatttcaacagttttcttacaaaaatgacccgcgaaagatcagaaagctactgagtcttcttctagcagtgttggcagtgttggcaatacacaaacaaaataacattttatggcgtgtaaactatcgtatgctactaagttctcaaaagaaaatagctcttttgtaaataagatgcactaatcaatgcattggactcataaaaatagtttggtaattgtatttttgttatatcaaataaattttttatagcattttccttattgtaaatttcttcaagtgtcggccactggcaaaatgtaacggcaattatcagctgtggcacagtgttgtgaaatgcgcgcctctgcgatggcgtcagtgtacaaaagatcactattatgcagcatacttttgggctgaccactaaagtgcacattggattcgcacacaattcgcaaactatgcaaaatattaatacccctttgaaaatgcaatttccacaatgaaatggtgtaatattcatattttcatgacatattttcagctgaataaaaaaaaactacttcttcacttgggctcgtccgggaattgaacccgggacctctcgcacccgaagcgagaatcatacctctagaccaacgagcctcgttgaatgacccgctgctaatcacccaataaaaagttagcgatcgtttttcgtactttctcctttcgttca

SEQ ID NO: 14051 - DNA, 1719 bp, DROSOPHILA
tgcagatgatgactatggacattaccaaaaccgaacccggtctcgtcgggctttcctccaaccaacagcagcagcagcagcagcagtcgcagcaaagcaacgccggcatgaacagcggtggccagaacaacgggcccaatcccaatggcaatgggaacgtggtcaatgtggtcaactccggcggtgccggtggcggcaacaatggcaacgggaatgtccagagcatcgccgccgctgccaacaataataacaataacaacaacaacggcagccaattgtgcgccggctgcggcaagcacatccaggaccgctatctcctccgcgccctggacatgctgtggcacgaggactgcctcaagtgcggctgctgcgactgccgcctgggcgaggtgggctccacgctctacaccaagggcaacctgatgctctgcaagcgggactacttgagattgtttggcaacacgggctactgcgccgcctgcagcaaggtgatcccagccttcgagatggtgatgcgtgcaaggaccaatgtctatcacttggagtgcttcgcttgtcagcagtgtaaccacagattctgtgtgggcgaccgtttctacctgtgcgagaacaagatactctgcgagtacgactatgaggagcgcctggtcttcgcatcgatggccaatcatccgatgctcaagcgacacgtctcctccttgggccagggctcaccgacgggagcggctggggcgcagaataccgctggtggattgctgggcggcggacccggtggcggcaatgtgaatggcgtgggcatggtcaacggaccgcgcacccctggcgatcacaataacaacaacaatggcccacagacaccgaccggcggtggctcaccgtttgccgctgctgctgctgccgccgccgccgctgcccatatgaagaatcaactgggcgcgtccagctaaaataaagccctgggcatgggtgccgctggggctgttgtgccgggatctggagtcggcgctggagttggagttggagttggagcggcgagtcagcaattctactcgggcttcgggctgcagcatcagcaccagcatcagcagcatcaccaacagcagcagcaacagcaacagctcatgggattgggcctaggaatgggcggcggtggaggagtaggaggaggaggagcaggatccgccggtggaccaggcggaggggcaggaggaggaggaggcgttggcagcatcggaagcggctgcaagcgctaccaaagaaagttttacaaccgcaactgaggaaatcgacgggcgagaaaacgctagcggaaaggatgcagaaatccagaatcgatattcaaatcttcgtttgctttgactgagttcaagttttatagttttaaaggcctagtttagttagcctacagaaaagtacttgctgaatttgcagacatttttagatcctaacatttaagagacaatatgtttacttagttctattcgagaataaccgccccatttgtttttaaactagttttattttcgtttccactacatactgtacatattttccttgtaaactgttgacgtattagcgggatcctttttttttttttacatactccatatagatatattcgtatttatctatgtatatgcataaataattttattttcacgctcgaagcgtgcggtgccaaaagaaattcaaagcagtgccaaaaagttaaaaaaaaaa

SEQ ID NO: 14052 - protein, 313 aa, DROSOPHILA
MMTMDITKTEPGLVGLSSNQQQQQQQQSQQSNAGMNSGGQNNGPNPNGNGNVVNVVNSGGAGGGNNGNGNVQSIAAAANNNNNNNNNGSQLCAGCGKHIQDRYLLRALDMLWHEDCLKCGCCDCRLGEVGSTLYTKGNLMLCKRDYLRLFGNTGYCAACSKVIPAFEMVMRARTNVYHLECFACQQCNHRFCVGDRFYLCENKILCEYDYEERLVFASMANHPMLKRHVSSLGQGSPTGAAGAQNTAGGLLGGGPGGGNVNGVGMVNGPRTPGDHNNNNNGPQTPTGGGSPFAAAAAAAAAAAHMKNQLGASS

SEQ ID NO: 14053 - DNA, 5002 bp, DROSOPHILA
gtcattatttatattgtgctaagcactttggtacatcctaatacctaagccaaactccaaacggggccaacacgaaacgaacgacagaccaaagagcgcagcccaaaggcacatgttgcggtggcgacggcaggaagtggaaagcgctgattggggatggataaaggaaacgctgcacaaggacatcgtcgactgcactctgcaaccggcgcaaccggccagagacagtggaacgtgtctaaaagccgtgaaaagtgcacgtaaacccgcaaattgccgctaatagagtgcaaacagttctgagcaggatgttgccttcgaaaagggaagctgcaaatcgtggaaattcatttagaaccagggcagcggaaaatagcattcgccttgaaatgcttttgacagtcgattagatgagcgccccaaattaaaaatatccggggaattcccggtagtgaaatttcatattaaaatgtgtcataagacatatttgccctggcacaggaaaactatttggcgacccgttaaaccgcttttcaccccgttgaattttacgctcgacccgcaagatggatttgggcaaaaatgttcgaagaattttcatcatacccacatgaacggcaataagttgtggccttgtgagcaactttgaaattcgacatacataactaaaaactttcaagcctgttgatgagtttagattttaaccaaagttggctagttagcccactggcaatcttgaaacttcctgtcagggtttccttgagtggagcacacgcggcgtatgcgtaactaattcaggtgctctcgagtggtgagtttccacaaaaggatttccccttccgaaaagagagaaagagaaagcaatcagctgctggtccggaactttctctgttttcttttactatctgggcttcagaggaaatgttaatgttagtggtgaaaagctgtctcttaaaagagagaaagccaaaagaaaaatccacccactaaatatcagagctttaagcgttaaagctttaatgaacatttagatggcttttagcgaaggatacaataaataaatttcggtaaattaacttgcaaaagcctagtttttcgaagaagcctataaacttttctcaaagcttttttttagaccattttaaatgatggttataaactcgggattcatgaaagaaaatccgataaaatcgttctggtccaaattcatcataaaaagcttgtccgttggagttaagtccgtcttctccttggtaaaggcatcatcaaagttgcttatatccttgcgatgtttctgaaatgtacccaagattacaataaaatgatttcctagtggggctcctgttttagcttacaatcattggcttaataggtggctccatttcgcatgcctctgccttatcccagtccacattccggaagaaaggatgcgtggtaatctcctgtctggcatagcggcctgcacccaatctattgttgggctttttggtcaggaactttggaatacaaatctataccattagattcatatgtttttgaaatccaacacttacgctcgttattatatccatggcctccacgctgaaatgctttggaaacaccgccttcttgtcctttatgttcctaaagacagtagtttcatcatctccttcgaatggagcctgacctgccatgaattcgaaaagcaatacaccaaaagaccaccaatcagcggcgatggaatacggatcgtagctaacaatcttaaattatttttaagctgattatttttacacttatttttttcggctgatttacttacttcgggagccatataatttggagtaccacaaaaggttcgtgtggtctgccgctcggtaacgccctctttgctcaatccaaagtcgaccagctttacatgcccctcaccatccagcaaaatgttgtccagctttagatctctatagataatatcacgctcgtggaggaaaaacagagcaatagccacttccacagcgtaaaaactaagcacataatatatagaagatttcaaaatatggtacttgaatataaatatttgtactcacatagccacagactccttgaaccttccatactgctgcatatggtacataagatctccacccttacagtactccattacgaagaataatcggtccatagtctggaaacatgagtgcatggagacgaggaaaggaggacgtccggatagggctagaattttcttctcattcattggcagctccatatcgtccgtttggataatgacatcctttcgcaggaccttcacggcatacagctcatccgtgccacgacgctcggccagcaggactttgccaaaggatcccttgccaataactttaacaaagttgaaatcagcagctcgaatcatatcgcgtttgctcatattatgcggcatatccttgttgtccatgcgacgcttttcattcggacgacgatcgtgctgaaaatcaggaatattaaatatgtggcaaacttggtgaggacatccgcttaccctaacttcatcccttaagcgagctatatcattaaaggcatccacacagggtatgttataatgttcaccctccacttgcgacagaaacttataccagccatcaactggctccttttgcagttcctccaggctgaacgagaacgatcccatgaaatcattgcgagaagttcgatcccaatcccaaacctcgatgagcaaacgcttgtcacggtcctgcggctgcaactcactaggattaaagaaaatatggtaaagaggtctatttagaggattagttttcaactattacaaagtaaaagtctcgttgaacactggattgaggtttttctgaatggtcttggtcttctttttggtgcgccccgaacggtccggatgcatttgcactgcaatatagggatcgctaaacccgttggtatccatgggaatgaggttagctgcctccttaactgcagtatgaaagaaacattaatctttatatgggcatataaactttaagtaataacttactatcaactttcaagttattgcccttaagctcgacgtatagcagtagtttacccctcacctcgctgatgtccgcaccacacatcggtggcactgtctcctggcaggcgtgatgcacatttaggttgcaatctgaaatatttgggttaatagcttgaaagcaataggactcgagtttattcaggaatttactctcgcacttgacgccctgatgggcgactccatggagcagcagtccgcactcgtcgcagaatgtcggtgtggtgtaggtggtggaaatccagccgtgcttcaccttagcgcagtcggcatcgaagtccgtgtccttgccaggacatttgaacaccacaaatttacagcacttctggtgaatgttgaagcggcattctgcgtatgcaaatattttaaaagattttttaaattgtgaacatttctacctaccctcgcactgaaaaccttgcttgccaaagcccctaatcccggcacgaatccgcgaatgcaacaatgcgaaacggaagaacagcgaaaaaaatatagaaaaaacaacgaaaagtgtgtcagcaacgaaggcactaattaaattaacgatgggaacgctgagatgccagcaaaaaccgaaaacgaaatttctcaccagatgaaatccttgcaatgaccgcagtaggttggattcttaaagaatctaactccgaaacgatgaccattgaccatttcgagaccctttcgcttcatcgcacccttccttagacgattcttcatatagttgacgatatttgcttcgccagtgatctccagtagatttcctggacctttgccagctccagccgctggagccttggcccctggagcggcactgggcaccgagggagggagcacagtggcccccggtgtggcaacagcagccgcagccattaaaagataatgtcagggaattggatagctagtgaagagaaaaagctgactcagaccgtacggtttcaagcccgtctagaaactgacccggtcggtcaggtgaagaccctaaaagaagcaacttggaagccaacaaagtgcacacacaaagttgaaggcaagaaaatgacacagagtgatgcaaacgggcgacagtttggacttatgcaatagtgcataagacgtaatttcattcataaattttccaaatatgtatttgttcctagcttatagaaacctccttatccatatctcattatatttgtgtagactgaataaaaaatgtaatataaatacaacataatactgctcatacatatcaaaaaaaaaccataagagaaatgtttcagaaaaatacccttctgatttaaaattatttctgcacatgtaaagcagctaaaagaaaataaaatatgtgtgagtaaacacacgaatattaaacgttaattatgcacatatcaaagtgaataatattttatagcctctttattgcatgtttttttaattatttaaaatcggacatttgtggaactatttaccacaattaaattgtgcctttgttagcgtaaatcggtgttaaacaattgtgtaatatttgagactttgtatgattaatttctgtcaatttctaggtacttaatatatgtgtgcgcattttaaaagtcaaatttaatgcttttaaccatttcataacaatgaatgtcatgtccaaagcatccttactactagtccctatagatcttacacaagttgccatgcaaccatttgctctatgcctgggtaatcagcacttatccacgctgattcagttagttcggcagttagcccccatcgcaattgtcccccaggaaaaagcactcaacgacgtcccgtcaatcgaacggaggaccgaagagtgaaagccaagaactctcgtctttgggcccttaccagcgataagtgtaaacagcttgggaaaggtcaagaaggtgcttacctggccagaagacaaacataatcatcatcggagccattgctccggacaactgc

SEQ ID NO: 14054 - DNA, 2312 bp, DROSOPHILA
tgaaaccgtacggtctgagtcagctttttctcttcactagctatccaattccctgacattatcttttaatggctgcggctgctgttgccacaccgggggccactgtgctccctccctcggtgcccagtgccgctccaggggccaaggctccagcggctggagctggcaaaggtccaggaaatctactggagatcactggcgaagcaaatatcgtcaactatatgaagaatcgtctaaggaagggtgcgatgaagcgaaagggtctcgaaatggtcaatggtcatcgtttcggagttagattctttaagaatccaacctactgcggtcattgcaaggatttcatctggggctttggcaagcaaggttttcagtgcgaggaatgccgcttcaacattcaccagaagtgctgtaaatttgtggtgttcaaatgtcctggcaaggacacggacttcgatgccgactgcgctaaggtgaagcacggctggatttccaccacctacaccacaccgacattctgcgacgagtgcggactgctgctccatggagtcgcccatcagggcgtcaagtgcgagaattgcaacctaaatgtgcatcacgcctgccaggagacagtgccaccgatgtgtggtgcggacatcagcgaggtgaggggtaaactactgctatacgtcgagcttaagggcaataacttgaaagttgatattaaggaggcagctaacctcattcccatggataccaacgggtttagcgatccctatattgcagtgcaaatgcatccggaccgttcggggcgcaccaaaaagaagaccaagaccattcagaaaaacctcaatccagtgttcaacgagacttttacttttgagttgcagccgcaggaccgtgacaagcgtttgctcatcgaggtttgggattgggatcgaacttctcgcaatgatttcatgggatcgttctcgttcagcctggaggaactgcaaaaggagccagttgatggctggtataagtttctgtcgcaagtggagggtgaacattataacataccctgtgtggatgcctttaatgatatagctcgcttaagggatgaagttaggcacgatcgtcgtccgaatgaaaagcgtcgcatggacaacaaggatatgccgcataatatgagcaaacgcgatatgattcgagctgctgatttcaactttgttaaagttattggcaagggatcctttggcaaagtcctgctggccgagcgtcgtggcacggatgagctgtatgccgtgaaggtcctgcgaaaggatgtcattatccaaacggacgatatggagctgccaatgaatgagaagaaaattctagccctatccggacgtcctcctttcctcgtctccatgcactcatgtttccagactatggaccgattattcttcgtaatggagtactgtaagggtggagatcttatgtaccatatgcagcagtatggaaggttcaaggagtctgtggctattttttacgctgtggaagtggctattgctctgtttttcctccacgagcgtgatattatctatagagatctaaagctggacaacattttgctggatggtgaggggcatgtaaagctggtcgactttggattgagcaaagagggcgttaccgagcggcagaccacacgaaccttttgtggtactccaaattatatggctcccgaaattgttagctacgatccgtattccatcgccgctgattggtggtcttttggtgtattgcttttcgaattcatggcaggtcaggctccattcgaaggagatgatgaaactactgtctttaggaacataaaggacaagaaggcggtgtttccaaagcatttcagcgtggaggccatggatataataacgagcttcctgaccaaaaagcccaacaatagattgggtgcaggccgctatgccagacaggagattaccacgcatcctttcttccggaatgtggactgggataaggcagaggcatgcgaaatggagccacctattaagccaatgattaaacatcgcaaggatataagcaactttgatgatgcctttaccaaggagaagacggacttaactccaacggacaagctttttatgatgaatttggaccagaacgattttatcggattttctttcatgaatcccgagtttataaccatcatttaaaatggtctaaaaaaaagctttgagaaaagtttataggcttcttcgaaaaactaggcttttgcaagttaatttaccgaaatttatttattgtatccttcgctaaaagccatctaaatgttcattaaagctttaacgcttaaa

SEQ ID NO: 14055 - protein, 700 aa, DROSOPHILA
MAAAAVATPGATVLPPSVPSAAPGAKAPAAGAGKGPGNLLEITGEANIVNYMKNRLRKGAMKRKGLEMVNGHRFGVRFFKNPTYCGHCKDFIWGFGKQGFQCEECRFNIHQKCCKFVVFKCPGKDTDFDADCAKVKHGWISTTYTTPTFCDECGLLLHGVAHQGVKCENCNLNVHHACQETVPPMCGADISEVRGKLLLYVELKGNNLKVDIKEAANLIPMDTNGFSDPYIAVQMHPDRSGRTKKKTKTIQKNLNPVFNETFTFELQPQDRDKRLLIEVWDWDRTSRNDFMGSFSFSLEELQKEPVDGWYKFLSQVEGEHYNIPCVDAFNDIARLRDEVRHDRRPNEKRRMDNKDMPHNMSKRDMIRAADFNFVKVIGKGSFGKVLLAERRGTDELYAVKVLRKDVIIQTDDMELPMNEKKILALSGRPPFLVSMHSCFQTMDRLFFVMEYCKGGDLMYHMQQYGRFKESVAIFYAVEVAIALFFLHERDIIYRDLKLDNILLDGEGHVKLVDFGLSKEGVTERQTTRTFCGTPNYMAPEIVSYDPYSIAADWWSFGVLLFEFMAGQAPFEGDDETTVFRNIKDKKAVFPKHFSVEAMDIITSFLTKKPNNRLGAGRYARQEITTHPFFRNVDWDKAEACEMEPPIKPMIKHRKDISNFDDAFTKEKTDLTPTDKLFMMNLDQNDFIGFSFMNPEFITII

SEQ ID NO: 14056 - DNA, 5296 bp, DROSOPHILA
ggagcggctggtgccgctggcgctgccggagccggcggtgctggccccaccatcgaggaggtcgactaaaccattcacccccacacctcaatgcaaccatacagtaacagttctccaaacaatttaccaaccaaacacagtagaagagttgcttaaacaaacttggattctaaattaggaactcgccaaacatacaaacgggtcaaacgacaactgctccccgtagttcatttatataaattataaattcatactagaacaaaaccaaacacactgctccataatagtatatattatattattgtcatcgatcgatcatccaaactatttgcttgtacttgaattcaataaataaatttgagaattgcaaagcctgatttttcattgcgaaaatttgattttatttcagcttggtgaaatatgtatgtatattaatttgaccaccgcgtgtgtgccgatttctgataaaagatatcatgtgtactatatcttgtatcttacatggtaatcatatttaagtagacgcagagctgtgtggtttcccaattggagtagctgataaggagagataagagggcattgtttctagaacaagtgctgttttgttcgatataattggggtggaactgctttcgctgctttatctactaatcctatcaacaaaaaaaaacaatacagttttacttgtacaattattttgaggaaatatattaacattttgcttttttactaaaaaccatttgggttggggggtatttcagcatgcagctacgaagtagctcacttttctggtaatatctttgtgtacggaatagacgagattagtcactccattatagaatcatctagacttttttgtcggaattaaactgacgtagcagaaaaatctagaggctaatattaatataaacattttgagcggcatgatttcatcagatttttctgttgcgtgattgaaatctcttaaaatgtgtgacttcaatttacttgctagatgggcttaatccacccaggcaaagttgggatccttttcgggtttctgacccatcacagagcctatcaccggtagctcgctgttgttggatctgtacaggccaccacttatgctcttccgggcagggatacgacggttaaatacgtttcccgccgtcctgggcttgaagttgatgtcggcgtgcgattgaccggcgtccatttttacattggctcgcgaaccactcacctgctccaggtaggattgccactgctgcaatttgtcctctgccgctcgcagctgatctatgctccgctcgtggccaggatttattccgatgggctggatgccggcgatatctttcagatccaccttaattggcgccaacgctgagatggctcgcgataaaccgatttgtgagtgccgaatccgatgctccgttagatcggcgccgagcagctcctcgtgtggatccatgcgaatgggtataatcttgttgatcacatacagcagcaggaatgtggagcagacgccccaacaggctaagcataacgccgagagcgtctgaatgcccagcagataccagccgccacccttgaacaaaccactgcgtccgttggtcgtgtccagtgggatgggattatcagcaaacagtcccacggcaattacgccccaaatgccgcaaactccgtgcacagcactggctcccaccggatcatccacgcccatacgatcaaagagcggcatggccaggacgcaaaaaagcgagccaatggctccgattacgagagcttcccaggcgcggtacaggaaacacccggccgtaatggacactagggagccgagcactccattgatcagatccatgatgtccatgccgcccccatggcgccaaaaggaatagctatgaggtaacatgaaacccatatggcgctcattataaattcgaattaacttacatggagctggtgaatccgcctccaaatgatcccatcatggtcataacggcggctcgtgctgcgtactgccacttagccccactaacgccataggtgctgcccgagttgaaggccaaccagccccaccagaggacaaacagacccatacacgcgttgacaggattgcccagtggcagcggatcatatccctcggagtaacgacccagtcgaggacccaacatggcggccgaggcgaaggcggatgcgcctccaatcagatgcactggtccactgccggcaatatccacggcgcccagcttgttgaggaatccgtgctcgccccacacccaaccagcggggatgcagtacacagcggtgttcaggaaggagaacaggcagtatgccttaaagttgcagctggaaggatatacaacaagttagtcccaaagtgtttgatactgtttggtggtagaacaagacatgcttaggatttcgtccttcgtaacttcttatccctgtttgttgtgccgctgtatctagtagagatgtatcatggttactcaccgttcagccatggcgccgctgacaatggttgtggccgtggtggcgaacgacagttggaacaggaaggcggcaaaaatctgtcccatcagtgcatcgcccaccggtggatccagcaggaagtccccaatggcgatgaatggattggagagtgggccgcgaccgaagctcattccgtagccgaagagccagtaagtaaatccgcccagaacaatgtcgatcacgttcttcatcatgatgttcacctcgttcttgatgcttacacaaccggactccagcataccgaaacccgtttgcatggtgaagatgatgaaggaggaggtcaggacccagttggtgtcctcgacggagaggtcatacagaccgggaatcacatagttgctgtgattcctcggcgctcccactgtgccgttgttcatgtccgtttggttggtcgggcgattgaaaactgccaaaacggatagcaaatcgagtggcgaatacaaatacctagaacatgaatgttaaaaattacccgcatttgatttaaatgcaacttaatcgtcgctcagcaatcgtagattattcactatgcgtgttttttgcaacgccactaatctgttgttggtagcttacgacccttaaagttttaaacttgacactggggttgcatgcaacgagtgcattttgcaaaattaatgagcgtattttgagtgaattgaatttaactatcagtggaactccgagtgcggttggaatgcgccaataaattaaaatctattttaaactcgtgaagttttagttgacgtcttgtcggttgtccgacaagcattgcctatttttaaagattttaatatctcattcatgaaggaggtgactttattgaaatatgtaacaatttaagctagtatatctttaggctttcgttagtagttttccatcgaagatcactttgagatgtattattgcattagaaatgaaattaacatatgtacaaacagatacagtgacccctaatgcatagtttaggattcaaatacatattattattggatacatcattatattattataatattattatattattattgttttgagtattaattcttttagtacctaagcttaagcgaccgttacatttttcaagctaccgttaccaccaatcaccagaatgtttggctcagccctggaaccggttccttttcaccagccacgataacggtaccgagatcgccagccctggaacgcaatgtctgtgcgaaaactcccgttcggttcgtcgtcgtcggtggttgttggtattgctcgaacgttcgcaaaaaactgttggaaataattgttggatacaagttttgtggctaactgaacaagttttcattaattgtgccgtgctgagtgctaactaacgcgtgcaatatgtattttttggcattgcttgcgtttattggaaatgccaaaggtaacggttctaagtgggaaaaactggtgtgaaaaatttgatacacatacacacttatacacatgcgggaccatgcaatttcagccccatatcctcgtcataagtgaatatctgcaatcggtacaaggattaactccttgacagcgcacagcaaagacgtttttcatgctaaatctatttcgattccttggctccttctgcgataattggaaatatggtccatggccacacagctcgcaatttatgggacacgggccacacacacacatacactttggcagggcataccaacaccagcccacatgctcgctctttttctgcaaagcgaaagcatagagaagagagaggagagagagtgtgtgcgagaaaaggggacacagcataacggtttttgggtggggaaatggccatacgaaggaagtggcctgcaaaatttcactttgctctgcgctgaaagaaaagttcatgtgcttttatgttaatcaatgagagtattaatatttttttttgtaatatttaacttatttattttaccataagctattccagaaagataaaacgaaatcgtctaagttattttatttcgatttcatgagcctgtgtcgccaagtgtaacatacacaacgacatgcagtcctgtgtatgtggagctggtgggcggttgtttgggggtgtgtgcgtatggtgtttattttttgcatgtatacttgcctcgtctgtatgggtgtgaactgggcatgtgtttgactcgcgtgtatgtatttattgcacacacacacacactgagacgcgaatttcacttgggaactctcgaataaaaggcaaactttttttgtatgtgatatttttccaatttttttctttgcgggggcgtaacgcacgcctgtttgccattttcgttcgtgcgtttcctgcccagcaatttgctttcctgctgcaaacgcatgtaccaatacacatgtatgcagttcgtgtctgtgtgggcgggtgtgcatgtgtatttgtttttaatttgaatttcctttggctgtttagcatttaaatgatgtcgaaaatgctatgcgtttgcatttaatttcattcaagtgataaatattgtgctccttgcatccccctcttcccccgtcgcgcactctccgctgagagtatttacagcacctgctgcactgtggcattgcgcgtgagtgtgtatgtgtgatttggtggcccaatgctaaatcagcaaaggcgaaagttggtcaagtgtgtcaaaataaagaattcagctagaatcgggcgtgcattataggtgcaaaaatatgctttcgtagggattctattcaagcacatacatacatacatatgtatgtatgccctacaaggtccttagtaaagtattttctt

SEQ ID NO: 14057 - DNA, 1956 bp, DROSOPHILA
atgctgtgtccccttttctcgcacacactctctctcctctctcttctctatgctttcgctttgcagaaaaagagcgagcatttttttgcgaacgttcgagcaataccaacaaccaccgacgacgacgaaccgaacgggagttttcgcacagacattgcgttccagggctggcgatctcggtaccgttatcgtggctggtatttgtattcgccactcgatttgctatccgttttggcagttttcaatcgcccgaccaaccaaacggacatgaacaacggcacagtgggagcgccgaggaatcacagcaactatgtgattcccggtctgtatgacctctccgtcgaggacaccaactgggtcctgacctcctccttcatcatcttcaccatgcaaacgggtttcggtatgctggagtccggttgtgtaagcatcaagaacgaggtgaacatcatgatgaagaacgtgatcgacattgttctgggcggatttacttactggctcttcggctacggaatgagcttcggtcgcggcccactctccaatccattcatcgccattggggacttcctgctggatccaccggtgggcgatgcactgatgggacagatttttgccgccttcctgttccaactgtcgttcgccaccacggccacaaccattgtcagcggcgccatggctgaacgctgcaactttaaggcatactgcctgttctccttcctgaacaccgctgtgtactgcatccccgctggttgggtgtggggcgagcacggattcctcaacaagctgggcgccgtggatattgccggcagtggaccagtgcatctgattggaggcgcatccgccttcgcctcggccgccatgttgggtcctcgactgggtcgttactccgagggatatgatccgctgccactgggcaatcctgtcaacgcgtgtatgggtctgtttgtcctctggtggggctggttggccttcaactcgggcagcacctatggcgttagtggggctaagtggcagtacgcagcacgagccgccgttatgaccatgatgggatcatttggaggcggattcaccagctccatctattccttttggcgccatgggggcggcatggacatcatggatctgatcaatggagtgctcggctccctagtgtccattacggccgggtgtttcctgtaccgcgcctgggaagctctcgtaatcggagccattggctcgcttttttgcgtcctggccatgccgctctttgatcgtatgggcgtggatgatccggtgggagccagtgctgtgcacggagtttgcggcatttggggcgtaattgccgtgggactgtttgctgataatcccatcccactggacacgaccaacggacgcagtggtttgttcaagggtggcggctggtatctgctgggcattcagacgctctcggcgttatgcttagcctgttggggcgtctgctccacattcctgctgctgtatgtgatcaacaagattatacccattcgcatggatccacacgaggagctgctcggcgccgatctaacggagcatcggattcggcactcacaaatcggtttatcgcgagccatctcagcgttggcgccaattaaggtggatctgaaagatatcgccggcatccagcccatcggaataaatcctggccacgagcggagcatagatcagctgcgagcggcagaggacaaattgcagcagtggcaatcctacctggagcaggtgagtggttcgcgagccaatgtaaaaatggacgccggtcaatcgcacgccgacatcaacttcaagcccaggacggcgggaaacgtatttaaccgtcgtatccctgcccggaagagcataagtggtggcctgtacagatccaacaacagcgagctaccggtgataggctctgtgatgggtcagaaacccgaaaaggatcccaactttgcctgggtggattaa

SEQ ID NO: 14058 - protein, 651 aa, DROSOPHILA
MLCPLFSHTLSLLSLLYAFALQKKSEHFFANVRAIPTTTDDDEPNGSFRTDIAFQGWRSRYRYRGWYLYSPLDLLSVLAVFNRPTNQTDMNNGTVGAPRNHSNYVIPGLYDLSVEDTNWVLTSSFIIFTMQTGFGMLESGCVSIKNEVNIMMKNVIDIVLGGFTYWLFGYGMSFGRGPLSNPFIAIGDFLLDPPVGDALMGQIFAAFLFQLSFATTATTIVSGAMAERCNFKAYCLFSFLNTAVYCIPAGWVWGEHGFLNKLGAVDIAGSGPVHLIGGASAFASAAMLGPRLGRYSEGYDPLPLGNPVNACMGLFVLWWGWLAFNSGSTYGVSGAKWQYAARAAVMTMMGSFGGGFTSSIYSFWRHGGGMDIMDLINGVLGSLVSITAGCFLYRAWEALVIGAIGSLFCVLAMPLFDRMGVDDPVGASAVHGVCGIWGVIAVGLFADNPIPLDTTNGRSGLFKGGGWYLLGIQTLSALCLACWGVCSTFLLLYVINKIIPIRMDPHEELLGADLTEHRIRHSQIGLSRAISALAPIKVDLKDIAGIQPIGINPGHERSIDQLRAAEDKLQQWQSYLEQVSGSRANVKMDAGQSHADINFKPRTAGNVFNRRIPARKSISGGLYRSNNSELPVIGSVMGQKPEKDPNFAWVD

SEQ ID NO: 14059 - DNA, 10284 bp, DROSOPHILA
cttcgatgctccaaaatccgatcccatcgaggctgccgaggcggaggtccaacgggccatttacgaacatgccacggaagagtggtatcgcccacgtgatgagttcgatttcttggaggactaatcccattagattccctcctgtgaacaattgtacagtagtattaggttttatagaattaagctataatttccaattagtccttacaatacacatttaagaaacttcaaccgatcaagttaataactttcgatcattcttcgatcatatttcacacagaccttcaatctcactttaaacctataagtaatcaataattataaattaaatcataaaagcggcgttatgttaatgtaaatatagtccaacataatgcccgatttacggaaaaactgcagagcgaatgtaccttgaaatacttacgaacgcattgcggccattgagctgcgtacgatggtatttactagagttatgtatttatttattcaaatgatagctataaggataaccataaacgtggccataacataaaccccaaatcttttgatggacccctaaacgaaagcataggcgttctggaaaaatatttattgcaaaaatgtagtctgtatatttagaatgcttatgtataaaatagattttattgtatttaatacgttgatatattactgttgtttactctttatgtacacaagtgtacgatgataaattagatttataaattgtatttattttgtagaaaaggttttctgtttttttttttaagcaatttgaaggcatttaaggcacttcatttcagtttaaccatttaccacttaaggctagtgatagcattttgtctatcacacatttaaataaaatttctagtgttgcttagctagtcgcgtttttaatttcgtagtcgggcaaaggcagttgccagaattagataagttttaagtaaagcttgattttgaagcggttcacgaaggtaattggatagtcgaaactatttaatatacacagttgaaaagttgaaggctttaaagccacgctctattgccatcgagtttatcgaatcgtttgggtaaataataaaaaaatataagatgcctttacttacaattacataataataaattgcatacaaacagacttttggcttagaatgtcgccagagaaggaaatctagttccaaacggtatatataaattagatatataaattgtggaagcattttccatttttgtgattaaagctgaccatattttgccgtcagagcggtcggactaaccgcaaataaagagtaagtctatagacattaattaggtgacagagacaagaaacaggtagaaataccgcgccctaacttccaagttgcaagttgacgccaatcgaatactctgcgttgaacaaaacaaatacaaatatgatactattgatgcgcattgaaaatactaatcgtgagtgtcgcgttgtgtgctaataactaaaactaggatgctccaatgtccaaactgtccgtccaggcggcaatccgatcggatcagccactcgatacgggcacccaaagtagcttgtcctgctccttgtcgacggcatccttaatttgggtgcacatgtgcttgatactgacgccggggattacggctgcaggtaaatgagaaagcaattattcacattgaattgtgattaattaaaataaagttatacctgatatgtattgcttatagtcggtctcgagcttcatggcccgctcgtacatctccttggccgccttggctgagattttgtcggtgccaaagtcgcgaatatctcggatttgtttggcagacttaaagcgcagcaggaggacaattggatagatttgtaggcgctgcagacgctccacggcggaaatggaaacgtcaaggatgcagtggcgtcgatcctgtaagggatatttaatgaagatgtctgaaaatttctggagtttacctacatttttgcaggcattgctaatcgcctcaacggtggtgcattcaaacttgttgcccctccgccgataatccacaaagatgttttcttttagaccctcctccatggcctcctgcgaacagtccatggccgtcacctcgcacagtttgaagaggttggagaagtcaattgtaaggcgaaccatcagacactcggacaacggtccgataatcagcacgggccggcgaatgggtgctaaaagattgtgtttacattaacttacttcttttagttttcataaaaaatgtacgtacaatctaaaagctctacacgctggtagctaagggctccaccatcatcgttgagcagacctaagtctggaaagaagctaagctgtgtgttgctgaaactggcaatctccgtggagtcgcgggacgagctgcgctggtttttcttgcgacgaaaaaatgatcttctggccgaagtgctgccgcgtctggccgttcccgtatcacagtcgaccacctcacccgaacgcagttcctcctccaccctgcaattatatataaatatgtgcaactaattcaaacttaagtaatttgccaacgtacttcatttgactgggtattatgccgcactccttccgatggcccatggcatccagcttccaggctcgccacaagccaaaggtgccattaaaaaccgtattgtccacgtagagcacctcgtccttaacaaagcgcaaatcgtcctcgttcaactcaccagtccggtcaaaccccacgcgaatataaaaggagtcgccaggctcgtctttaatttgctttagggctgtagggaatacattatatcataatcataatcaacgaaagaattcaccacttactgtgtaacttattctgtaccaacatggtgaccgtatccgtaagctttgaaatctcattggccgcctgctcagcggtgactccgctcaaatctacaccattgtattccagtatttgatcgcctttgcgaattccagcatgatcagaaggcgatcccaccgcgacgtcatgcacatatatgccaactttattgcccccaaatagcttgatgcccaggttctttgacttgtccatgtgcagagtcacataccttagagctggaattgaaagtccaagtcatatcatgtgcaaaatacgaaagattgacggctttgttagtagggaagaagctgcgatacataatgtgtttgtgaaactaacgctcatacacttccgttttagaatttacagattttgggagttaaaatatttcgagccattttatctaaaatccttgttctttacggccctgagaatatgtacctgatacagccggaaactcttcctgctgcacggttaccttctccgtcgaaggcacgaattatggggaaatgctactatcccgggagtgtggttagtagtgggtgtagagtggtggctacgtactctctgctggaacggatgcaggtggcggcggcaaggatggcttaggttcctcatcatacaccgttgacgtggctgaggcagtcgttgtggtggtggtggccgccgatgaaggcatgtcctggctgctgctgatatccgactggttctcaaggctatcggtgaagctctggtccttaatcgactgatgcgacagcggagcccttgagccgggtctcgttgaaggagcctgcggctgcatcggcaacgggaaaagcgagttgcgggcaggaggacggggagagttgcgcggagtcggggagcccgaatgattgatgggagattctggttccaaattgtgcgctccctcgtactcaattgaagggaactctgcaaaaaaagtaaacagcacaattagaatgggatgagtatacggactgaccgataaacttactctccggattgtactgaacgagcattgtaaaggagtcgccgcactgccgcagcacattggcagcaatctcctgcgtggccgcccgcatgttaatgccacatacttccaagagttgatcgcccacctggagaccggcacgcatcgccgtgcttttgtcagcgacggttgacacaaatattccgccgccgttgttgttgcactgaatggtgatacctagcgacttgtcgcgcttgtcgatggtgactcttctaaggtctccggggcagagaaaatccgcaggcacattggagttgcgcttgccacttccgccgcctccatggctaaggacttccacatggacctgcggcatgggcgaaccgcggccacttcctcctccaccgcctcctccaactcctatgctcgatccagttccatttcctcctgcaatatttgcaccgtaactgttgtgaatactagagctcatcagtgacataggtgcacgatctgaagacgaggctgacatggatccaccagagactggccccgtgctcgtcacataatgatggtcgatgctgccagagctattcttcaccatactgctgcttttgctagccacactgggattagatggaatccttaatcgctgattgtctttcttgcgcgggaatgttccgccttcatagatagctccgccaactcccgagactccaccgcccacccccatatagggacctatccctagaccgtgcccgtaatccaagtaaggagcatggggatggggatgtggatgtggcattgcgttggtctgcgtgtgatggtgcggatggtagtccagatcagtgggtattccaacgctgtcgtgcggtgccgtcgccgcaggtagctgttgcaactgctgctgaggcggtggtgaaggtagggttaatggactggatctccggttaccccgaccaccgggtccaaaagtggggaagagctgcgtgtgtctatttcccggcatatggttggactgaagaaatccaccatatcctccgtgaacaccggaaccaatgctctcgctatcactcgggtacttcggcacatgccttaccgcctgtggcacatggcgcttggcgtacatcccgtattcgctgatagcgggactcttagcagacagtattgactctatagaattctgcgatttcagggacacaacgtccggcggttgtccaacgggcggcgggtgactgcccctggtcggatgaagcggcatgaacatattggatccggagctgtttttgggcagtggaggcggatggaagacgtcatagacctgctgtttgcgcactggaaactctccggccgccggacccgtaccaccgaccattgatcccgatcctactccaaagcccgccgatgtcgatgaggcgttcattacttgctgctgggcctgctgaccactggtcttgggctgataaaaatctccgctgggcgtgatatttaacgacaggcgatggttactatgcggcctggttccgtagcgctcctgtgaaggcattttaaccctggcattggcgcccatcagaggggctcgctggatcggcttttggttaatctcctcggcagtcacaccgtatagcgaatgcctcggatgtgtgggataactagtgttgggcattccattgggtggtccggggggaaacagtgccgagactcccgagctcaccggattagaattgcggtttggatgcgtctttatagctcctccgttcgatccccgaatgtgggccagtggcttggacatttgcgggggcagcggtggaggcaactgatcctggatcaacgctgctggctgcttttctggcactccaacctcgcccatcagctcgtcatccttgtccacatttatgggaccggctgtaaaaagcgacatcagagcacgcttcttctcattgccgcgcatggtgcccgttgggttttcatgcgagatgttggtccgcggccaggtacccatgctcttggaggcctctttctccttcttggtccgcttcttgcggttgaacagattctccttgctcttctcagagctgttttcactgagcacagaatccaaagcagcgatggcgtcgtcgtgctcctgctcaaagttatcctctggtgtgcctggtttgctgaacttaagctttcggaagaaaaattccgcgaacctggacggatgtttggtggcgctactgggcccacttcctccacctcccccggcacttgagacatgctgcatggagtcaatggaatctgtctgcgccgacgaggtggtcattcccgggggtaactgatcctgtacgtatttaagggcaaacagattgagcccatcgcttcggggatcattcatcaactgcatcacttcctcgattgactgcactgagtccatagacttgttgttaatgcttaacactcggtcgccaacgtccagctctggttcgtagaaggctagcgaattttgctcgatctttgcaatgaacactcccatgtccagttgcaggccatgcgggcaatccctatccctagtctttagctgaacagaataggcgtgccgtttgctgtgacgagttcgggaaacgagcaggagggaacgaggagcacaggcgcggatctcatcaagaaccatccgtttcgacaaagactggcagtccaagttgttcaccttgcagatcacatcgttaatcttgagcttcccgcaggcgggggaactgctggtaacgccacacactaattttcgcttgttgctgtcatccaggatgatgcccaggtcggacgtgtgctcgtagccggacagctctacttccaggagatcctcaccttcgtaactgcttgggcggaaactgcgtcgggatccggaggcgttactgtcaagattttggcgctcttgctgctccatttgttctttcaacaagtcgatctttttctgcgcttcgtccttctgctttttaatcttttcgctatcccggatggccatcagcgagtcggagatggctttatctctctcgtggcgcattttatcacagagcgtcttcaccgaatcccgctcctgcacgatcttctcacgttgcgatatggcccaatcccttacgcgcttcgcttcttcggcatcctggcttgaacgctccacctccgagagggccttttctaagctcttgcgcagcttttccagttccttgctgttctccagctcctttccactcggaaattctttggaccacgagctatcgcgagactttagaagatcgcgctttttaaggtccgcattggccagctgtagaaccttgatttcagccctggcaagctgttcgtcctttttgagcctctcaatttctttgttggccagaaccagatcgtcggacatcttctggtgctcctgcagcacgttgtccttctctgagagcagttgattaagctcctcggtaagggaaagcacattcttactctcctgggagagaagaaccttcagtttctgattttcatcgcctcgctcccggtagtagttgcgatccttttcaagctcgatgtaggacttcttgtacttctccctctccacggcgaccatatttcgctctttcttcagttcggccagcttctcactgcagcttccatcgcatccctgcgtcttgccaaaataataaggattcccactgccgactggcggcacttggctatttccattctgggcctgctggctctgttggttttgggtctccaatagcagacgcttgaaacgggcgctctcctccaccatatcggtgaacttgttacgatcggccacgtaatgctcctggtacagagttaactcggtggctaactcatcgcatcgcctcttggtgttcgcatgctggtggcgtagggtatttagctccaaaagtgcggacttgtactgcgcctgcagtatatcgtaatttgcgccgtttccaccagaaatgcccgacacgcccacaccgctactgacgcccttcgagggcccgttgttgttggacatgttggcagctgtggtgctgccgctggaattggacggcggtcgtagggtattatcatagcccacatactccgagctctcttctaaaattaaagacgctatgggtaggtactttaaatgaatacggcgtcttaccttcctggctactcgtactagtcagcgatagatctccagatgccatcttcgccatcacagcatctttaggtaatacttaacataagggtatgctgatgagtaaaagtacaaaagattaattaggttcgtgctaaagttaaagttaagcgaggttccaggctgtctaactaatttgtttagcgtaatgcattctgctttccaattggggtttggttttttctttgatatggagttcgttcatcttatccgtttatttattaatttttagaaaatttatttttggtttatacaatttttttttaaacatccaaaggtgaggattcaaacttttaccttttaaccttttatctaaaataaactgtaactttttgttaactttactagtaatactattttgaccattgctgtattttttgaagtgtgcgagtaagtatgaaaagcaaggcattggaaaaacgaaactttcacaatttttgtgaaaccgcgattttcacaatcgaacgaatcgaatttaaatacaaccgcaatggggaatgagaaaatgggcgggagtgggcgtgggtaggcagtagggagaatggggataggtggcgaagtgtagaaaaaagggaagttacgcagtttttggtaactcttacaaacggctattgcttgcgaaaatgaaatgtgtggcaattaagcagtcgagttaaagcatcgagactaagctaaagaattaattgaagcagccgagcagaaagcgtaaattaatagcaacatgtatgcacacacacacacacttaccgaaacaccaacacactcgcaggcgggcaaaacaagttggccgaatgaaagagaagaaaagctggcgaacacacaatggtggaaagcactgcgagttatataaaccctttttttccttgattggagtttatcttggcccagcagcacgcctatttgtccaaaaaataggaaaatatagcgtattttcctttacatcgaaaatcttattacgcacactcacacacacgcacgcgaacgcaacagctgaatgggcgcgcgaaagagaggggacgagctccaccccaattccagccctgcgggaaagagagggagagatgcaacaggcggacgttgaacgggacaaccgacgacttttaccgttttcgctcgcgcatccggattccggaagttgagtttcttggatcgttgggcgaaaagtcaacctctacggtgcacgacactcttggaagaacactgcgacgaaagcgatgacgaatggccaacgaaaattgaacgaaatgaaataaaaaaaaacaacacaacttcttcactaaaacgtcaccagtgtgaccgcggagtgaccgataaataatacactctgtctctttagacaatattaaaatcgatagtattgtttaatatcgattcattagcccagctttcttaaaaaacaaataaatcccgaatgtaaaatgtacatataagatcattccttctatatcggaactgccgctcctctttacgaacggctggcagcgctgtatatgtgtactaagtgggagtgtgtacacgctaagttggcgcgcaatcgtgctggaagtgtcttcgcttagcaatgttccaaacccattagaaaacttgggagattttaatcaaatataatgatattattacacaatatttagttcaaaccgttgttgtttattttgttctttgtaatttttaatactttttgcaactgctgcactttgcgcaagttgcacgcactaacaaccttttggaaaatggccaagccagggcgagcaaaatttttattcattaaaagtaaaataatacccaagaagttggtcaatttgcagggcaaaagagatcgaaaaaaggtagtcaacgatgcgagcgccaagaaggttgcaacttccggcgaaagccacataactagtataatgagcatcccgagtcatagtacggattccgatgagcgtatcgcatccaccgcgccaagtgtctggagtacttcagtacccatacccattccttcctcccaacgaggaatgcccaaacagaatgttcgcagatcggtggtctccataagctcgttaccatcgaaaaagtcaagtagcgcagttaaaaggaaattatcttatatagaagaacagccgtttcatttatataagcttaggaaactcgaagccagcgcggaaactcagcttaaaatagttcattcacatccgcacttaactagttctacggacagcgtggaggaggcgaccaatcagagtgatggcgataaaatggactcggaattgggaaataccacggatcacgaagaccaaatgagtgtatcctccga

SEQ ID NO: 14060 - DNA, 6863 bp, DROSOPHILA
tcacactggtgacgttttagtgaagaagttgtgttgtttttttttatttcatttcgttcaattttcgttggccattcgtcatcgctttcgtcgcagtgttcttccaagagtgtcgtgcaccgtagaggttgacttttcgcccaacgatccaagaaactcaacttccggaatccggatgcgcgagcgaaaacggtaaaagtcgtcggttgtcccgttcaacgtccgcctgttgcatctctccctctctttcccgcagggctggaattggggtggagctcgtcccctctctttcgcgcgcccattcagctgttgcgttcgcgtgcgtgtgtgtgagtgtgcgtaataagattttcgatgtaaaggaaaatacgctatattttcctattttttggacaaataggcgtgctgctgggccaagataaactccaatcaaggaaaaaaagggtttatataactcgcagtgctttccaccattgtgtgttcgccagcttttcttctctttcattcggccaacttgttttgcccgcctgcgagtgtgttggtgtttcgcatacccttatgttaagtattacctaaagatgctgtgatggcgaagatggcatctggagatctatcgctgactagtacgagtagccaggaagaagagagctcggagtatgtgggctatgataataccctacgaccgccgtccaattccagcggcagcaccacagctgccaacatgtccaacaacaacgggccctcgaagggcgtcagtagcggtgtgggcgtgtcgggcatttctggtggaaacggcgcaaattacgatatactgcaggcgcagtacaagtccgcacttttggagctaaataccctacgccaccagcatgcgaacaccaagaggcgatgcgatgagttagccaccgagttaactctgtaccaggagcattacgtggccgatcgtaacaagttcaccgatatggtggaggagagcgcccgtttcaagcgtctgctattggagacccaaaaccaacagagccagcaggcccagaatggaaatagccaagtgccgccagtcggcagtgggaatccttattattttggcaagacgcagggatgcgatggaagctgcagtgagaagctggccgaactgaagaaagagcgaaatatggtcgccgtggagagggagaagtacaagaagtcctacatcgagcttgaaaaggatcgcaactactaccgggagcgaggcgatgaaaatcagaaactgaaggttcttctctcccaggagagtaagaatgtgctttcccttaccgaggagcttaatcaactgctctcagagaaggacaacgtgctgcaggagcaccagaagatgtccgacgatctggttctggccaacaaagaaattgagaggctcaaaaaggacgaacagcttgccagggctgaaatcaaggttctacagctggccaatgcggaccttaaaaagcgcgatcttctaaagtctcgcgatagctcgtggtccaaagaatttccgagtggaaaggagctggagaacagcaaggaactggaaaagctgcgcaagagcttagaaaaggccctctcggaggtggagcgttcaagccaggatgccgaagaagcgaagcgcgtaagggattgggccatatcgcaacgtgagaagatcgtgcaggagcgggattcggtgaagacgctctgtgataaaatgcgccacgagagagataaagccatctccgactcgctgatggccatccgggatagcgaaaagattaaaaagcagaaggacgaagcgcagaaaaagatcgacttgttgaaagaacaaatggagcagcaagagcgccaaaatcttgacagtaacgcctccggatcccgacgcagtttccgcccaagcagttacgaaggtgaggatctcctggaagtagagctgtccggctacgagcacacgtccgacctgggcatcatcctggatgacagcaacaagcgaaaattagtgtgtggcgttaccagcagttcccccgcctgcgggaagctcaagattaacgatgtgatctgcaaggtgaacaacttggactgccagtctttgtcgaaacggatggttcttgatgagatccgcgcctgtgctcctcgttccctcctgctcgtttcccgaactcgtcacagcaaacggcacgcctattctgttcagctaaagactagggatagggattgcccgcatggcctgcaactggacatgggagtgttcattgcaaagatcgagcaaaattcgctagccttctacgaaccagagctggacgttggcgaccgagtgttaagcattaacaacaagtctatggactcagtgcagtcaatcgaggaagtgatgcagttgatgaatgatccccgaagcgatgggctcaatctgtttgcccttaaatacgtacaggatcagttacccccgggaatgaccacctcgtcggcgcagacagattccattgactccatgcagcatgtctcaagtgccgggggaggtggaggaagtgggcccagtagcgccaccaaacatccgtccaggttcgcggaatttttcttccgaaagcttaagttcagcaaaccaggcacaccagaggataactttgagcaggagcacgacgacgccatcgctgctttggattctgtgctcagtgaaaacagctctgagaagagcaaggagaatctgttcaaccgcaagaagcggaccaagaaggagaaagaggcctccaagagcatgggtacctggccgcggaccaacatctcgcatgaaaacccaacgggcaccatgcgcggcaatgagaagaagcgtgctctgatgtcgctttttacagccggtcccataaatgtggacaaggatgacgagctgatgggcgaggttggagtgccagaaaagcagccagcagcgttgatccaggatcagttgcctccaccgctgcccccgcaaatgtccaagccactggcccacattcggggatcgaacggaggagctataaagacgcatccaaaccgcaattctaatccggtgagctcgggagtctcggcactgtttccccccggaccacccaatggaatgcccaacactagttatcccacacatccgaggcattcgctatacggtgtgactgccgaggagattaaccaaaagccgatccagcgagcccctctgatgggcgccaatgccagggttaaaatgccttcacaggagcgctacggaaccaggccgcatagtaaccatcgcctgtcgttaaatatcacgcccagcggagatttttatcagcccaagaccagtggtcagcaggcccagcagcaagtaatgaacgcctcatcgacatcggcgggctttggagtaggatcgggatcaatggtcggtggtacgggtccggcggccggagagtttccagtgcgcaaacagcaggtctatgacgtcttccatccgcctccactgcccaaaaacagctccggatccaatatgttcatgccgcttcatccgaccaggggcagtcacccgccgcccgttggacaaccgccggacgttgtgtccctgaaatcgcagaattctatagagtcaatactgtctgctaagagtcccgctatcagcgaatacgggatgtacgccaagcgccatgtgccacaggcggtaaggcatgtgccgaagtacccgagtgatagcgagagcattggttccggtgttcacggaggatatggtggatttcttcagtccaaccatatgccgggaaatagacacacgcagctcttccccacttttggacccggtggtcggggtaaccggagatccagtccattaaccctaccttcaccaccgcctcagcagcagttgcaacagctacctgcggcgacggcaccgcacgacagcgttggaatacccactgatctggactaccatccgcaccatcacacgcagaccaacgcaatgccacatccacatccccatccccatgctccttacttggattacgggcacggtctagggataggtccctatatgggggtgggcggtggagtctcgggagttggcggagctatctatgaaggcggaacattcccgcgcaagaaagacaatcagcgattaaggattccatctaatcccagtgtggctagcaaaagcagcagtatggtgaagaatagctctggcagcatcgaccatcattatgtgacgagcacggggccagtctctggtggatccatgtcagcctcgtcttcagatcgtgcacctatgtcactgatgagctctagtattcacaacagttacggtgcaaatattgcaggaggaaatggaactggatcgagcataggagttggaggaggcggtggaggaggaagtggccgcggttcgcccatgccgcaggtccatgtggaagtccttagccatggaggcggcggaagtggcaagcgcaactccaatgtgcctgcggattttctctgccccggagaccttagaagagtcaccatcgacaagcgcgacaagtcgctaggtatcaccattcagtgcaacaacaacggcggcggaatatttgtgtcaaccgtcgctgacaaaagcacggcgatgcgtgccggtctccaggtgggcgatcaactcttggaagtatgtggcattaacatgcgggcggccacgcaggagattgctgccaatgtgctgcggcagtgcggcgactcctttacaatgctcgttcagtacaatccggagaagttcccttcaattgagtacgagggagcgcacaatttggaaccagaatctcccatcaatcattcgggctccccgactccgcgcaactctccccgtcctcctgcccgcaactcgcttttcccgttgccgatgcagccgcaggctccttcaacgagacccggctcaagggctccgctgtcgcatcagtcgattaaggaccagagcttcaccgatagccttgagaaccagtcggatatcagcagcagccaggacatgccttcatcggcggccaccaccaccacaacgactgcctcagccacgtcaacggtgtatgatgaggaacctaagccatccttgccgccgccacctgcatccgttccagcagagactctaaggtatgtgactctgcacatggacaagtcaaagaacctgggcatcaagctatttgggggcaataaagttggcatatatgtgcatgacgtcgcggtgggatcgccttctgatcatgctggaattcgcaaaggcgatcaaatactggaatacaatggtgtagatttgagcggagtcaccgctgagcaggcggccaatgagatttcaaagcttacggatacggtcaccatgttggtacagaataagttacacaccctaaagcaaattaaagacgagcctggcgactccttttatattcgcgtggggtttgaccggactggtgagttgaacgaggacgatttgcgctttgttaaggacgaggtgctctacgtggacaatacggtttttaatggcacctttggcttgtggcgagcctggaagctggatgccatgggccatcggaaggagtgcggcataatacccagtcaaatgaaggtggaggaggaactgcgttcgggtgaggtggtcgactgtgatacgggaacggccagacgcggcagcacttcggccagaagatcattttttcgtcgcaagaaaaaccagcgcagctcgtcccgcgactccacggagattgccagtttcagcaacacacagcttagcttctttccagacttaggtctgctcaacgatgatggtggagcccttagctaccagcgtgtagagcttttagattcacccattcgccggcccgtgctgattatcggaccgttgtccgagtgtctgatggttcgccttacaattgacttctccaacctcttcaaactgtgcgaggtgacggccatggactgttcgcaggaggccatggaggagggtctaaaagaaaacatctttgtggattatcggcggaggggcaacaagtttgaatgcaccaccgttgaggcgattagcaatgcctgcaaaaatgatcgacgccactgcatccttgacgtttccatttccgccgtggagcgtctgcagcgcctacaaatctatccaattgtcctcctgctgcgctttaagtctgccaaacaaatccgagatattcgcgactttggcaccgacaaaatctcagccaaggcggccaaggagatgtacgagcgggccatgaagctcgagaccgactataagcaatacatatcagccgtaatccccggcgtcagtatcaagcacatgtgcacccaaattaaggatgccgtcgacaaggagcaggacaagctactttgggtgcccgtatcgagtggctgatccgatcggattgccgcctggacggacagtttggacattggagcatcctagttttagttattagcacacaacgcgacactcacgattagtattttcaatgcgcatcaatagtatcatatttgtatttgttttgttcaacgcagagtattcgattggcgtcaacttgcaacttggaagttagggcgcggtatttctacctgtttcttgtctctgtcacctaattaatgtctatagacttactctttatttgcggttagtccgaccgctctgacggcaaaatatggtcagctttaatcacaaaaatggaaaatgcttccacaatttatatatctaatttatatataccgtttggaactagatttccttctctggcgacattctaagccaaaagtctgtttgtatgcaatttattattatgtaattgtaagtaaaggcatcttatatttttttattatttacccaaacgattcgataaactcgatggcaatagagcgtggctttaaagccttcaacttttcaactgtgt

SEQ ID NO: 14061 - protein, 1916 aa, DROSOPHILA
MAKMASGDLSLTSTSSQEEESSEYVGYDNTLRPPSNSSGSTTAANMSNNNGPSKGVSSGVGVSGISGGNGANYDILQAQYKSALLELNTLRHQHANTKRRCDELATELTLYQEHYVADRNKFTDMVEESARFKRLLLETQNQQSQQAQNGNSQVPPVGSGNPYYFGKTQGCDGSCSEKLAELKKERNMVAVEREKYKKSYIELEKDRNYYRERGDENQKLKVLLSQESKNVLSLTEELNQLLSEKDNVLQEHQKMSDDLVLANKEIERLKKDEQLARAEIKVLQLANADLKKRDLLKSRDSSWSKEFPSGKELENSKELEKLRKSLEKALSEVERSSQDAEEAKRVRDWAISQREKIVQERDSVKTLCDKMRHERDKAISDSLMAIRDSEKIKKQKDEAQKKIDLLKEQMEQQERQNLDSNASGSRRSFRPSSYEGEDLLEVELSGYEHTSDLGIILDDSNKRKLVCGVTSSSPACGKLKINDVICKVNNLDCQSLSKRMVLDEIRACAPRSLLLVSRTRHSKRHAYSVQLKTRDRDCPHGLQLDMGVFIAKIEQNSLAFYEPELDVGDRVLSINNKSMDSVQSIEEVMQLMNDPRSDGLNLFALKYVQDQLPPGMTTSSAQTDSIDSMQHVSSAGGGGGSGPSSATKHPSRFAEFFFRKLKFSKPGTPEDNFEQEHDDAIAALDSVLSENSSEKSKENLFNRKKRTKKEKEASKSMGTWPRTNISHENPTGTMRGNEKKRALMSLFTAGPINVDKDDELMGEVGVPEKQPAALIQDQLPPPLPPQMSKPLAHIRGSNGGAIKTHPNRNSNPVSSGVSALFPPGPPNGMPNTSYPTHPRHSLYGVTAEEINQKPIQRAPLMGANARVKMPSQERYGTRPHSNHRLSLNITPSGDFYQPKTSGQQAQQQVMNASSTSAGFGVGSGSMVGGTGPAAGEFPVRKQQVYDVFHPPPLPKNSSGSNMFMPLHPTRGSHPPPVGQPPDVVSLKSQNSIESILSAKSPAISEYGMYAKRHVPQAVRHVPKYPSDSESIGSGVHGGYGGFLQSNHMPGNRHTQLFPTFGPGGRGNRRSSPLTLPSPPPQQQLQQLPAATAPHDSVGIPTDLDYHPHHHTQTNAMPHPHPHPHAPYLDYGHGLGIGPYMGVGGGVSGVGGAIYEGGTFPRKKDNQRLRIPSNPSVASKSSSMVKNSSGSIDHHYVTSTGPVSGGSMSASSSDRAPMSLMSSSIHNSYGANIAGGNGTGSSIGVGGGGGGGSGRGSPMPQVHVEVLSHGGGGSGKRNSNVPADFLCPGDLRRVTIDKRDKSLGITIQCNNNGGGIFVSTVADKSTAMRAGLQVGDQLLEVCGINMRAATQEIAANVLRQCGDSFTMLVQYNPEKFPSIEYEGAHNLEPESPINHSGSPTPRNSPRPPARNSLFPLPMQPQAPSTRPGSRAPLSHQSIKDQSFTDSLENQSDISSSQDMPSSAATTTTTTASATSTVYDEEPKPSLPPPPASVPAETLRYVTLHMDKSKNLGIKLFGGNKVGIYVHDVAVGSPSDHAGIRKGDQILEYNGVDLSGVTAEQAANEISKLTDTVTMLVQNKLHTLKQIKDEPGDSFYIRVGFDRTGELNEDDLRFVKDEVLYVDNTVFNGTFGLWRAWKLDAMGHRKECGIIPSQMKVEEELRSGEVVDCDTGTARRGSTSARRSFFRRKKNQRSSSRDSTEIASFSNTQLSFFPDLGLLNDDGGALSYQRVELLDSPIRRPVLIIGPLSECLMVRLTIDFSNLFKLCEVTAMDCSQEAMEEGLKENIFVDYRRRGNKFECTTVEAISNACKNDRRHCILDVSISAVERLQRLQIYPIVLLLRFKSAKQIRDIRDFGTDKISAKAAKEMYERAMKLETDYKQYISAVIPGVSIKHMCTQIKDAVDKEQDKLLWVPVSSG

SEQ ID NO: 14062 - DNA, 2309 bp, DROSOPHILA
tatataaaggcctctaaagcctcgtcttatacattcacgattcttgcaaagccgcacaatgaagctaagcacttatctattggcgctcgtcctattcgccggattctgcctgctgcagccttcctcagcccagaccaattccaccacatccaccaacaccacaaccacggaggcaaccacaaccaccactgccaaggccacaaccgttcataggaaacattttacgatccgtaatctccactataagacagtgcgcaggatccatgttaacaagaaatctggttaataagatctttagcttaccaaacaatggcgaataaaaaatacctaaagaaaacacatttctaataatgggcacaacaatttatacttctacatacagatctttttgtctttctgtttataagtgtgttttttatgaacatactttagttctcatttagtttactttctacgcatttgtttgccaagttcatggccaagttccttaggttttgactgcttagatatagcataataaatgaagtcaataaacgaaatggggctgctattctaagctagaaacatctatttattccaatcgtagcattgaacaaaatctactttgagaacacctttggctttcattggttcgccctttacggggataaccaatatctttaactagctttagtatctgtgattaagaataaaaatcctgactagttgttgtaccagatttcaagtcgaaacaatccagaaaacgtttatttcagcagtaagcctaataatatacaacatttctacaataggctacttgtatatttttctatttaggtttaaagcaacaaaagttatacggtcttttctctctattagatgactacaccggcttttatctgcggattttcattttccttcgacgcaccaaaaaatcatactataacatcaaataataaattcttgtccaggttccatctttcagtggtgggtcgtcctaatccttcagcattttccgttcttacttgcccgcatcgttcatgttcttgggcagactcaacaaggagttgattagctccgagttgcgcttcctgatgggcacggatgggcccaaggagttctcgaggatcagcggatagcgacagagagtggccacttggccgggactgaactgtcccacgcccacgttgttgaaccagtcgaggagatcccgattgtactccttgcgcacatagcgctcctcatccggcatggccatggcgccgcagtatccccactggcagcaaatggccagaagcacaagggcgacaaggtacgtgtagcgagccattagtccgaggagctggaaggatggccaggagcaggaactgagcacggaacacctgcagcaggagacttgcgaatgaacgtcggttggcgcatcctcgacttatatagcaacctggactggataacccactgcgggagaccgcccgaccacgcaacccaagagcgtcagtatcggtgtcatccgcaggaccaatacatgtcatccgcaggcagcggcggtcctttagcccaggcaaatacggagtcgagttggagccacgcaaatatttggttatgcagtgttttatgtgccaacatgcaggcaccaaatcccattcaagtccagcgatatttgtacgggaaggcagctcactggcgactccatgtggcactcaaaaaaaaggaggatacccaatttaggcacttctttaaaccaacttatttattggatttaaataatatacgattgcagacaaaattgctgaccttccattaaaacgaaccttatttgtgaataatattttgctcaattcgttttctctctgtgtaattgtgtgattaattttagaacgaagctcgtaaaaataccaatcttaaatatatataaaacttaatagctagctcggcagttgggccgttttgcgaaattccagcttgttcctttgtttgatcaccaaactgtgtaaatatggccaaaaaatttcgcgcggacgtaattggcgagagcaaaatgcaaatatttgctgagaaattccgccaattgtcttggtcacatataaaactcccagcctccgaagtggtagttcatccgagcaacggcatcaccgagcacaccatgaagacaggacaactggcactccgaatcctagcgataagcctatgcatttgggcaaccaacgcctcatcgccaaccaccacggagactacgacgaccacgacggacagtgacaccaccaccacgacgacagcagccaccacgaccaccaccaccgcgtcctcctcctcctcctcctcctcctcga

SEQ ID NO: 14063 - DNA, 309 bp, DROSOPHILA
atggctcgctacacgtaccttgtcgcccttgtgcttctggccatttgctgccagtggggatactgcggcgccatggccatgccggatgaggagcgctatgtgcgcaaggagtacaatcgggatctcctcgactggttcaacaacgtgggcgtgggacagttcagtcccggccaagtggccactctctgtcgctatccgctgatcctcgagaactccttgggcccatccgtgcccatcaggaagcgcaactcggagctaatcaactccttgttgagtctgcccaagaacatgaacgatgcgggcaagtaa

SEQ ID NO: 14064 - protein, 102 aa, DROSOPHILA
MARYTYLVALVLLAICCQWGYCGAMAMPDEERYVRKEYNRDLLDWFNNVGVGQFSPGQVATLCRYPLILENSLGPSVPIRKRNSELINSLLSLPKNMNDAGK

SEQ ID NO: 14065 - DNA, 2837 bp, DROSOPHILA
cccacccactgaactctaccgcccactaccgcccactccgccaaccatttttgaatatttccgttttggctggcagttttcggttttcggcttgtctacaaaatgcagttttgcatgcactttggcctcggcgcaaaaagtcaaccgaaaagagacaataataagtgcagagcacaaaaggacgaacccgaaaaaagggaaagagcagcataaaacgtcgaaaaagtagagccaagaacatgaaaacggaaaattgcattgcgctcagaagtatgctatgcttttttcgcttgccttatcaacgtctcaaatcggttagggttgataggaaaagcggaggggcgcaagcgggttactggcaaaacttagtccagatagcgaaatgttgtcgcccaacaggacctggacgtattttacgtattttagttgcctgcagcacacgcaaaaaaaaatgaagaatacaatgcaacccaaagactttaagacagttcgagttgcagtcgtgggcggttccatgcgagttgtggccactgaaattggttgcatgtttcaggggaacagacctttaccacatgagtgctgttcaaaactgctcaaacctttacagacaacaccaataaagctcaatcccttcaggccaaacaagttcgacccagcctcgtcgagctcgcaacttgtttggcatccacaacatttggttgcagggtgaacgggctaaaaaaaaactcttatacttttgagtaaaactcaatttcaatccaattcaatagctcattcaaatcagagcaatttaaagaccataataatactgcagaattaatagtttcatttttgaatagaaataaagagataatcagagaacgagagatatagagattataaatgttcatatggccaattcaatgcgtgagtttgttttatatttattaaaaaaattacaaaatattaagaacttaacctaatcaagtataatcacagacaaatgccacataagaggcttgttaaaatcgtctttcattttgcattactccgaactaagtagactaattgtatggatcaacctttcggaacataagtaccaaaattaaccgaaacgaaaattcaaacccagtcggactcatcccctaccagccaggaaccatacaccgaaaaaagaaggaaccaaaggacacaggacataatggagctgtggcagaagctacgagtgcagtttaatgacttcttccacgcgaactacccgtacatagcgctctacagcggactgggcgtggcagtaacagcctacttgcactaccaatggagcgtgcaccactacgacctcatgtactggaagcgtttggcggaggtcttctcgcaggacatcgactgcatccagctggctatactgctcttgatcttcgcgatcaacgccattttcgtattcatcatcctgagcgtctatctgcgcccagccctcgacaatggcagtgagatgtccttgctggagatcaaggatcgctatgcccggttcatactgctccgcctgatagcccgtctcgatcgcatacagtcgaagatctcagcgaagcgtaagagcctcaccttccagcactatgtgagggcacacacgaacatggtaaaggcggtggccgtgttccgcaaggatgcacgcaagctaatcctgccgaatgagagcgagatcctgatgcccatcgaggacatctacggggtggctgatgacgaagaacgactgcttcggcgatcgggctactacaagctgatcatcgacaccaccgacgagacggtcaagtctctgttcaacgccaagctggaggagatcctgttcccaaccagctagacgactcggcggttccgattgaaactttgagtaaactgcagtccaacactaattgcctttatctactctgccagagccgcagctccgagggccccttcttaaagccgttttattgtttcaattgtttggcttggcagctttttatggccgcattgtgcgccgggccaacaataacaggccagtcggagactgtcagccgtccccaacccccaataacaataatggcaaaagaaacagcagcagaaacagcagcagaaacagaagcagaagcagttgcagaaccagaccagaactagaaacaaaactccaacgaggaacagagactaaactaaaatgccagcccatgtctgcacagctcaaaacaatatctaatgttgtctacggcaaaatattttgcaaagcgtctttttgttttgcccgatttctgtgtccttcaggcctttgtgtgtcgacttttctttaaaattagctaaaaggttgtgtaaatttaactgaaagtgggatagcagtgaaagaaaagcgttgcaggggataaaggattcttggaatgcatcgtgggtacgaaaagcaacaagggcgactaggaaatataaataaattttcttatgggatgatatctaactaaattacattttcggatggcatgaagtggactagagtccgcagtcattagtgatttaatctagaaaaagaggggaagaaccttttaggaggagcgtcaaattagcatcaataaaattgggcaataataaattaaattcataaattcaaacactcaacaaaattatataattgacttttttggtttgtggtcgtacgtgcgggcatgacaacaatctgaaataaagatgcataaattgttaatctgtttaacagtatcttaagtagttgtagttcttgatctaatagtacccgatatctcgtcgttcatacggacagtcaaacggacagtcaagcggacattgtcagtgattctgactttatagtgttacatacttta

SEQ ID NO: 14066 - DNA, 837 bp, DROSOPHILA
gttaaaatcgtctttcattttgcattactccgaactaagtagactaattgtatggatcaacctttcggaacataagtaccaaaattaaccgaaacgaaaattcaaacccagtcggactcatcccctaccagccaggaaccatacaccgaaaaaagaaggaaccaaaggacacaggacataatggagctgtggcagaagctacgagtgcagtttaatgacttcttccacgcgaactacccgtacatagcgctctacagcggactgggcgtggcagtaacagcctacttgcactaccaatggagcgtgcaccactacgacctcatgtactggaagcgtttggcggaggtcttctcgcaggacatcgactgcatccagctggctatactgctcttgatcttcgcgatcaacgccattttcgtattcatcatcctgagcgtctatctgcgcccagccctcgacaatggcagtgagatgtccttgctggagatcaaggatcgctatgcccggttcatactgctccgcctgatagcccgtctcgatcgcatacagtcgaagatctcagcgaagcgtaagagcctcaccttccagcactatgtgagggcacacacgaacatggtaaaggcggtggccgtgttccgcaaggatgcacgcaagctaatcctgccgaatgagagcgagatcctgatgcccatcgaggacatctacggggtggctgatgacgaagaacgactgcttcggcgatcgggctactacaagctgatcatcgacaccaccgacgagacggtcaagtctctgttcaacgccaagctggaggagatcctgttcccaaccagctag

SEQ ID NO: 14067 - protein, 218 aa, DROSOPHILA
MELWQKLRVQFNDFFHANYPYIALYSGLGVAVTAYLHYQWSVHHYDLMYWKRLAEVFSQDIDCIQLAILLLIFAINAIFVFIILSVYLRPALDNGSEMSLLEIKDRYARFILLRLIARLDRIQSKISAKRKSLTFQHYVRAHTNMVKAVAVFRKDARKLILPNESEILMPIEDIYGVADDEERLLRRSGYYKLIIDTTDETVKSLFNAKLEEILFPTS

SEQ ID NO: 14068 - DNA, 12363 bp, DROSOPHILA
tagttgattcaaagttatttggtataaaaaatagaaaaaatttgatgacaataaaaacggttcgccttagttttcatttgcatctcaaaattatcgcaatatattgaggccaaaataagtctcgctgacactcacgagtctaggtatgtatgtatgtattctcccaaatcttcagtactaataaaatccgtttagttttctacagagagttagggtatacaatatgcgcatactgaaatatgaaacgcgcgatatgaacagcttaatacttaactcttccgtcttatatctactcttttttctattgaatacgctcttgattgcttaaaagttgctcgaaaattagtgaatctgttgattagtggttaatcgaactgcaacgcgatttctatagcgattctaagcgaattaaaagcacgttgattgtatacatatgtgtgtgtctctgtgtccattgtttggggtgaggactgtgtgggcttatccttatcctaatcgatccgttgatcaaatctttacaagtacttgcactgcgacctccatctgacatgtggctgttggtagatctgttgatgttgtctgaagtgctgttgatttccaatggtatggctgtagttgctgttgttgttcgagtggtttaccgttgctggagtgtcaatgatgcttcgatggaacacctgaccaaagcacctgctaaaccaaaagcaaattgtgcggatggacgacgacgacgacgaagacggcgagttggtggagtggaaggtggagggtgtcgggtaggattctgattagctagccacctcctgatcccgatgctcctccgatggatatctgttaacgtatgttattcttccttggctggacccagttttcttgtgcgtttgggttgctgttcgctgctcgcgagtcttttttggggatagttggatgggtgggagcccaactaacaatagttgccattgccattgccattgccataccacggaaaggtccagcaccatcagtgcggaagcatcagaggccttgccgtgctagtcagtctgtggtgcgccttctcgccacctccacctccgccgtaatcctcgtagctcagcagaggcgagatctttagcccagtcttttccggaatgatcttaaagtgcggctgatcggcgctcaccagcagcggtctcttcatcgaagagtgcatgtagtcgtgggcaggatacggatgcgcggctgctcccaggggcctgtgggtactgggcacattcatcttcttgcacggttccggcttgctctcgtagttcatctggcagttctccggcgagtacttgttgggcttgtagattgaaaatatgttgttgatcaggctgagcgccgagtgaccgccggcggatggatgatggataccagctgtcggctgctgagtcagcacacttcccacggtcggatggctgtgctcggggtagaagttgttgtactgataagagggcagcgtgtccaccgtgggatacaccttgtggccatagccctgcggttgtccgtaggccggatggtggtggaaggcgggggcaggcgcaacggcgggagcggtgtcaaaaaaaggatagccgcccgcattggtcgaggactcgctggagtccagctgcggtggcgagggcatcccctcgagcagcgatttcttgatcatcagccgctcatgctcacggtcatgcagatcgatgggctggccattgttgtagcaccggacattcacgttcttcaccttgagactgctatgcatgttccgccgcatgtccatgttgatgggactgggtggcttgtccagctgctcccagtacttttccaggtcaatgttgaagtcctccaaatcgatctctgtggtgtccgaacaggtgtcctcgtcgtacagaattgttggcggctgcatctccaacagtgacttgctgcgcggaggccggtgatagtttcccgccggataccgtctgccaggactacgcggagccggagcagcggctaaataccgctcatcatcgtccaggaacttatcctgcagcatgaggcgctcgcgctcggcgcgtatgaagtgctccaggtcggtgtcataacggcagtgcatgtgctcctcctcctcggcggcgggatgatgaccgggacataggggtcgtgatcttgggcgagcgggaagtggcggttgctgctgccgctggcgatggcaacaacaatcctccgccgcagagcaacaacaaataaccgttggagcggcgggcgttctctgccttccagcccgctcctcgaatagccaatccgccgcacttagatttcgattgctgcccgccccggttgtccttggtcgcatcctcgatcccggatagatgtcctccaacaggcagcgggcgctggtgcactgatcccgggcgcaacatcgatccaggctgctgctgcagagggcattcatgttccgccttagagcctccttcttctcccgtcgcgtattcgagacaggaggcagctcatagtcgatgatatcaaacggcatggtcttagtggtggcactgaaggagtatgacttgggaacacctgctcgattcttcaggatggaggtggttggtgggggagcaccgcttgaactaccactcccgctggccacaccgccgccagcttcaaaaacattgccctcgaagcaccaactctgtgacttggggtattgaaactccttgcagctcttggaacgatgcaggccatagccgggggatccttcaccctcaacacgacgttcttccgtaaccccactcttctcgtccagctcgtggatgtccctcagtgtgcggaaaggtccgtatttcaagcaatcaggcacgtagtcctcgtccatgtcatcggagcggttcgagtagatgttatccgtataccaggtggaatcaagttgtttgggtcgtggcttagcttgaagtaacttgtcccgcttggactggcgatagctctcgaaacaaatgcccttcatcttctccagcttctgctcccggatgcgctcccagttctcccagtttttatcattcttgttccgtctcccagacaggatgagcacctcgcggtccttatcccaatcggcgctgccctcatcgccgtagtcgatgtttagccgcttcgtctcgatatcggattccctcggtatttggtgatgggtggtggtgttgaaggcggttgtgggtggtgcaggtgcaacactactagcagctacgttgtggttttcggacactactattctaatcctacgcttggtcttgtccgcggttcgcgacgatgacgtctgcatggacgacttatgcggtctgtcccgctcgtcggagggcggctcgtcctcttctggctgtcacacctcctgcagatacttgatggggcagtagccctgcccgtgctcggcggctcggatcattaccatgccgtttacctcgtcgccggtcttgtttggtaaatggatgacatgtgaacaaagttaggggaggaagagagaatggtttgggcttgtgggtctcacctgtatgacaatctggtcccttagaagggtaagattctcgccgcgttcactgtccgacacctggagattgtgggtcacctgcagtggcttctcgttggcattcagacgcacacagtacttggatgggaagtatccaactcgtcccagcacttttcccttccaccagtccggatctgaattgtcaatgacagtcacctagttttcagaagcgagagttttcaaaagtttaatccggcttctagaagctaattaattaggtaattttattactcttgttcactaagacatattcattaatatgccggttcggagaggacttgatattattcttgtatacagaaagaagaagtgtcctttcgccaactagaatactattaatagatagtacttaaaaagtttgtgctaagattaccgagaggtaagctataaatatacaatatttgcgaaatatcatatttttgcgttcggttattaagtataagtgcggctaggaaaatctcatatcgatccgcgtagtgaattcccagcggcctgggagtgaagcgaaaagttggactctatcctgctcgaatgaaaaaccagctcgcgaacaaggacgccgtccaaacaaaagctaatctgtaaatattgaacactttgccggcggcgggcaggcactcgcaatcagggaatgtacacaaaaagtcggtaactattattatttcttcttattcactgtttgtttcaccatgtttacgcagtggaaaacgagcttcctccatatgctcgattgtatgacaaataaacaagtttttcgctggcattgttcgctattcgttttcatattgaataaagagcgctggacaaacacacactagtacgcatatatatttctgatttagttaaccattttccgtggcagccattgtgcaaactaagtacaccgcttagcggattaaacaaagcgccttgtttatttattcatacgcccattcatttataaagtgggtgtttggagtagatagtccgtccccgtatgattagctcaccttgtagccagcctttagatccagttcatcggcatgtcgcgccttgaagttgtagatgatgacatacagattcgtgggcaacagacgatgggttttcttgaaataggtgaagcgtgtgttgggtttgggttaataccattgctaggctaatgttcatgcaatcattcaaacgagcggatcagacgaaattaactcaagaacaataggggtggtagttggaggagtggagtggggtctacctggggatgtcttacgggtgagaggcacggcgaggtgctggccgaggactgcgacttctccatctcgtccggcagatcgacgctgccaccacgcattccacgggtggcgtacagtagcttgcggcccggatgcgaggggctcgatggtgctgtaatggttttggatgcgttagtccctgctccaggacaggctcaatggatacggtttggtttggtttggttaatcgaatgcaagtggatgaacgaaaaatcagaagaatatccatggaaaaagaagatatagatattgtacagataaattatacacatatacgtttaataaggtagatcgatgggagtgtatgggacttaggagattgaagatgtgtgtcagcagatgaagttacttagtctacggttagcatgtatctaaaagctgcaattaactactagataaaaggtgaacgaaatcgaactacttagcaaatagtttactttactcgactcgtactccggcaacgtatttacatagttagttaagtaagtatagttgtaagtatagttaagcgttaagatagatagttgcgagtgtcatacatacatactagtttcggaaattagacttataggaactgagacccgtcagaggtgcctgctgtggatgggtaagtggtggtggtggtgctggactagttggattggtaagtggtgcagcgtacgtcggtgtccggaatcaggttcgttatcggtatcggtttggggaccgggaaccaggaaccggggatcggccgaaccgggaccggcaaaccggaccggaatcgtttactgggttgctacttacagtgcagacggctgttgttcgacggcggagtgctgtgctccaggtggcctccggacccaccgtggtagtaaccggagccggctgatgtggaggcgcctgtgcccggcagttgggttctacgcctgaactggccgtgcagctccgacgattctggtgagtccaggctcagggatttcatgcgtaagttcaacttttggcggcgcggtgagtgcggtgctgttgttgttttagttgtttatttggatttttgattttgattttttgttttggtacatggtcatattggttgtcgtgtgtcggacgatacacagttggcaaaaaaaatggcaataagatgtggaataaaaatttgttgattttaatttcgtttgttaagcatttggtaacaccatattggaaactaagcgtctacagatctaaacaaaaaccgaaaataacttaaaaatgtaactgaaaagacgttgaacacttagtggcctttggcaaggacatcgatagaacatttgtagcgtaatcaatgcaatttagattttttgtttcgtatttagattgtaagtttggaacagagcaacattcgacacgttcaggaagagacagcgagtgtttttggcatgtttcagtgtattattaattctagtcatcccgtttcagttgccacaaaattaaaagtcaacgtaagaatactgctggttgtgtgagtgtgtatatcgtatcgtgttggccaatttggattttgactacacaaaacataaatatagaaaatcatagataactcgtttccatcgccctgtgccagatgagcgtgattgtgtttatcctcggagtgaaggaaagccaaatatcgttttgctttttattcgtgttattatagtcattcgtttgtggttgacgtgtgggcttggtgcggtatatacaacattcgtacaacatttagaatataattgtggtgtaatcagaaaagacttaatactttaatcgtaatatacatttaacattgctctctggctcacgcacattcgcaggaccgaaattaactaagatacacgatagatagttataggtataggtatggggtaaattatactatgtgtggagtattttataataattactgtgctgcaattagaacatcaattgggctaggtgtctagggtataatgaaatcaagaacttaaaccataaatcgctctagaactgtgttaaattagattgttaagtgttccaccattctcatcctcatcatccttctcatcattatccttattcatctgtgacctcagcgcactcgtcgattgcccttggactcatccggattggattccgtgctcttgaggagcatcagtggttcgccaaagggtcgcgttgtttcggacttcggattcgctgacgctgtattaagtatataccatatatatcgcttgtagtttgagccctgattattcgttacttgatgaggttagtagcttttcgatcgattaactgcctcgctggcgaaggcaaacgctctctgactgaatcgccgagaaatgtgaattaaaactaattaagttaaatgaagacaagaagcccgaaagaaaatattaaacattaagacagcgttcatgcataaagcaaagcaaaacaagccggaggacgcccaaaagaagaccgtcagaggagcgaagtaggaccataaccagcatccctggcccaagtaatagagcagaaacgtaatcctcgcaaaataagtgcagagttccccgctagaacttgtgccacaaggaagtcgggaccggcaactacgagatggcaggcatgcaaggatggggctgggcgcatccaggatggggatgttggggatccggggaaggccaaacgaaaggcagacccaaaacggaaagtaaaataaggagcgcaaaaagattgtgtgtcataacaatttttagcataattatgttcggcttgggaccaacctcggcccccagccatccgccccattccaccattcctccgatccaccctattcgcccttcgacaagaagtcagctctggcctaagacaaaaaagttggcatcgcgactttaaacttgcgtcgctttctctgtgcgagtggcattaaaaatgcagcaaacattaagcacaaatgaactcgcgcctcggcgaaaaagtttgtggtccgtctgcaacatttgtatgcagcggcttccagcttccagctgcccacccaaccccacttccaagttgtgcggctgaatttttgcacaaaagttgacaatggcttgtaatttacacggcaactgtagtcctgcactggagctgcggcataaacagtggcagtgtgcaaagtcccggaaacgggaatacagtgcaaaaaaaaaatcgagtaacaaagagcgctaatgcttaaatggtttgttcttcaataagttaatggccaagcgctagactcggactgaaaactgagatttaagtaaaaaggaaatttgacttcgggctatttaaaagcaaatcagcttggaacttactacaaaaaaaagttaggaacttttaatttatgttggaaactttaacttaataccttttattcgcccattatttttatgatatgcggcattacactttaaaaaagtctgaggtatttttcagcagatatataaatgaagtgtagcttttatatctttaagatgccatcgaaaagagttgcagtgtggttttgttaaagaaccaaacattccaagaactttaatgctcccgcagagcactgcctttctaaaagtgtacgaggataaaaatcccatcaccatggagtaagtttccattcgactccagccgagctgaaggctgatggagctgctttcagcgcgaaaggaactcggccatgtatacaaatgatggcgttgcaattgcttttggtgctgttgcaacggaaatgagccatttgcctgaagtgtaaactgggttaagactaattggcatttaatccgaccattgtttaaatgggcggagctgagcttgccacttggaataactaaaatgcatccatgccatcttgtctctatatcctttggcagtggccaacaaacacgcacttgtacacatacatacatatgaacgacgaacagacagacggatacaacttctgtgacccactacacgggaaataaattgaaaaagatacacagaacacggtaacacaatctaaacatcgatgtcgagtgggaatcaaatgcagtactgttccaacgagaactcatggctatgatggggtctatgatgctattataggcatccccgaaatatgatgttaatggtgtggtggctgttgttgttgttgttgttgtggtgctgctagtgctggctgggagatggaacgatttctgcatcggcatgacatggttgttgctagtgtcattgtggagcggtctgttgtgattgttgctgtccccactgcctcgcatgttttccagtgtgtcgtaattactttctggcaatgagatcgaccggtgctgcgaggatcgctgctgcctcagtcgtccgaacacggacaatggccgaattccggcgaacagacgccgccgcagtcctggatcggtggtcgagtagttgatgctgctgccactggtgctgcctccgcattgttgtggctgttgttgctgctgttgctgatgtgccggcgaggttcctgccgagatggaggaggatgtggcaggtacctgttgcatatacgccacctgctgggtgttgcccgtgtagtagttgatgccgatgccattgctgatgtacgccgagctggacatgttcgatacgggggcaaagaactggccgtatcgcggttcttggtgtgtttgtttgatgtggttggttgggttattggttggtaaatttgagtttggcaagcgaacgaaaaattggcaaaaaagatatgaacacgaaagaatatatagatatatatgtgtttttattttaagcgtagtaaatcagtatgtttatcatatatgtgagttctgtgttcgcaatctggaatctgacatttggaattcgaatggaacttaacttacaactaatcagggtcaggtcaagatagatggcacaaggactcgtgcaacagcaacaacaaccgcaacaggcattctgcaatcaatcagtacgctgctgtattcgcacactgctaattggaataatgcaactacagaccgcagggaatgttgcagctacagcctgccttggtgcaagttgcccattccatgttgcagatggctggttgcaggttgccggatgcaggttgctagttgctagttgccagtgtgcagcgccaagagctgtggcgctaattatgtgcgcacttgccaagatttagggcactttgcggccaaaggggagcggtctgaattgtggccctaagtaggcgacaaaaaggcaatgtcatgttgccatgtgattgctttgggggccaccagacgaatggcgacgaggacgaggagacgagacgaaatgaaacaagtagaccatgtattttaattgaagctcattcgcgtagacaaacacacttgcccctccattcacacactgctggtttgttgattgtgtgctggctgagctcgaatcagcatgtatttgtatatttgcatagagaaggctagggaaatcaggatgtttaaaggaaaacaaagtgtttggcatacacaaattaattacgttcaactaaatatgatacgtagatgctacatgtgtttgcgtaagctataattgatgttggctaagctacaaaacactatatttcgataactgcttcagtcaatagcgattcaaatttaaattcaaatttcaactctagattaaattatatacaaaatgcatatatatagatatatatgtgagttattagctattaggtttttgtgtgtggcgtgtttgtgtttaaaagctggccaaaaaatccagcaacttcatagcgaagcaatggggcgtatgagcaattatttggttaacgcaatgtgagtgaaattgaaattgttttgccaaatctaaatatgctcgcaaagggaatgcaattgtgtgtgactaatgtggatagttatgaactactattatctgctctacaattcgggtgcagaaaatgagagaacggtagcccgatactatatgactggtgacatttggtttttggacaatacgatggcattcttgtacttttggtatgcagtttgatgatgatatttaagctgaggcactgagacgggatccgggactcgagacatacaaaaaggagaggtgggtaaccgaaaccgaaaccaaaaccaaaaccgaaactacaaccaaggattctcaaaataattgcgaaaatgttaaatgagggaaagaatgcagagatagagagatagagattttaggtagagaataacacaaactacttcgtcggcaacttggcgacttgtcggacctgagctactagatatatcttggctgggcaccggcagtccgccgcgctgctgctgcagctcctgttgctgcagttgtacgcccagaatgggcatggccaccggcggcggacgtacaccacgtcccgcccgtaccgccgccgcctgcgccaccgatgccaaactgcgctgctgctgctgatgttgctgttgctgctgctgctgttgctgctgctgctcctgcagggccagctccgagacactgacaatcggtatatccggcggcggagctctgcccagttcgcgctccgagagaaccggaaccggaagagccgatcctccagcgacgctgccatccatttgcttggcctggacggatttgtcggcgcctgctgcaagatgcccggatttgagttcgccggcttgtttcagcacgcggtaaatttgatcgatttcggttatttctttattgatttggtttgcaattttttttttttttttttttgtgccgaagtaggagagttgacattgacaaattggtacggttgatgaagggccattttttttagttattcggattggttcgattcgatatcgttttcaaattgtcggattgggatgatgttgatgttgttgatgcattgttgaagtgcattagtacaaattgcaagtggtttcaagggcgattcgataatgagattgatgtggggatcgggtactcttttgaattcatttagagtgtgtgagagagataggtgggtatgtatacatataataacgatcatctaggcttgatgttactttactctaggcccgctgggtgggcatgtcctcgatgagccagatgtctaggatgtggcacccaaaaccgatccaaactcaagtagccaacaacacgtatgcggtatgagaagtgaggcaatttctagtgaactgtttgatatttactgaatattgattactgattactgagtattgcggctataacatgctccactacttgaactgatttcgttgagtggtcccccagctcttatattttgtccgcgatttgccggataccttgtgtcccttgttgtctcagcatatcagtatgtgtatggtgtgtggtgtgagctgtgtgtgctgagtgggtgtgtgtgttcaatatactttgagctggttgtcattcgctgaatatctcgctaattaggtgggtcaaaagcgcaacagtcaaacacaaagtacgaacaaaatcataaggtcaagcgcatttcaatcgagtatctggcgcatactatacgagtattaattaatatattgatattgatgttggatgtacgtatatggcacatactaattcgaataatactgtttattt

SEQ ID NO: 14069 - DNA, 3207 bp, DROSOPHILA
atggatggcagcgtcgctggaggatcggctcttccggttccggttctctcggagcgcgaactgggcagagctccgccgccggatataccgattgtcagtgtctcggagctggccctgcaggagcagcagcagcaacagcagcagcagcaacagcaacatcagcagcagcagcgcagtttggcatcggtggcgcaggcggcggcggtacgggcgggacgtggtgtacgtccgccgccggtggccatgcccattctgggcgtacaactgcagcaacaggagctgcagcagcagcgcggcggactgccggtgcccagccaagatatatctagtagctcagcaccatcgagcccctcgcatccgggccgcaagctactgtacgccacccgtggaatgcgtggtggcagcgtcgatctgccggacgagatggagaagtcgcagtcctcggccagcacctcgccgtgcctctcacccaaaacccatcgtctgttgcccacgaatctgtatgtcatcatctacaacttcaaggcgcgacatgccgatgaactggatctaaaggctggctacaaggtgactgtcattgacaattcagatccggactggtggaagggaaaagtgctgggacgagttggatacttcccatccaagtactgtgtgcgtctgaatgccaacgagaagccactgcaggtgacccacaatctccaggtgtcggacagtgaacgcggcgagaatcttacccttctaagggaccagattgtcatacagaccggcgacgaggtaaacggcatggtaatgatccgagccgccgagcacgggcagggctactgccccatcaagtatctgcaggaggtgtgacagccagaagaggacgagccgccctccgacgagcgggacagaccgcataagtcgtccatgcagacgtcatcgtcgcgaaccgcggacaagaccaagcgtaggattagaatagtagtgtccgaaaaccacaacgtagctgctagtagtgttgcacctgcaccacccacaaccgccttcaacaccaccacccatcaccaaataccgagggaatccgatatcgagacgaagcggctaaacatcgactacggcgatgagggcagcgccgattgggataaggaccgcgaggtgctcatcctgtctgggagacggaacaagaatgataaaaactgggagaactgggagcgcatccgggagcagaagctggagaagatgaagggcatttgtttcgagagctatcgccagtccaagcgggacaagttacttcaagctaagccacgacccaaacaacttgattccacctggtatacggataacatctactcgaaccgctccgatgacatggacgaggactacgtgcctgattgcttgaaatacggacctttccgcacactgagggacatccacgagctggacgagaagagtggggttacggaagaacgtcgtgttgagggtgaaggatcccccggctatggcctgcatcgttccaagagctgcaaggagtttcaataccccaagtcacagagttggtgcttcgagggcaatgtttttgaagctggcggcggtgtggccagcgggagtggtagttcaagcggtgctcccccaccaaccacctccatcctgaagaatcgagcaggtgttcccaagtcatactccttcagtgccaccactaagaccatgccgtttgatatcatcgactatgagctgcctcctgtctcgaatacgcgacgggagaagaaggaggctctaaggcggaacatgaatgccctctgcagcagcagcctggatcgatgttgcgcccgggatcagtgcaccagcgcccgctgcctgttggaggacatctatccgggatcgaggatgcgaccaaggacaaccggggcgggcagcaatcgaaatctaagtgcggcggattggctattcgaggagcgggctggaaggcagagaacgcccgccgctccaacggttatttgttgttgctctgcggcggaggattgttgttgccatcgccagcggcagcagcaaccgccacttcccgctcgcccaagatcacgacccctatgtcccggtcatcatcccgccgccgaggaggaggagcacatgcactgccgttatgacaccgacctggagcacttcatacgcgccgagcgcgagcgcctcatgctgcaggataagttcctggacgatgatgagcggtatttagccgctgctccggctccgcgtagtcctggcagacggtatccggcgggaaactatcaccggcctccgcgcagcaagtcactgttggagatgcagccgccaacaattctgtacgacgaggacacctgttcggacaccacagagatcgatttggaggacttcaacattgacctggaaaagtactgggagcagctggacaagccacccagtcccatcaacatggacatgcggcggaacatgcatagcagtctcaaggtgaagaacgtgaatgtccggtgctacaacaatggccagcccatcgatctgcatgaccgtgagcatgagcggctgatgatcaagaaatcgctgctcgaggggatgccctcgccaccgcagctggactccagcgagtcctcgaccaatgcgggcggctatcctttttttgacaccgctcccgccgttgcgcctgcccccgccttccaccaccatccggcctacggacaaccgcagggctatggccacaaggtgtatcccacggtggacacgctgccctcttatcagtacaacaacttctaccccgagcacagccatccgaccgtgggaagtgtgctgactcagcagccgacagctggtatccatcatccatccgccggcggtcactcggcgctcagcctgatcaacaacatattttcaatctacaagcccaacaagtactcgccggagaactgccagatgaactacgagagcaagccggaaccgtgcaagaagatgaatgtgcccagtacccacaggcccctgggagcagccgcgcatccgtatcctgcccacgactacatgcactcttcgatgaagagaccgctgctggtgagcgccgatcagccgcactttaagatcattccggaaaagactgggctaaagatctcgcctctgctgagctacgaggattacggcggaggtggaggtggcgagaaggcgcaccacagactgactagcacggcaaggcctctgatgcttccgcactga

SEQ ID NO: 14070 - protein, 283 aa, DROSOPHILA
MDGSVAGGSALPVPVLSERELGRAPPPDIPIVSVSELALQEQQQQQQQQQQQHQQQQRSLASVAQAAAVRAGRGVRPPPVAMPILGVQLQQQELQQQRGGLPVPSQDISSSSAPSSPSHPGRKLLYATRGMRGGSVDLPDEMEKSQSSASTSPCLSPKTHRLLPTNLYVIIYNFKARHADELDLKAGYKVTVIDNSDPDWWKGKVLGRVGYFPSKYCVRLNANEKPLQVTHNLQVSDSERGENLTLLRDQIVIQTGDEVNGMVMIRAAEHGQGYCPIKYLQEV

SEQ ID NO: 14071 - DNA, 5289 bp, DROSOPHILA
cttgctctacgatatgattatatggatttaaatagcatggtatggcttggtattaaaattattctccatactaggtagaatatccgaggttcaatgaccgccgctgttgactacaaaaagtgacctatgtacggagtacagtagtggctacaccgattcttacccaatgttagggtggcgactgtgaagacgggatgaatccagagggactccgttagcggtacaacggtggtgcgcggatcgcgtagccagtaccaggcgctgatggcggtgcacatggacatggcggaaaggacaactgcaagaagctctatggttattacggattgtaatgctccctggtgttctcattatacggatgcaacttactgcgccagcggaacgtcgagggacggtacgatgaaaccacttcggtgaggcgccgctcgaaggccttgagatctgcagaggagcgaggaaaacaaacccagttatggttggtaaacatagtcagtggcttgcgcgttttccggctctcttttgccggcgagttacataccttcgcaggctgacggttccattgcagctatttcctcaaagctcgtggccgtcttaatgcgattaaatttgtccagtttaaatattattgtatttattattattatttgatgaggttctcatagctttcttttcctctttttatgtttttgatgacattccacgtttgagagcactgataacgggctgcgtttctcaacactacacaaagcagggtcgtaccaaagaggggctctttgtttatttcctactttcagtacaaaatggttgtatagctaatttaaagtgagtattatatttatgtattatttatattatatttatattattttaatacaaaaatatcatagtttttattataatataaatataattaatggcttaccggacaaattaagtacccactaaatggtcttctacatacacccatgtgtctaagttattcttcctgcagtacaacggtcacactgcggcagctgttgcaaaaaaaggcggataatatttgtagcaaaatcagtgttttttatacgtaaaatcaacaaatataaagtccctcgaaggcattatgaatagcactaaagtgccgcccgagtggaagaggcgtgtcaagtcggagtacatcaaaatcaggcagcagaagcgctacaaacgtgccgacgagatcaaggaggcgtggataagaaactggtaagcgcgggagagatggtggatgtctgggaatcgaaaatctatgtacacatatcctccagggacgagcacaaccacaatgtacaggatctgtactgcgagtcgaaggtttggcaggctaaaccctacgatccgccgcatgtggactgtgtgaagcgggcggaggtgactagctacaatggcattcccagcggtccgcaaaaggtgcccatttgcgtgatcaacgcggtcactcccatacccaccatgtacacgtgggcaccaacacagcagaacttcatggtggaggatgagacggtgctgcacaatataccctatatgggcgacgaggtcctcgataaggatggcaagttcatagaggaactgatcaaaaactacgatggcaaggttcacggcgacaaggatccctcgttcatggacgatgccatcttcgtagaactggtgcacgcccttatgcgctcctacagcaaggaactggaggaagccgctccgggtacagcgactgccattaaaacagagacgttggcgaaatcaaaacagggcgaagatgatggggtagttgatgttgacgcagatggtgaatctcccatgaagcttgagaaaaccgacagcaaaggggatctgactgaagttgagaagaaggaaactgaagaaccgctggagactgaagatgcggatgttaagcccgatgtggaagaagtcaaggacaagctgcccttccctgcgcccattatttttcaggccatcagcgctaactttccagacaagggcaccgcgcaagagctcaaagaaaagtatgtaatttgataaccaggttagtaaatatcccttcttacggctttttctttttgctaggtacattgagcttacggagcaccaggatccggagcgcccacaggagtgcacacccaacattgacggcatcaaggccgagagcgtttcccgggaaaggactatgcactcctttcacacgctcttctgtcgtcgttgcttcaaatacgactgcttcctgcaccgtaagttaaacgatgggaactgctgccagctgggttacctaatgactttacgttttgtttttgcttttcttttcttgtttggaaacaatattatcttaccaaaaaacacaaatctgtaccatttcttaaacccccaaaaaaaaaaacgaaattccaaaatgtattgaattaattgcaatttaggtcaccatgtgcagggtgagtcgttgttgtagttgttgtttcgataaccacacgcacacactctcatgccgtttgcccgtcaacgcctccgcatcctcatctcgctgtctatgaatataatttttataataacccatatcggtggataatttggctatgtttgtcatgtgtctaaattgacccctcggtgttgctcacctcattttcgtgtggctttggctggaccatttctctctatctcttcaaatgtaaccgattaccctcatgctaatccaaaagcgtttcatagacatcaagtgattttcgcccgattgagttattctaatcccgctgctctgtgttcacaggcttgcaaggacatgcgggtcccaatctccagaagcgtcgctatccggaactgaagcctttcgccgaaccttgcagcaactcctgctacatgttgatcgtaagttggatgcactttataaatttaaatggtattttaattctgttatatgctgcaggatggcatgaaggaaaagctggcggccgatagcaagacacctcccattgattcctgcaatgaggccagctccgaggacagtaatgacagcaacagtcagtttagcaacaaggactttaatcatgagaatagcaaggataatggcctgactgtaaatagcgccgctgtggctgagatcaactccattatgggtcagttttaagttagcagattggttggaccatgtgttaaatatttcactttttctcaccagctggcatgatgaacatcaccagtacgcagtgcgtttggacaggcgctgaccaagcactttatcgggtcttgcataaagtgtatttaaagaactactgcgcgattgcgcacaacatgctgaccaagacctgtcgtcaggtgtacgagtttgcccagaaggaggatgctgagtttagcttcgaggatttgcgacaggacttcacacctccgcgcaagaagaagaagaagcaacgtctgtggtcgctgcactgtcgtaagattcagctaaagaaggactcatcctcgaatcacgtgtacaactacacgccctgcgaccatcccggacatccatgcgacatgaactgctcctgcattcagacacaaaacttctgcgaaaagttctgcaactgcagcagcgattgccagaatcgtttccccggctgtcgctgcaaggctcagtgcaatacgaagcagtgtccttgctatctggcagtgcgcgagtgtgatcccgatctgtgccaggcctgcggagcggatcagtttaagctgaccaagatcacgtgcaagaacgtgtgcgtgcagcgaggactgcgtaagaaaccttcttatatatccatattggtcttcgccactgtcaactaatttaatcttcaattgcagacaagcacctgctcatggctccgtctgacatcgccggctggggcatctttcttaaggagggtgcgcaaaagaatgagttcatttcggaatattgtggcgagatcatatcccaagatgaagccgatcgccgtggcaaggtttacgacaagtacatgtgctcatttcttttcaatctgaacaacgattttgttgtggatgccactcggaagggcaacaagattcggtttgccaatcattccattaatcccaattgctatgccaaggttatgatggtcaccggcgatcatcgcatcggcatctttgccaagcgggccattcagcccggcgaagagctattctttgactacagatacggacccacggagcagctgaagttcgtgggcatagagcgtgaaatggaaattgtttgataacgagtctacttatgaaaatcgtatcatacaaattgaataaaactatatttttgaaaacacacctaaacggatttagctacattggctataattggtttgggtcgcgatttgaagattaattttttggtgcaaacggcgcgcacagtgtactccgttctttggcgactcttgtgctcctgggcgatcgtatgatccagcactgtgcgctccgctcccgtggtggcgttcagcatactgacatcctgcgaggccatgctcgtttctaggagtcgttctccctcattggtcttggacttttccagcaccgcaaatggtttatccaacttttgttcacgtccctgaagaatgtgatgtccaatgatgagaatcttatgatataagtaaaatcagattgtttaagagctggttaaattataactttacaattacaactcacaggttggccatatttattgtagtagagatcgccaataaactggccgtgcatatcctggttgctccgcacctccaggtcgccttgcagctctataatggcccaatcgcctttgccagcgttttgtctaaaataaaatcatgggtttgggttacttcagtggtaaaggtgcacttaaaagtgaataatacaatattgtaagcccagtttccacggaaagtttctaaagtttgttcagaattttattcatgcttcacagtggtttgtgcttttcttaggtctatcctctgaattttttgaagagcggatgcacgctgccaatgttctttttacgatgttcgtagtagatggcatcatctccgccagacatggagctcagtccgccgacacgtctgacggcgccgcccgagccactgggacggtagcccggctcgcccggcagcttctcatcctcgcagtccaaatcggaagcggataggaccaactgcagcagttgtccctgctcctcctgtgtgccgtacatcaaatccgagtccgtgtccatgcccttgagatgcgtgataaccttgtagctatagccctggttgaccaagaaccgctgtcgcttgcgggagtagctcatctcca

SEQ ID NO: 14072 - DNA, 2448 bp, DROSOPHILA
cacactgcggcagctgttgcaaaaaaaggcggataatatttgtagcaaaatcagtgttttttatacgtaaaatcaacaaatataaagtccctcgaaggcattatgaatagcactaaagtgccgcccgagtggaagaggcgtgtcaagtcggagtacatcaaaatcaggcagcagaagcgctacaaacgtgccgacgagatcaaggaggcgtggataagaaactgggacgagcacaaccacaatgtacaggatctgtactgcgagtcgaaggtttggcaggctaaaccctacgatccgccgcatgtggactgtgtgaagcgggcggaggtgactagctacaatggcattcccagcggtccgcaaaaggtgcccatttgcgtgatcaacgcggtcactcccatacccaccatgtacacgtgggcaccaacacagcagaacttcatggtggaggatgagacggtgctgcacaatataccctatatgggcgacgaggtcctcgataaggatggcaagttcatagaggaactgatcaaaaactacgatggcaaggttcacggcgacaaggatccctcgttcatggacgatgccatcttcgtagaactggtgcacgcccttatgcgctcctacagcaaggaactggaggaagccgctccgggtacagcgactgccattaaaacagagacgttggcgaaatcaaaacagggcgaagatgatggggtagttgatgttgacgcagatggtgaatctcccatgaagcttgagaaaaccgacagcaaaggggatctgactgaagttgagaagaaggaaactgaagaaccgctggagactgaagatgcggatgttaagcccgatgtggaagaagtcaaggacaagctgcccttccctgcgcccattatttttcaggccatcagcgctaactttccagacaagggcaccgcgcaagagctcaaagaaaagtacattgagcttacggagcaccaggatccggagcgcccacaggagtgcacacccaacattgacggcatcaaggccgagagcgtttcccgggaaaggactatgcactcctttcacacgctcttctgtcgtcgttgcttcaaatacgactgcttcctgcaccgcttgcaaggacatgcgggtcccaatctccagaagcgtcgctatccggaactgaagcctttcgccgaaccttgcagcaactcctgctacatgttgatcgatggcatgaaggaaaagctggcggccgatagcaagacacctcccattgattcctgcaatgaggccagctccgaggacagtaatgacagcaacagtcagtttagcaacaaggactttaatcatgagaatagcaaggataatggcctgactgtaaatagcgccgctgtggctgagatcaactccattatggctggcatgatgaacatcaccagtacgcagtgcgtttggacaggcgctgaccaagcactttatcgggtcttgcataaagtgtatttaaagaactactgcgcgattgcgcacaacatgctgaccaagacctgtcgtcaggtgtacgagtttgcccagaaggaggatgctgagtttagcttcgaggatttgcgacaggacttcacacctccgcgcaagaagaagaagaagcaacgtctgtggtcgctgcactgtcgtaagattcagctaaagaaggactcatcctcgaatcacgtgtacaactacacgccctgcgaccatcccggacatccatgcgacatgaactgctcctgcattcagacacaaaacttctgcgaaaagttctgcaactgcagcagcgattgccagaatcgtttccccggctgtcgctgcaaggctcagtgcaatacgaagcagtgtccttgctatctggcagtgcgcgagtgtgatcccgatctgtgccaggcctgcggagcggatcagtttaagctgaccaagatcacgtgcaagaacgtgtgcgtgcagcgaggactgcacaagcacctgctcatggctccgtctgacatcgccggctggggcatctttcttaaggagggtgcgcaaaagaatgagttcatttcggaatattgtggcgagatcatatcccaagatgaagccgatcgccgtggcaaggtttacgacaagtacatgtgctcatttcttttcaatctgaacaacgattttgttgtggatgccactcggaagggcaacaagattcggtttgccaatcattccattaatcccaattgctatgccaaggttatgatggtcaccggcgatcatcgcatcggcatctttgccaagcgggccattcagcccggcgaagagctattctttgactacagatacggacccacggagcagctgaagttcgtgggcatagagcgtgaaatggaaattgtttgataacgagtctacttatgaaaatcgtatcatacaaattgaataaaactatatttttgaaaacac

SEQ ID NO: 14073 - protein, 760 aa, DROSOPHILA
MNSTKVPPEWKRRVKSEYIKIRQQKRYKRADEIKEAWIRNWDEHNHNVQDLYCESKVWQAKPYDPPHVDCVKRAEVTSYNGIPSGPQKVPICVINAVTPIPTMYTWAPTQQNFMVEDETVLHNIPYMGDEVLDKDGKFIEELIKNYDGKVHGDKDPSFMDDAIFVELVHALMRSYSKELEEAAPGTATAIKTETLAKSKQGEDDGVVDVDADGESPMKLEKTDSKGDLTEVEKKETEEPLETEDADVKPDVEEVKDKLPFPAPIIFQAISANFPDKGTAQELKEKYIELTEHQDPERPQECTPNIDGIKAESVSRERTMHSFHTLFCRRCFKYDCFLHRLQGHAGPNLQKRRYPELKPFAEPCSNSCYMLIDGMKEKLAADSKTPPIDSCNEASSEDSNDSNSQFSNKDFNHENSKDNGLTVNSAAVAEINSIMAGMMNITSTQCVWTGADQALYRVLHKVYLKNYCAIAHNMLTKTCRQVYEFAQKEDAEFSFEDLRQDFTPPRKKKKKQRLWSLHCRKIQLKKDSSSNHVYNYTPCDHPGHPCDMNCSCIQTQNFCEKFCNCSSDCQNRFPGCRCKAQCNTKQCPCYLAVRECDPDLCQACGADQFKLTKITCKNVCVQRGLHKHLLMAPSDIAGWGIFLKEGAQKNEFISEYCGEIISQDEADRRGKVYDKYMCSFLFNLNNDFVVDATRKGNKIRFANHSINPNCYAKVMMVTGDHRIGIFAKRAIQPGEELFFDYRYGPTEQLKFVGIEREMEIV

SEQ ID NO: 14074 - DNA, 4942 bp, DROSOPHILA
ttgccgcactcataaagtcaaccattctttgattttgagcgtaggctgttgtgctgtgccagtttaggttggtgtgggcgttagctgttaccttctaagattcgcatcagcaagacgtttggaggcagctcatcaattttgcaagagaccaggatgcggcactccgggcatcgcaacttgtgctgactggccacaatgtcctggcatagaatgatgaaatcattcggttatatgatatatatgtagcaaacccacaacaattactcacctgcaagcatttgcggcagaaggtgtgctggcatggcagcaccttcgatgtggtgtccagtcgctcaagacacacggagcactccaacaggtcgtttaacgtgtgctcgtccatcttgccagtatgcaaaatctcaaggatggtcactatttgaatttcgtgcagggccacattccaaaacacacacacatgcaggtactggctcacgcatacgcaatcccaagacgcggttgggaaataaatttagctcaaatgctaaaatctactattataatcgctacttgtcgttcttaatgcactaaatcagattatattatcgttgcaataggcaggattcaatgtttaatttattaagtttgccaagtgcagccaaagctcgtggccaagcggatacaaatgtacataggcacacggatataaaaccagcttgatacttgaacacagtgatggtcataagtatatgcccaataggaatagtagttccataacatttaaccaaaaagaaagaagctaagagagtactacatgttttttaaattcactaaatttgcaaaaaattatttaaataccacatgtgccccggttatagttgcatttaataaatgcaaataattgttaagttgtacccaaactggtgtttattactgttgggattttagtgtggccagtcctcgtagtcgatattttctgaagcgcattttagtgttggatactaagtccagacagtgctgaaaaacgcacgatccctttgtttttttatttcatataaaaacacgtgtggtttggtttgatcgtgttcaaatatacgatttgatttataaacaaggcacacgacattcttgagacaccatgccaaaggtacgcagcaccccgggtaagccccggacgcagggattcaaccactcaaaccactccatgaatccggagcgccccaaaagcggtctcaagggagtcgcccacccccgcactaagggcaccatcaagcggcttcagatgtaccgtaacttcaaggccaagcgcgatcgcactggaaagatcctcacgcccgcccccttccaggtgagatttagctttacaacatgtatcttcgataattcttatctttggattcataagatttaccatcacttatagacataggaaggatttattgcaacatgaatatccaataaccattgtttagttttcaaaattatcatctacttcacaaaggtgcaattaaaacgatcgactcaaaattaaaagcattaaaagataaaaagatttcataagtatattttgttacgacttattatccgtataataatttaattacaaatcttatgttttcattcttgttgtaaatatataaaagaaaaaattaaatacaagagagaaaatgccgaatatgttttccacaacccatttaataattcatactaatcctggaaatgtgctttattttaggggcgcctgcctgctggaacaatggctcgagttgagcctacgcccaagtggtttagcaattcccgcgttatctcgcaaactgctttgcaaaagttccaggatgagattggcaaggctgtcaaggatccctaccaggtgatcatgaagccatcccagttaccggtaactttactgaacgaggcagcaaaatacaaaagggttcatttgctggacaccgagagcttcgacagtacctttgggcccaaaaagcagcgcaagcgcgtcagcctaaaggttcgcgatctggaagatttaagcaaggcggccgatgaccaggccgataagtacgattcagctaaggatttagatctaatccgcgaggatactggcgaaaagaaggccgtccgtgattgggtgttcggtgcggggcagagtaaacgcatctggaacgagttgcacaaggtggtcgatgcgtccgatgtgctgcttcaggttcttgatgcccgcgatcccatgggcacgcgctcgaagtacattgaggagttcttgcgcaaggaaaaaccgcacaaacatctatttttcattctgaacaaggttgatctggtaccggtgtgggtaacgcagcgttgggtggctattcttagtgccgaatatcctactattgccttccatgcctccctacaacatccttttggaaaaggtaagtttataaagtaaaaatatcaattatttgtcataaaaatcaattatttttataggtgcgctcatcaatctattccgtcagttgggcaaactgcatttggacaaaaaacagatcagcgtgggcttcattgggtatcccaacgtgggtaaatcttctgttattaatgcgctacgatcaaaaaaggtttgcaaggtagcaccaattgcgggggagacgaaagtatggcagtatataacgctaatgaaacgcatcttcttgatcgattgtcctggcgtggtgtatcccaccgcggagactgacaccgagaaagtgttgaagggtgtggtgcgggtggagctcgtcacaaatcctgaagattacgtagactctctgctgaaacgcgtgcgtccggagtacatttcaaagaactacaaaattgaacactggaacacatccacgcactttttagaacagttggctcaaaagaccggcaagttgctaaaaggcggtgaaccggacgttacggtaacagcccgtatggtgcttaacgattggcaacgaggcaaacttcctttctacgttccacccgaaggattcgcagttcccaaatcccaggagggtaaggaggaggaagtagttgcagaggatcccaacgaagatgctaaatccgaggcacctacattcgtcagtgagtctgtaaagaaggcgcgcgagtttaagcagatccaagattttcgaaaaatacgcgtgggtcttgagtatgagcaggaagatgtgaaggatcttgatcacatagatctagagcttttagagcaacagaaggccgagcgtgcggcaaagaaaaaggctcgcatccacaacctcggtgaagaggacgaggagtctagcgatggagcggacgagttttactcggaggacgagtacaatgaggacttgcaacgcgttgtgcacaagaaggccaagtcaaagaagccacaacagctggccatcacatcgtctggtaaattccgagtggccaaaatacaacctggtgattcggatggtgctggcagctctgacgacgatggacccagcacttcaaaggctcctcggttgactgcaaagcaaaaacgctccctggagcgcagtcagaaacgcaagaagattggcagcaacttttacgagacgacaaatgttaagaatcgcaatagaaacaaaaagaaggacgcgtaaaatattacgtttacactctaggctatattttcttgcaaggaaaaactacactttaagaatccaaataaaaagttgatcctactctgagcactgcttcttcttgggaattttgcggccacataagtcggttcggctgcacatactgggttcctcctcatcggtgctggcctccgagtcactagactccgtgtaggagccgatgcccggaagtatagcgatgcactttagggccccctggttgtatttgtttgtaattaatgtggtgttcgttgtcttatcagcagggtccttggttgcttcatttgtcgctgtctgttcgacctcattctcagtgattttggctactttactggtggtgggcagttcgccgttttttctcttgatgccctggccgagcagcgtcttctgagtgctacgcccgaccgaagctcccgcggacttcgctgtggtttttagttcagcttgcagtttctgagggttgcggaagttcgggtgattgtaaaatcaattgattgttgctgtaactttacccaccttgtctacactctcctcctgcagcttttccacacgattgcgaaaatcctttagttctagctcctcgtcgcgcatttgctggcgctccgcgtgtattttatgggcatcgaccaattccagaaactgcacctcatcatcgtccagaccacggatgaggttttctatacgtatattacgcatgttaggatggccagattgcattgtttatggcatagtcttactcagcttgtgggcttcctcgaactccatgtccttcttgtccttattttgtttgaggcgttcataaagtgagcgcccatcgtagggttcctcaggtcgttctagtggatcctccggctggcgtacacgctcccattcctcctgacgtctctgcctttgctcggtcgcctcagcttcagtcacaaagcccgaactcatgctgtactttcgtaaaattgctcttttttacagaccacaactattgccagtgtggtgaacgtcgaattagcagctgtgcgatgatatagaagtgttggtagtggctcgtgaaaatttgaactagtggcgggaattgctaatgcttctgtgtcattttaagttaaacgttgaaaaactttccaagtcccactaaaatgaactatccttataaactcttttaatatgacagcgccttactctaccaactggaacactggggcgaccacgggccctaagcctggctcgatttatttcggctatctgcacaaaaactgatttttgggcggttgtcatttctcgccattttctgccggctattttggccaaggaaatcggtttcagatggcaaatgtcccgcttttgaa

SEQ ID NO: 14075 - DNA, 2497 bp, DROSOPHILA
aaaacgcacgatccctttgtttttttatttcatataaaaacacgtgtggtttggtttgatcgtgttcaaatatacgatttgatttataaacaaggcacacgacattcttgagacaccatgccaaaggtacgcagcaccccgggtaagccccggacgcagggattcaaccactcaaaccactccatgaatccggagcgccccaaaagcggtctcaagggagtcgcccacccccgcactaagggcaccatcaagcggcttcagatgtaccgtaacttcaaggccaagcgcgatcgcactggaaagatcctcacgcccgcccccttccaggggcgcctgcctgctggaacaatggctcgagttgagcctacgcccaagtggtttagcaattcccgcgttatctcgcaaactgctttgcaaaagttccaggatgagattggcaaggctgtcaaggatccctaccaggtgatcatgaagccatcccagttaccggtaactttactgaacgaggcagcaaaatacaaaagggttcatttgctggacaccgagagcttcgacagtacctttgggcccaaaaagcagcgcaagcgcgtcagcctaaaggttcgcgatctggaagatttaagcaaggcggccgatgaccaggccgataagtacgattcagctaaggatttagatctaatccgcgaggatactggcgaaaagaaggccgtccgtgattgggtgttcggtgcggggcagagtaaacgcatctggaacgagttgcacaaggtggtcgatgcgtccgatgtgctgcttcaggttcttgatgcccgcgatcccatgggcacgcgctcgaagtacattgaggagttcttgcgcaaggaaaaaccgcacaaacatctatttttcattctgaacaaggttgatctggtaccggtgtgggtaacgcagcgttgggtggctattcttagtgccgaatatcctactattgccttccatgcctccctacaacatccttttggaaaaggtgcgctcatcaatctattccgtcagttgggcaaactgcatttggacaaaaaacagatcagcgtgggcttcattgggtatcccaacgtgggtaaatcttctgttattaatgcgctacgatcaaaaaaggtttgcaaggtagcaccaattgcgggggagacgaaagtatggcagtatataacgctaatgaaacgcatcttcttgatcgattgtcctggcgtggtgtatcccaccgcggagactgacaccgagaaagtgttgaagggtgtggtgcgggtggagctcgtcacaaatcctgaagattacgtagactctctgctgaaacgcgtgcgtccggagtacatttcaaagaactacaaaattgaacactggaacacatccacgcactttttagaacagttggctcaaaagaccggcaagttgctaaaaggcggtgaaccggacgttacggtaacagcccgtatggtgcttaacgattggcaacgaggcaaacttcctttctacgttccacccgaaggattcgcagttcccaaatcccaggagggtaaggaggaggaagtagttgcagaggatcccaacgaagatgctaaatccgaggcacctacattcgtcagtgagtctgtaaagaaggcgcgcgagtttaagcagatccaagattttcgaaaaatacgcgtgggtcttgagtatgagcaggaagatgtgaaggatcttgatcacatagatctagagcttttagagcaacagaaggccgagcgtgcggcaaagaaaaaggctcgcatccacaacctcggtgaagaggacgaggagtctagcgatggagcggacgagttttactcggaggacgagtacaatgaggacttgcaacgcgttgtgcacaagaaggccaagtcaaagaagccacaacagctggccatcacatcgtctggtaaattccgagtggccaaaatacaacctggtgattcggatggtgctggcagctctgacgacgatggacccagcacttcaaaggctcctcggttgactgcaaagcaaaaacgctccctggagcgcagtcagaaacgcaagaagattggcagcaacttttacgagacgacaaatgttaagaatcgcaatagaaacaaaaagaaggacgcgtaaaatattacgtttacactctaggctatattttcttgcaaggaaaaactacactttaagaatccaaataaaaagttgatcctactctgagcactgcttcttcttgggaattttgcggccacataagtcggttcggctgcacatactgggttcctcctcatcggtgctggcctccgagtcactagactccgtgtaggagccgatgcccggaagtatagcgatgcactttagggccccctggttgtatttgtttgtaattaatgtggtgttcgttgtcttatcagcagggtccttggttgcttcatttgtcgctgtctgttcgacctcattctcagtgattttggctactttactggtg

SEQ ID NO: 14076 - protein, 674 aa, DROSOPHILA
MPKVRSTPGKPRTQGFNHSNHSMNPERPKSGLKGVAHPRTKGTIKRLQMYRNFKAKRDRTGKILTPAPFQGRLPAGTMARVEPTPKWFSNSRVISQTALQKFQDEIGKAVKDPYQVIMKPSQLPVTLLNEAAKYKRVHLLDTESFDSTFGPKKQRKRVSLKVRDLEDLSKAADDQADKYDSAKDLDLIREDTGEKKAVRDWVFGAGQSKRIWNELHKVVDASDVLLQVLDARDPMGTRSKYIEEFLRKEKPHKHLFFILNKVDLVPVWVTQRWVAILSAEYPTIAFHASLQHPFGKGALINLFRQLGKLHLDKKQISVGFIGYPNVGKSSVINALRSKKVCKVAPIAGETKVWQYITLMKRIFLIDCPGVVYPTAETDTEKVLKGVVRVELVTNPEDYVDSLLKRVRPEYISKNYKIEHWNTSTHFLEQLAQKTGKLLKGGEPDVTVTARMVLNDWQRGKLPFYVPPEGFAVPKSQEGKEEEVVAEDPNEDAKSEAPTFVSESVKKAREFKQIQDFRKIRVGLEYEQEDVKDLDHIDLELLEQQKAERAAKKKARIHNLGEEDEESSDGADEFYSEDEYNEDLQRVVHKKAKSKKPQQLAITSSGKFRVAKIQPGDSDGAGSSDDDGPSTSKAPRLTAKQKRSLERSQKRKKIGSNFYETTNVKNRNRNKKKDA

SEQ ID NO: 14077 - DNA, 2559 bp, DROSOPHILA
gccagcaagtagtcagcaaacggcaaagagcctgtggaattggctgtggaccagccatcggcatctggcccacactcatgatcatatggacaaaaattgctataaagtactaaaaatacaattaccgtgagaaaatcgcactgattttgtgactgattgtgaagacgtttatagtcgatttttagtgactgactgagtgaccgacggaccaggccatgcacacatctcaactcgccgaaatatggatgcgagggtgtacctatatctgtatctgtatctgtatctgtatctgtatgtgctgtatctggtgtatccgttgtatctgctgctcttttgcataattgtggcgtgcgctgtgcgctcgtttttccggctgccagcgccaaagatgatggagatgacgtcgccgttctgccgccgaccttaaggcatcagtaccctcccaccttacccaaccccagccaatacccaaccaataacccaaccaacaggaggcaggcagtgcacctgtaacactttgatctgatttagatcagcgtctggccagaatcagtctgcgcatccgcctccaccttcacctacacctctgtacccaccgccacctccactagttcacattccaatggcttggttaataaagtgttttgccgaaaagccaaaccaacaataacccatggatgggatgctctgctccgctgctcctctgccgacgaggtgtacaacgctgcgtatgagtgacgcttccactaagcgaaatttgttgtttataaataatgatcttggccaggcgatcggtttagtgcgcgcccgcaggccaacgcagttggaacgcattggagattggaatactcgctcgctcgcaaattgtcgtttggccaacagatacaaaatggtatctatcgggtgttgtttttgcatttctctgggcgggtggatattgtgcaatcgattatgatgtgatcgggctaatttttggtaaccgcaggaggacgacgagaaaatggacatcatgcgcaaggcattccaaatgttcgacacacaaaagacgggcttcattgagacgctgcgtctgaagacgatcctcaacagcatgggtcagatgttcgacgatagcgaactgcaggctctgatcgacgacaacgatccggaggacaccggcaaggttaacttcgacggcttctgcagcatcgctgcccatttcctggaagaggaggatgccgaggccatccagaaggagctgaaagaggcctttcgtctgtacgatcgcgagggaaatggttacatcaccacctcaacgctgaaggaaattctcgccgccctcgacgacaagctctcctccagcgatctggacggcatcatcgctgagattgacactgatggatccggtaccgtggactttgatggtaagtattcccttgtaattaacaaatatgtgatgctgactaattgccattttcgatcacagaattcatggagatgatggcgggcgagtagaaaaaccacgaacgctgataaaaccaacagaaaatcgagcttttgggtttaattataattttttattatttttaaataaattaactaaccgctttaatacaaaactttagttcttgtggtctgcgagcagtaataatgaaacagaaaaaaaactgaaagatacatatccatctagttcatatagtttacttgttgctcttacaggctagtcatctaactctagcttaaacaaggttacatgataagaacgataagatataagttaaacggttacagataaagatacatatatagtatttacagaatcgcttataacgataatatataatatatatactatatatatgtatggttagcggcctataaacatctttgctatttacacaaaacaaaagagccgacacaagtgcacttctcgagatacgcaactgccagttctatatatctctggttataaatacaaaaatatgtgctactaaaaggggaggaagggagtcgggctcctgtctgttggctcctgtctttacactttgtcttaaggcaactaattccgtggattttacaaaaggcagcatttacttgcacaaagtctgcaaagtttacacttaaacactagatacaaacaaaacatataaggacatgttctatgttgaggctaaagcctcgggggtcaaagaatgggcgacttaactcgtttagttaaagcgtacaaaagctggcacaaaaattaatgtatgttacatataaatttcgattctttcgattgattttttgttttgatctcatatttatgtacatcgacatgaataggtgtcatccaaaatactccctatatttctcaaatagttaaagcatttttctaaccaaagattttgcaaggggccttagtaactagctcctgccaacttatatctaaactctagcttacaatcagtgcgacggtttaagtaaccgtagtataggcacctctgaaggatcctctgctttactccgctcacgtacaagcaacttacgattagaacctaactatgaatttccggacaaaaggtcggaactgcgtattca

SEQ ID NO: 14078 - DNA, 497 bp, DROSOPHILA
atggacatcatgcgcaaggcattccaaatgttcgacacacaaaagacgggcttcattgagacgctgcgtctgaagacgatcctcaacagcatgggtcagatgttcgacgatagcgaactgcaggctctgatcgacgacaacgatccggaggacaccggcaaggttaacttcgacggcttctgcagcatcgctgcccatttcctggaagaggaggatgccgaggccatccagaaggagctgaaagaggcctttcgtctgtacgatcgcgagggaaatggttacatcaccacctcaacgctgaaggaaattctcgccgccctcgacgacaagctctcctccagcgatctggacggcatcatcgctgagattgacactgatggatccggtaccgtggactttgatgaattcatggagatgatggcgggcgagtagaaaaaccacgaacgctgataaaaccaacagaaaatcgagcttttgggtttaattataatttttta

SEQ ID NO: 14079 - protein, 143 aa, DROSOPHILA
MDIMRKAFQMFDTQKTGFIETLRLKTILNSMGQMFDDSELQALIDDNDPEDTGKVNFDGFCSIAAHFLEEEDAEAIQKELKEAFRLYDREGNGYITTSTLKEILAALDDKLSSSDLDGIIAEIDTDGSGTVDFDEFMEMMAGE

SEQ ID NO: 14080 - DNA, 3258 bp, DROSOPHILA
ccagccagatgattatgaagcgcagccagccgaagctgcaggagatgatcagcggaatgagccacatggccagcagggtgacgaaagcgtaggatctgtagtgccgcttcttccactcgaccaggatgatctgggcaataaccagggtgacgaacagaatgatcaccatctcggagtgcatggcatcgtggccgcgatgtttctccaccatcagttgatgctgcgctctgttcgattggatagccgaaaatttgttatgatttaaaggattttctaaggccacttcacttaccgcattcgctcctccggcgtcatttcgtccagggactgatggacatccgcattagcagggaattgcagggaagagggaaaatttggcagtagagtggggcttcctattcgattcccattagaaaagactcaccttgttcaagtccacgggctcatgcaggtccatgtgctcctggtgcatcttattgccgttgtatccgccgtatcccgctgccgccaatccgccggacagtcccactcgtcgtctgcgtcgctgcgttatcttgcccaccacgtattgcgatcggtttttacctttgaaattcgtgaaacgaaaacaaataattacattttatgcctgtgtgcttgtccagctgcagtggcgttgccatttgtcacagcggccgaaaaaacgaatacatgtatgtgtgacgtgagccacaaaaatacaagcgcgacctgattgttagaaccagctgtcctgagtatggggtttttcccaaattgttgctattttatcataacctttatttactttagctacgacagcgctttctgattatcgaaaacgaaacgttcgaggccaacgttgccagatgccgctgcaggccgtgccgatgtttaccgacaatcagctgtttggttcaatgagttgagtatttcgttcccagcgcaagcaaacttatcgatagtcccgataaccaaccatgttattttagggcccgataagtaaacaacaatatattgttaagtaaatgttgtacgtaggtttttaagcgaaataaacatgcaaacagagcactggggctcgctgcccgcagaggatgacggcggtcaactgacgccggacaaatacgtgcccacggcggccaagaaacttaagctggacgagattcgccagcgcggagatccgcaaccgcaagaaaagcagtaaataaatctaaagaaaagctttaacgcagccggtaaactaaccatatattccatgtagccacaagttggagctgaggagtgcgctggtcacccagaccatcgaggtgatgaagcaaaccgaggtgctgcagtccctcattgaaacgtactccaacaaaaatgcaagttcttggttcttgtttaaccgtagtatttacctaatttacccaatgaattcatagggaagttccaattacctcttgaatccgtgcctaatgataccggaagtggactttccgccggagaacgcagccgaactggtgggcagccaaaagtttcagaagcccatttggttcacaccaaccgtggacacagcctactctcgcggggatccggaggcatatccggagatccccagctctgcttgccgccaggcgatgcgcaaggtgatgtgcggcatgctgcgcctggccggcttcaccgactgttccgagtcggcggtgcaactgctgacggacgccaccgaggagttcctgcgcagctttatcggcgagtatcgcggctactatgacagtcagccgcggctgcagaattccacggtgctgcagctggtcccactggagcgcgcccatttcgcccaaacgggcacctcgctcacccaggtgcacaactactacaagcacaaggtgctggccaggaatcgcgcggagatcgctgagttcaacagcgtactgcaggagtacgacaaactgatgaaggagagccagagcagcatgcagaagcagcacaacgagttcaacggccacgactttctcaacatcctggacaacagcgccacaggcagcagccagagcataggcggcatggccatgggcgatatgctgcaggatctgggcggtagcacgggctccagtggcacagtcagctcccagcagatgctgtacggcctgctcgatggccagatatcgtccaatacctccaacatgacggggacgagcggcaatggcagcacgggcggcaatggaaatggcaatggggccacgattagcaactttcacgccacttttgaaacgtaattgttaaaattgcggggataacttcattatctcacactgagatatctctagcaatcaaatgtttcacactttttatagaacgactaagatctctaggctcaagttaagttaagctctaaggaaacgtactaattaaatagtttttattacgtgttttgtttattgctcatctttttgctaatcctcgactcgttccagttgttttgtcgcctccgcttggtgaactcgttggtgggttcaatggccacaagtttggttgcattcggatcgctggctctgtactggaacactttgtcgtggcgcgtctttttctgggcccacgccagcaggtccctgccttccagtatggagttgccagtgaccaccacagagtccagagcttcgggcgcggattggtcttcttcgggggtccgtctccttatgttaggtttctttttcggacctgcaggaccttccaccaccaaatcggcgatcaaatagcaatcggcattggacacgagcttgactttgtcgggtgggggcttctgtttgcctacgccattgggtacatccagagagaactcgatttgctcctggattatgccgctcagtctgcgccaaatgtgcgtttgcatctcctgcgagatctgcagatcgctggcaggcgcgtcctgatcctccacgtagcgttcactttttaccggctgtgcttcgtccttcctagtggccaacggttgctcctcgttggctacttcatgcgcctcctcttttggctgcgattgatacatggcatttgtgagcaacgtggtgtccgccgcctccaggaactggcgcatctgggcgtcgtcctcggaatcagagtcgctatcccttgatttaactggcattttttgtacgctctttgaatatttatttatttacatttaatttttaaacgataggtgtgccgttaacgtgcacgatggttggaactgccattttccaaagcgataagtatcgatagattctaaaagcgctatga

SEQ ID NO: 14081 - DNA, 1137 bp, DROSOPHILA
taaacaacaatatattgttaagtaaatgttgtacgtaggtttttaagcgaaataaacatgcaaacagagcactggggctcgctgcccgcagaggatgacggcggtcaactgacgccggacaaatacgtgcccacggcggccaagaaacttaagctggacgagattcgccagcgcggagatccgcaaccgcaagaaaagcaccacaagttggagctgaggagtgcgctggtcacccagaccatcgaggtgatgaagcaaaccgaggtgctgcagtccctcattgaaacgtactccaacaaaaatggaagttccaattacctcttgaatccgtgcctaatgataccggaagtggactttccgccggagaacgcagccgaactggtgggcagccaaaagtttcagaagcccatttggttcacaccaaccgtggacacagcctactctcgcggggatccggaggcatatccggagatccccagctctgcttgccgccaggcgatgcgcaaggtgatgtgcggcatgctgcgcctggccggcttcaccgactgttccgagtcggcggtgcaactgctgacggacgccaccgaggagttcctgcgcagctttatcggcgagtatcgcggctactatgacagtcagccgcggctgcagaattccacggtgctgcagctggtcccactggagcgcgcccatttcgcccaaacgggcacctcgctcacccaggtgcacaactactacaagcacaaggtgctggccaggaatcgcgcggagatcgctgagttcaacagcgtactgcaggagtacgacaaactgatgaaggagagccagagcagcatgcagaagcagcacaacgagttcaacggccacgactttctcaacatcctggacaacagcgccacaggcagcagccagagcataggcggcatggccatgggcgatatgctgcaggatctgggcggtagcacgggctccagtggcacagtcagctcccagcagatgctgtacggcctgctcgatggccagatatcgtccaatacctccaacatgacggggacgagcggcaatggcagcacgggcggcaatggaaatggcaatggggccacgattagcaactttcacgccacttttgaaacgtaa

SEQ ID NO: 14082 - protein, 359 aa, DROSOPHILA
MQTEHWGSLPAEDDGGQLTPDKYVPTAAKKLKLDEIRQRGDPQPQEKHHKLELRSALVTQTIEVMKQTEVLQSLIETYSNKNGSSNYLLNPCLMIPEVDFPPENAAELVGSQKFQKPIWFTPTVDTAYSRGDPEAYPEIPSSACRQAMRKVMCGMLRLAGFTDCSESAVQLLTDATEEFLRSFIGEYRGYYDSQPRLQNSTVLQLVPLERAHFAQTGTSLTQVHNYYKHKVLARNRAEIAEFNSVLQEYDKLMKESQSSMQKQHNEFNGHDFLNILDNSATGSSQSIGGMAMGDMLQDLGGSTGSSGTVSSQQMLYGLLDGQISSNTSNMTGTSGNGSTGGNGNGNGATISNFHATFET

SEQ ID NO: 14083 - DNA, 2230 bp, DROSOPHILA
tgccgtattgaagttaatttgcgacttttcgatttaatttttttatgtcatacctagctaagtgtaaataaatatgcaaatatatttatgagtatggcaaccaaaataatttttgattttccgtaataattgaatacgattattgactttagtcagaattaccgacgcattttcgcacaatcaaagatctccgaggccttagaagtgccaacactgttggggcgtgggacattttgctgttgaaaactttgttacattggcatatgcaattgggtttgctgcacatcctgtcgacagcttggacttgccaaagtttttgccactgttaaatgttttctacgtttttatgtcttcgccaacgttttttgggcgttttaaggcagagtttgtggggtgaggcaaagtttttaatgaattttatagcaggcggtgttaggcgattgtgagacgattcaatccgaaggcgaatcttacgaaacacagaggcccccgataagcgggaggccaaaggtgcggacaggcagcgggccaatcaagctaatcacaaacgggctgagatagacaggcatatacatgcacatgcatacaacatatatagtacagacagacaaacagacggaccgctatgactttgatgcgctgtcgctggtgttttggcctgggcattaaatgcagcacattaaagccgcaggagccatagccgctgacggctgacaagcgttgagtcaattacatggtaataaactaatggacaacgtgcccgcctggcgacggcgtcactcgccatcatcatcaccattcagcctcatcagttttggacctcactcatgcccgtttagcttcaacacttgttgaacttcccatggccggcgcaaaaagccaactgtaattggcccaaagtgagcttgattcgaaaacggtactcgcttaaaggcgaaagttgaaaacctgagatgttaactggcaaaaggtatatccgctatcatttttttttttaattcatcacattactcttttttgcaactctacacttttgttttcacttatctaagatattttcattttgtagtttattcgacgagatccttaggagtggacgcacttgttgatgttcaggctgtaggaggatccgggtggacaggagccgtgaacaggacgctcaatggtgcaccgattgttctcggcactatatcccgcaggacatccgctgctggcaaaggcacctgccattacggacagcagcaaaaccaatagccaagtgcatttcaaaagcatgtttataaaatccttatcgagttctgcacttgaaagaaaatccgtagtttgaattggaatactaggcagcctcaactcaccttgggcaactagaaaatgcaactattttaagtgatgcaactgagatgggtcttatataccaacagatgtgccgagcaagtgattccatcaactcgaccttggtccagttctactgattcaagcttatgacaggcagccgcttttcgataacactagcagctgataagcagctaaacaaagctgatttgttttcaaattgttttaaatgtattcgatcacttttcctgataatgttttttatttatttagtttttgtacacacacagattgacgcttggttggtattgggagttttgtgggcactctccgcggatggtgcgctttgcggtgcacttgttaccctccttcttgaatggggcggggcagctcttggccgaaacagtcatggcgatgagggccaagatgaagatggtaagccacgagaagttcatgttggttgcaggctgcaaggcaattcacatatttataaaaaaaatatgataatagaagtgattcaatttgtttgataatcaaccaaggagttaagtgtactgtttaaaattctgtgttttctttctcattttatattcatcaaaacatcaaaggaagtggagtacattatcagcaattccttctgttcaaaaagctttagaaatcctattcaggttgaagctctttcgatcacttacttctttctgtcttcgctttgtgaatgagcaaactaaaattcctcgcaggcggcggctgcttttatacccacggaatcatacatttcgggcctctatcgcatacataacgaacctttgacccaattagtgacatttaagctggcgccgataagaagcagcgaaggcttgacacatgtggcccgctggatgcctatcttcatcagtaa

SEQ ID NO: 14084 - DNA, 230 bp, DROSOPHILA
atggcaggtgcctttgccagcagcggatgtcctgcgggatatagtgccgagaacaatcggtgcaccattgagcgtcctgttcacggctcctgtccacccggatcctcctacagcctgaacatcaacaagtgcgtccactcctaaggatctcgtcgaataaactacaaaatgaaaatatcttagataagtgaaaacaaaagtgtagagttgcaaaaaagagtaatgtgatg

SEQ ID NO: 14085 - protein, 47 aa, DROSOPHILA
MAGAFASSGCPAGYSAENNRCTIERPVHGSCPPGSSYSLNINKCVHS

SEQ ID NO: 14086 - DNA, 3272 bp, DROSOPHILA
cagtaaaaaaaaaaaataaagagggctttatgtggggacagcaggaatgataagggggagtccccggttgccgggtgctctgcacattatgcggccttataatgaaataagcgccacatcgcgatacagcgacaaagacatcaaggacatcggacgaggacaagagcaaggacaatgtcatgagagatggggagggggggcggtggcggatatcaatactaaaattaccacacatatacatggtcgaatatctttttactccaacttacctccagcatattgcggcgatttgtgtcgcataaattccggctgccaatctctgtcgacatgtaccaaccactgaatgtggtggccgtaaactgaatgccgcccacatcgaacagcatactggatacggcgggcagggcgtaccatcgcagtcccagatccgagaaccattcgaatctgcaatgggagagcaagagtattgggtgcttttatttcgccagctcgattcatattgggagatatggctgacgatgcgggtgggtgggtcagtggccacaggccgcgattgtggatgcaaatccattggttatacaagccatcacccgaccagctgatgtacgtccgtacataatcccgacgtggcatcgacgacaagccaattgagtagctaaacactacggagtcccaaatgaaccacacagttataaaataactcaataaacgccaaatgaagagatacattacctataaatgaaatttgaatttggacgcataataaaaccgatttaattaaagagtcacgatgtcacgtaaaaaagcgctttgccaacagcattaatcatatttgcatggatactttaggtcacttacaatgagcggcaaattaaatcatataactaaaaatcatataaccgacaagttatggaatagtttttgtgtggcatagcctcgttgagtatttaagctacttcccctacatacaataggaaacatttgcttgatacacgcagtcatggaagttggccaactaataattataccactatttttactgctgcttgaccattcgatgggccaactcaggaggactcccatcactcgtcagatcaaccagaacaagacccatgccaatgtgaaggcggagaagatcttgctggcggccaagtactttctggtggacagacaatcatcacaaacgacacaggtgctagccaacggattcaatctggagtacaccattcgcctctgcatcggaacaccaccgcagtgttttaatcttcagttcgacactggatcatccgacttatgggtgccgagtgtaaagtgttcaagcaccaacgaagcctgccaaaagcacaataaatacaactcgagtgcgtccagttcccacgtggaggatggaaaaggatttagcatacagtacggctcaggcagcttgtctggatttttgtccacggatacggtggacatcgatggtatggtaatcaggaatcagacattcgccgaggccatcgatgaaccaggttcagcctttgtgaacaccatttttgatggcataattggaatggcatttgcgtccatttccggcggagtcaccactccctttgacaacatcatccggcagggattggtcaaacatccggtgttctccgtctacctcaggcgcgatggtacctcacagtctggcggagaagtcatctggggtggaatcgatcggagcatctacaggggttgcatcaactacgttccagtatcgatgcctgcctattggcaatttacggctaattcggtgaaaatcgagggcatccttctctgcaacggatgccaggccatcgccgatactggcacctcgctcatcgccgttcccctgcgagcctataaagcgatcaataaagtgttgaatgccactgatgccggagatggagaagcatttgtggactgcagcagtctctgtagattgccgaatgttaatctaaatatcggtggcactacctacacactaacgccaaaggattacatctacaaggtccaggcggataacaatcaaaccctgtgcctatccggcttcacatacttgcagggtaatttactatggatactgggagacattttccttggaaaggtctatacggttttcgatgtgggcaaggagagaattggattcgcaaaactaaagaagcattcaagttatagggtttatgcctccagttatgtgaaagaaccatctagctacggcatcgattacccattctacggcgatgaatactccagattctttacttgagtcaattatatttcaactccaaactaatccacgtgcctatttgtttcatcataaaccttatggctaaacacttgtattaaagaagatttgtaaaacgaacaacaaatatttgccgagttctttaatctctacgactggagttggctttgtttccaagtcagcttaagtatgccaacagaactcgtggacgtcattaacttccagaaatggaaaatttcgtggctatttatggatatttgcagttagacaatacaaaaaaaatgggagagcagacagaaaagttatttaaatttcgaacccatttcaaatctattcacagtcgaatttcagccgcagacatgagacagttgttagttttattggtgcttgtcgggattggccattccgctgccaagttgaatcgcgtccagctccaagtgaacaagaatttcaccaagacccatggcagtgttaaggccgagaagaccgtgctggcatcgaagtactcctttttggcggagacctctttcagtgtcagttcgtcgggtgccaccgaaaacctgcacaattccatgaacaatgagtactacggcgtgattgctatcggaacgcctgagcagagattcaacattctgttcgacacgggatcggccaatctgtgggttccaagtgcaagttgcccggcttcgaataccgcgtgccagaggcacaacaaatacgattcttcggcatccagcacttatgtggccaatggtgaggagttcgccatcgaatacggaactggtagtctgtcgggtttcctgtccaacgacattgtgaccatagcgggaatcagcattcagaatcagacattcggcgaagcactcagcgagccgggtacaaccttcgtggatgctccttttgctggaatcctgggactggccttcagcgcgattgccgtcgatggagtgactccgccgttcgacaacatgatctcccagggactgctcgatgaaccagttatctccttctatctcaagcg

SEQ ID NO: 14087 - DNA, 1272 bp, DROSOPHILA
atggaagttggccaactaataattataccactatttttactgctgcttgaccattcgatgggccaactcaggaggactcccatcactcgtcagatcaaccagaacaagacccatgccaatgtgaaggcggagaagatcttgctggcggccaagtactttctggtggacagacaatcatcacaaacgacacaggtgctagccaacggattcaatctggagtacaccattcgcctctgcatcggaacaccaccgcagtgttttaatcttcagttcgacactggatcatccgacttatgggtgccgagtgtaaagtgttcaagcaccaacgaagcctgccaaaagcacaataaatacaactcgagtgcgtccagttcccacgtggaggatggaaaaggatttagcatacagtacggctcaggcagcttgtctggatttttgtccacggatacggtggacatcgatggtatggtaatcaggaatcagacattcgccgaggccatcgatgaaccaggttcagcctttgtgaacaccatttttgatggcataattggaatggcatttgcgtccatttccggcggagtcaccactccctttgacaacatcatccggcagggattggtcaaacatccggtgttctccgtctacctcaggcgcgatggtacctcacagtctggcggagaagtcatctggggtggaatcgatcggagcatctacaggggttgcatcaactacgttccagtatcgatgcctgcctattggcaatttacggctaattcggtgaaaatcgagggcatccttctctgcaacggatgccaggccatcgccgatactggcacctcgctcatcgccgttcccctgcgagcctataaagcgatcaataaagtgttgaatgccactgatgccggagatggagaagcatttgtggactgcagcagtctctgtagattgccgaatgttaatctaaatatcggtggcactacctacacactaacgccaaaggattacatctacaaggtccaggcggataacaatcaaaccctgtgcctatccggcttcacatacttgcagggtaatttactatggatactgggagacattttccttggaaaggtctatacggttttcgatgtgggcaaggagagaattggattcgcaaaactaaagaagcattcaagttatagggtttatgcctccagttatgtgaaagaaccatctagctacggcatcgattacccattctacggcgatgaatactccagattctttacttga

SEQ ID NO: 14088 - protein, 423 aa, DROSOPHILA
MEVGQLIIIPLFLLLLDHSMGQLRRTPITRQINQNKTHANVKAEKILLAAKYFLVDRQSSQTTQVLANGFNLEYTIRLCIGTPPQCFNLQFDTGSSDLWVPSVKCSSTNEACQKHNKYNSSASSSHVEDGKGFSIQYGSGSLSGFLSTDTVDIDGMVIRNQTFAEAIDEPGSAFVNTIFDGIIGMAFASISGGVTTPFDNIIRQGLVKHPVFSVYLRRDGTSQSGGEVIWGGIDRSIYRGCINYVPVSMPAYWQFTANSVKIEGILLCNGCQAIADTGTSLIAVPLRAYKAINKVLNATDAGDGEAFVDCSSLCRLPNVNLNIGGTTYTLTPKDYIYKVQADNNQTLCLSGFTYLQGNLLWILGDIFLGKVYTVFDVGKERIGFAKLKKHSSYRVYASSYVKEPSSYGIDYPFYGDEYSRFFT

SEQ ID NO: 14089 - DNA, 4980 bp, DROSOPHILA
caccaggtcctggcaaattttggagaattgatatatctgtggtttatgtatggcactacgtttttcaggcttccattcatatttaatggcatcggatactcgggcagaacacttaagggtttttttaatgtccttatatgattttccttcctttcttagcttaagaattaacattattttcttttggaagcagtactgttctctacccactaaaatgtaattttttaatttttttttaaatttattgcccttttaaatgtacgaattaacttaaacaaatacactttttaaaaaatatttgatcatttcattacttttacattgggcaaaaccagacactactattcttatgaacagcctaaaagttgtaaatttgctcaagaatgtaaataaagaaggataacatgaaaaactaacgggattttcttgtttttcctatctacacattacatttaacaaaaataagtggaataaaaagtcgatcccgttacgtaattgagtaaaaaaagtacttttgaacttcagtaattaatttcctttggaacgatctttttaagtttgtttctaaaccaaggttcgcgtctgcactaaacgttccttacgtttttacataccaaaatgacttatccataaagtgctataatattcattaaaaaaaacgtgaccgttggtatttaaaatgtatgtcggtattatttaacctttcagagagttccactattttactaaacagcttggcactaactgaagagagcatgattgcttctggtctatagcattgttctcctgcaatcgggcccaattcgattaacattcataagagctttgggtaagatatgcaaatcttatttatttttattcaattttatgaaaatatatttaaaaagggtatttaaaattcactacttaaaaatttatttctgttttcaaactatggtatttattaatagaccggtcggtattttccattgttttcgacgcggtcacacttagtaataagaaatttcttacgcttattatttcaccatttcatttgcgaaatccgagagaaattcaaaagaaaccgggtgtgcgtggcggcgaatttcggtgtcagttcgaaaaatccattatttccgtaccaaaattgtgtcagtgtgagaggcttggaggcggtggccacgcaatccgggcgaccgatcgttgggtaacctagcgcgagaaccgaaaaaccgccgtagtcatggcgttccggctgcttggcacggccaaaacgatggccggaatgatgcggcgcaactacacggcgggttccttgccgggaaaggtgcccacatccctcacttacaaggctagccaagtttttaatgccccctccttttttttttgcagggacaacgcacacacatgggtgccacgggcgccggggtttacatcctgcccacggagctgtcgcccctgctgcgctacgtggtcaaacagatccagctgctgtgcaaaaagccgccgaagggatttgaaaagtatttcgaagccggcggcaagtcgtctggccaaccgaagggatccgtcggcgataagaagccacccgcgggttccagcaaatccgcctcggagaagcccagcacatcgacacccgcctcagttaaacccagcagatcccaaacagacgcgaaatcggactggaacttcggcatgttcagcaacagctcgagggggccagcaggaaaaggaggcaactcgctgggcggacgacctctgggcgagaacggtggcggcggggacagggagcggtggatccttctgggtgccatcggagccgtcgtcctggtgggttcgttcgccttcttcgagatgggctacaaggagatctcgtggaaggagttcgtcaacaggtgagttctagcattgcgtgttgcataagagttcgatcaaaacatgtgaaactagaagctgtggaatatatacataattccatggatctagatctttcgcctgttgtgatacgactgcaattctcactattatatttatctctatttcccaaaaacagctacctgtcgaagggcgtcgtggagaagctggaggtggttaacaagaagtgggtgagagtgcgtctgcagcagaacagcaacagcggcagcggcgtcttgtggttcaacatcggcagtgtcgatagcttcgagcgaaacctggaggcagcccagacggagcagggaacggaatccatcaactttgtgcccgtaatctaccgcaacgaggtggaggccgccagtctgacgggtctgctgcccacgttgctcatcataggctttctggtctatatgatgcggaagtcggccgatatgatgggtggaggccgtgggcgcaagggtggtggtctttttggtggcgtcatgcagtccaccgcaaagctaaccaatcccaatgagattggtgtgggtttcaagtaagttggcgagacttcacagtacatacctaataccttttatattctttacagggatgttgccggttgcgaggaggccaaaatcgaaatcatggagttcgttaacttcctgaagaacccgcagcagtatattgatttaggcgccaagataccgaagggtgccatgctaactggcccacccggaacgggtaaaacgctactggccaaggctaccgccggcgaggcgaatgtaccgtttattaccgtgtcgggatccgagttcctcgagatgtttgtgggcgtgggaccttctcgtgtccgcgacatgttcgccatggcccgaaagcatgctccctgcatcctcttcatcgacgaaatcgatgctgtgggtcgcaaacgtggtggcaagaccttcggtggccactcggagcaagagaatacccttaaccagcttctggtggaaatggatggcttcaataccactacgaatgtggtcgtactggccgccactaatcgtgttgatattctggacaaggctctcatgcgaccaggtcgtttcgatcgacagatttatgtaccagcacctgatattaagggcagggcgagcatctttaaggtgcatctgggtaacctgaaaacgtcgctggacaagaacgagctgagcagaaaaatggctgcactgacaccaggcttcacaggcgctgacatcgcgaatgtttgcaacgaagctgctttgattgccgcccgcgactccaaggattcgatcgtactcaagcacttcgagcaggccattgagcgtgttatcgctggcatggagaagaagaccaatgttctggcgccggaggaaaagcgaacggtggcacaccacgaggctggccatgcggtggccggttggttcctggagcacgcagatcccctgctgaaggtctcgattataccacgcggcaagggtctgggctacgcccagtatctgcccaaggatcactacttgctgtccaaggagcagttgttcgatcgcatgtgcatgacgctcggcggacgtgtggccgaagagctgttctttaatcgcattaccactggtgctcaggatgatctaaagaagatcaccgatattgcctactcccaggtggtgcgtttcggcatgaacgagaaggtcgggcaggtcagcttcgatgtgggccaggccggtgatcccgttttcagcaaaccatactcggaggacacagcgcagctgatcgacaacgaggtgaggtcgattatcaaatgtgcccacgaggccaccactagtctgctgaccaagcacaaggagaatgttcaaaaagtggcggaaagactgctccaaaacgaagtgctcagccgtgatgatatgattgagctgctgggcccacgacccttcaaagagaagtcaacctacgaggagttcgtcgagggtaccggctccttcgaggaggacaccactctgcccgaaggcctcaagagctggaacaaggaaaaggaacgaacggagcctctggacgctggcagcacgccatcatcgccgcccaccaagcccgtaactgcccagagcagttaggcaacgatcttcgctcatgtggatggggagttttggtgtggtagttcgagggtgccgacatctgtttgtttttgttgtaatccctaaacgcggaccggagaaaaccccgacatgtggcagatcgagaaggcagggctcaaggagttcctagaccttctggagttacagttctccacgacgcgttcattattgtttttgcataattttaagatacccacatggataacttgttcccgtgttgagcaattaagtgctagcctgtactaaattccccgtatgcgtagtttcaaaatggcaataaagaatggaaatgacctgtcagtgtggaaaagcgaaattaaacgatgttatcaaggcgaaaaataatcgaatcagtgttgttactgccttacggtttaaacccgttttcgaaaacagcaaaagttgcaaaatacatacaatgtattgcttcattatgtatatttcatacaataaaatgttatgataacattggaatgcaaaatttgttcttaactttgggatagccagctttattcttaagttgactgatagtgccaggttaaaatttttttcagtgtgagcttttaaagctgcacgcggtttaagagagtgccgctctcttcggtaagctttctccgcaaactttcgccggctactcttcctcgctgcggcttatcacttatcagctgtgatgctgaagtacatgcgccatgtgcagccggtaaatagtgcaactgccgcagtcggcgcctctgccggtgcaaagctccgtaggggcagcaccagcggcaacaacaacagcagcaacagcagcgaaggcagagagtgcagcagtgcagtcgacgtcgctgccgccggtcgttttggggccgtcagttgggttttggggtctcgccgctcagtgtcgtcttgttggttgtcgcgttcgtgtgcgcgcactgagaaaagcggaacgccagcgttgcactaaccgttgcagtttctatattactctcgagtc

SEQ ID NO: 14090 - DNA, 2703 bp, DROSOPHILA
aaatttcttacgcttattatttcaccatttcatttgcgaaatccgagagaaattcaaaagaaaccgggtgtgcgtggcggcgaatttcggtgtcagttcgaaaaatccattatttccgtaccaaaattgtgtcagtgtgagaggcttggaggcggtggccacgcaatccgggcgaccgatcgttgggtaacctagcgcgagaaccgaaaaaccgccgtagtcatggcgttccggctgcttggcacggccaaaacgatggccggaatgatgcggcgcaactacacggcgggttccttgccgggaaagggacaacgcacacacatgggtgccacgggcgccggggtttacatcctgcccacggagctgtcgcccctgctgcgctacgtggtcaaacagatccagctgctgtgcaaaaagccgccgaagggatttgaaaagtatttcgaagccggcggcaagtcgtctggccaaccgaagggatccgtcggcgataagaagccacccgcgggttccagcaaatccgcctcggagaagcccagcacatcgacacccgcctcagttaaacccagcagatcccaaacagacgcgaaatcggactggaacttcggcatgttcagcaacagctcgagggggccagcaggaaaaggaggcaactcgctgggcggacgacctctgggcgagaacggtggcggcggggacagggagcggtggatccttctgggtgccatcggagccgtcgtcctggtgggttcgttcgccttcttcgagatgggctacaaggagatctcgtggaaggagttcgtcaacagctacctgtcgaagggcgtcgtggagaagctggaggtggttaacaagaagtgggtgagagtgcgtctgcagcagaacagcaacagcggcagcggcgtcttgtggttcaacatcggcagtgtcgatagcttcgagcgaaacctggaggcagcccagacggagcagggaacggaatccatcaactttgtgcccgtaatctaccgcaacgaggtggaggccgccagtctgacgggtctgctgcccacgttgctcatcataggctttctggtctatatgatgcggaagtcggccgatatgatgggtggaggccgtgggcgcaagggtggtggtctttttggtggcgtcatgcagtccaccgcaaagctaaccaatcccaatgagattggtgtgggtttcaaggatgttgccggttgcgaggaggccaaaatcgaaatcatggagttcgttaacttcctgaagaacccgcagcagtatattgatttaggcgccaagataccgaagggtgccatgctaactggcccacccggaacgggtaaaacgctactggccaaggctaccgccggcgaggcgaatgtaccgtttattaccgtgtcgggatccgagttcctcgagatgtttgtgggcgtgggaccttctcgtgtccgcgacatgttcgccatggcccgaaagcatgctccctgcatcctcttcatcgacgaaatcgatgctgtgggtcgcaaacgtggtggcaagaccttcggtggccactcggagcaagagaatacccttaaccagcttctggtggaaatggatggcttcaataccactacgaatgtggtcgtactggccgccactaatcgtgttgatattctggacaaggctctcatgcgaccaggtcgtttcgatcgacagatttatgtaccagcacctgatattaagggcagggcgagcatctttaaggtgcatctgggtaacctgaaaacgtcgctggacaagaacgagctgagcagaaaaatggctgcactgacaccaggcttcacaggcgctgacatcgcgaatgtttgcaacgaagctgctttgattgccgcccgcgactccaaggattcgatcgtactcaagcacttcgagcaggccattgagcgtgttatcgctggcatggagaagaagaccaatgttctggcgccggaggaaaagcgaacggtggcacaccacgaggctggccatgcggtggccggttggttcctggagcacgcagatcccctgctgaaggtctcgattataccacgcggcaagggtctgggctacgcccagtatctgcccaaggatcactacttgctgtccaaggagcagttgttcgatcgcatgtgcatgacgctcggcggacgtgtggccgaagagctgttctttaatcgcattaccactggtgctcaggatgatctaaagaagatcaccgatattgcctactcccaggtggtgcgtttcggcatgaacgagaaggtcgggcaggtcagcttcgatgtgggccaggccggtgatcccgttttcagcaaaccatactcggaggacacagcgcagctgatcgacaacgaggtgaggtcgattatcaaatgtgcccacgaggccaccactagtctgctgaccaagcacaaggagaatgttcaaaaagtggcggaaagactgctccaaaacgaagtgctcagccgtgatgatatgattgagctgctgggcccacgacccttcaaagagaagtcaacctacgaggagttcgtcgagggtaccggctccttcgaggaggacaccactctgcccgaaggcctcaagagctggaacaaggaaaaggaacgaacggagcctctggacgctggcagcacgccatcatcgccgcccaccaagcccgtaactgcccagagcagttag

SEQ ID NO: 14091 - protein, 793 aa, DROSOPHILA
MGATGAGVYILPTELSPLLRYVVKQIQLLCKKPPKGFEKYFEAGGKSSGQPKGSVGDKKPPAGSSKSASEKPSTSTPASVKPSRSQTDAKSDWNFGMFSNSSRGPAGKGGNSLGGRPLGENGGGGDRERWILLGAIGAVVLVGSFAFFEMGYKEISWKEFVNSYLSKGVVEKLEVVNKKWVRVRLQQNSNSGSGVLWFNIGSVDSFERNLEAAQTEQGTESINFVPVIYRNEVEAASLTGLLPTLLIIGFLVYMMRKSADMMGGGRGRKGGGLFGGVMQSTAKLTNPNEIGVGFKDVAGCEEAKIEIMEFVNFLKNPQQYIDLGAKIPKGAMLTGPPGTGKTLLAKATAGEANVPFITVSGSEFLEMFVGVGPSRVRDMFAMARKHAPCILFIDEIDAVGRKRGGKTFGGHSEQENTLNQLLVEMDGFNTTTNVVVLAATNRVDILDKALMRPGRFDRQIYVPAPDIKGRASIFKVHLGNLKTSLDKNELSRKMAALTPGFTGADIANVCNEAALIAARDSKDSIVLKHFEQAIERVIAGMEKKTNVLAPEEKRTVAHHEAGHAVAGWFLEHADPLLKVSIIPRGKGLGYAQYLPKDHYLLSKEQLFDRMCMTLGGRVAEELFFNRITTGAQDDLKKITDIAYSQVVRFGMNEKVGQVSFDVGQAGDPVFSKPYSEDTAQLIDNEVRSIIKCAHEATTSLLTKHKENVQKVAERLLQNEVLSRDDMIELLGPRPFKEKSTYEEFVEGTGSFEEDTTLPEGLKSWNKEKERTEPLDAGSTPSSPPTKPVTAQSS

SEQ ID NO: 14092 - DNA, 3082 bp, DROSOPHILA
ttgctgttgttgttcttgttgctgtaccctgcttaggtagaattttcccacaatttgtaggcggcagagggagagagagtgggaaggcaagagagggagagaaagagcgatgaattttacgcgcgcaaacagcaaggagagaacgtagccaaaacaacaaccgatttcacggaagttcgctgcacaactgaaccaaaaagagaccgaaaccgagagaatttgcccagcggattggattggacgagccgagacggctcggaaggagagcggggcgcccccaccccacggcgaacttatacaattaacgcctggtttcaattgtttataaactcgcaggactcgcatacgtaatgcaaacagatttcacaagtgcacccaattgccgttgggcttagtttcgaccagaagcacaatgatattgtcgaattgcttttttgcctttttgcgcgtctcttgtgcggggtaaaaaatgttcttctttttgaacgtcgccgtccacgctttgcattttacgttctgctcgatttgttcgcgctctttttcaccgtattttagtagctgcacattgggtagcgtatggggattggatatttcacaatttggctgcggagagagctcgaataaagcgtgaaaaacaagtttttagcaatatttttcgccttttttacagccatgccattgaaacacgcgcagaagctagtgatggacgatagttcgatagctggcgcagcgtgttggtgtgactgccaaaaatgcaaccgtgtgacaggcatcgctgtgcttttcccttgcggttcaatgtaagcatatcgatacttggccagtaccagcaattattgttaaaatcttatttacacgggctatttaaaaatattatcttgagtaattatcttaattttaaacgaaccattatagcacgtccagtatcacagtggatcaatcataactaatattcgtagttagctatcgatagttttttccatccctgaatcgaggttcagtgtcataccgatttgacaagctctttccgtttccttttcgcgtgaacgtccaacatgagagccaagggattggttagtatttgccaaaataaatgatttatacaatcattattttagtttaaaatgcgtgcaacagataagcaaaaacatagcctatttggcgtaatcgttggattttttaaaactccgtaatttctgtgtaaaaaacgacattgtcgtggacaatgtttgccgagccacttttcttaaaaatgtgatcctatctaactcacaaaagtaatttacataattgtgagaaactattattcagtacgaatttataactaactattcaaacatattcaatataatagaaatacaactgctttgtgccgccgaaaacataaccttcaaaaaccaacagccatgcgtgtgtttgtttgcctgcgactgttcgcatttgtttacaattgttttatgtagaccatttaaactaatccaaatcccatttgcagttgaaggagtacgaggtcgtgggccgcaagctgcccagcgagaaggagccccagactcccctctacaagatgcgcatctttgcccccgacaacatcgtggccaaatcccgcttctggtacttcctgcgccaactgaagaagttcaagaagaccaccggcgagatcgtgtccatcaagcaggtgtacgagacgtcgcccgtgaagatcaagaacttcggcatctggctgcgttacgattcccgctcgggcacccacaacatgtaccgcgagtaccgtgacctgactgtcggcggtgccgtcactcagtgctaccgcgacatgggagcccgccaccgtgcccgtgcccactccatccagatcattaaggtggactcgatccctgccgccaagacccgccgcgtgcacgtgaagcagttccacgattcaaagatcaagttccctctggtccagcgtgtccaccacaagggcaacaggaaactgttctcgttcaggaagcccaggacctacttccagtaggattctcctgcatcctatacctatgacttagtggattttttcaataaatgagaacgttgaagagtacactagttgtgaaagcttctttatttgagttctccacaggagtatatgacaatcttttggctgggagtgcccgacttggagccacaacgttccatcttgcgcaccacctcggcgccactgatgacatggccaaaaacgacgtgcttgttgtccagccaatctgttctgtagaacaaaagaaatgtaattagtagaaggaaatatttcagttaaattatttattgtaaaaccagcttactttgtggtacatataaaaaactgcgagccatttgtgttggcgcccgagttggccattgaaagagttccaaaactgttgtgtttcagattgaagttctcatcgttgaactttttgccatagatggacttgccgccggtgccattgttgttggtgaagtcgcctccttgacacatcttttgaatggaaagaatgcataaatgaagaaaactatgccaaattattatcttacaaactcgggtatcacgcggtggaaggagcagcctttgtagccgtagccctgctcgtgggtgcacaattgccgaaagttctccgccgtcttcggcaccacatctgcccggaggagcatcacaatgcgaccggcgtcattgccaccaatccgtatgtcaaagaagacttgtggattgcgtttctctgccttttcgatgactgccggcccggtggatggtgtttccactttctctgcctccggttcgccttccggctgcaacgtggctcccgcatgcttctgcaaccagtcgtcatctgcccagataggcttgaaactgtcctccttaacgcgcactggtttcgccaagttcacgcgaattgtgcgtccgcagagctcggagtcattctggaaatagttgattcgttgtatttccgctgcaggttgatctacttgtgcaacaacttcttaccatattatcaatggcagcagccgcatcctcgctctgttcgtattctataaaggcgaatccgcggtgtcgctgtgattcgtagtccgccgg

SEQ ID NO: 14093 - DNA, 660 bp, DROSOPHILA
gtgtcataccgatttgacaagctctttccgtttccttttcgcgtgaacgtccaacatgagagccaagggattgttgaaggagtacgaggtcgtgggccgcaagctgcccagcgagaaggagccccagactcccctctacaagatgcgcatctttgcccccgacaacatcgtggccaaatcccgcttctggtacttcctgcgccaactgaagaagttcaagaagaccaccggcgagatcgtgtccatcaagcaggtgtacgagacgtcgcccgtgaagatcaagaacttcggcatctggctgcgttacgattcccgctcgggcacccacaacatgtaccgcgagtaccgtgacctgactgtcggcggtgccgtcactcagtgctaccgcgacatgggagcccgccaccgtgcccgtgcccactccatccagatcattaaggtggactcgatccctgccgccaagacccgccgcgtgcacgtgaagcagttccacgattcaaagatcaagttccctctggtccagcgtgtccaccacaagggcaacaggaaactgttctcgttcaggaagcccaggacctacttccagtaggattctcctgcatcctatacctatgacttagtggattttttcaataaatgagaacgttgaagagtacacta

SEQ ID NO: 14094 - protein, 177 aa, DROSOPHILA
MRAKGLLKEYEVVGRKLPSEKEPQTPLYKMRIFAPDNIVAKSRFWYFLRQLKKFKKTTGEIVSIKQVYETSPVKIKNFGIWLRYDSRSGTHNMYREYRDLTVGGAVTQCYRDMGARHRARAHSIQIIKVDSIPAAKTRRVHVKQFHDSKIKFPLVQRVHHKGNRKLFSFRKPRTYFQ

SEQ ID NO: 14095 - DNA, 5923 bp, DROSOPHILA
ccgaccgcatgactcttcgtgctccggatccgcatagtttcgatcagtattgcagttgctttgccccacggtgccgagagcttgacaccgatttttcagtgacacagtgaagtcaaggcagtggcctgaaaattctgctgcgttggtagaatttatatacaaaagcaaaaaaaattgagataaaattacaataaaattataaacacaaccgttccactttccaaactgccgcactaagctttttataacattcaattggcgctacacaaattgtgaatggcttatgggcgggcgcaaacatttaataatgaataataaattatttagatgttggccaggctcagggtaccagcatccagtagccagaagacgagtgaaaacgatctttctccgtatgcattttctcttcaagattgctttattgggatttaagctagttgctttgctcttaggaattaagtaaaaatattataagactggaaactggaactagcgccaacgacgacacgataaatattaaatagtaacattattcgcaatacaatgcaaatgtaagtcggctgaaacctcaagccaagattgacggatctgaacatccatcacaagtccgatatagccagcttgttgaacaagatatttagcggaggctaatctagataaacgacacgtttgggccagggccctcagactttataagagccgagctgccgatgacaagatcagaaaactgtctccaaacgcttacaaaatgagtagtctgcgttgcaaggtgagatgagatgattatggtttcatcggcatggacacattaatggtaatttcaatctgcagatcctacagttggctgtgctgcttgtactggctgctttgcagatcggagcagatcatttggagagcgatgaatgcggctgcgggcggcggggctgagatgatacatcaataaacaagcgtcaagcaatgcatacaattcgaactgttgtgggttctggggcaaaacctatcagaagacacgtacggctggtcgcggggccagctgtgtttcgcacatggcccgtagccgggcgagcagcatgtgcaaatgctttaagcaagctgtcgacgattgctgggcccctaggccatgtttcccagtcaaggtttccatatacatgcgcttgtacagctttgacaactgcttgggatccttgccggccagcgtgagcttcgtaagcgtcttcagcgcattctgcaggcggctttcaaagagcgtcaaatggccggcgaactcgtcatcggccacttggccactgttagtatcgatgacgtgggcaaatatgaggtgacactgtaaacaaatttccaaagccgcttgcatttgcttgatcttctgtgcggtgtgagtggaaactgccggaaaattgaattaatttattttctaactcttagtggcctttaccatctggtatactcacgttcggccagaaattcatgaagggaaatccgctctagctgcaccaccaacaggtctcccacctccttaaggctctctagaatttgagtggccttctcgtagtggtatttacagagctgtagagtagatttgggcagctgagagaaatcacaacagccatgagaacgcagctgcgagtagtggaaggaagcaatcctggaaaagtcaataattgtttttatgcatttgctaattgcaactcatagtcctccgtcctaccttttgtgtattaagcccgatcgaaaactgtatagcacttgtcgtgcaccagggtgttcgacatcacaaagtcgcaacgatttctgaagcaattccagcacttctttggaggcgtcaactaggctggatttgtctgctgcgctgtggtcctgaagttgtttagctaacgtaaaagtggcagtggataattcccaatggacgaggtcccatagttcggggtttgctttacgagtatccagacaatctttggccttcacgtaatagctgaatgcctcgttgtagaaggctttttggctttctaaggttatggcactaaatgaaaaggagttaaaacgaatcatgattattaaaacactatttacctctcattgggcatgataagatgggcgcgcaggcgcataaatctaccaatattgcaatatagaaacgccaaattgacattatctttcacggcagtgaaggcttctattcctcgacgtaggcaatcataagaattaactgtcagtttcacatacaacggctcggaaggatctgccgttgggctatcctccgtttggtcatttccagcgtcttttgtggactccttcttcttcattaactcactgtattcctctgcaatttataatttccattagtatatatttatgatttcaatagttgcgctgcgtaccttgagcccagtacatgtacttaagaccaagctcgttccgcacgtttcctagtcgccgaagcagttcattgctttccgctttctgggcatgctccaatgcttgttcgtagcacttgcagctgtgcagcatcacttgctccacattgttggaaggcgccaaggagggcagttcctcttcttcgccttccagctcctgagccaactcgtcgccgatgaaatccatcgagggatccaactccccaaactgctggatgtactcctcaatggattcccagtttttcgaaatctggaaaaaacagtcacctgcccggccgagcaagcaactgtactgtgaaaccacattggccatatacttattgagcacttgttggcaacgacaggccagctcaatggatcgcaaggtagatccgtaccggcgggattcataatagtgctctgccagggtggcaaatgtcaggcaggccttttctaacagcagaagttttaagtggacgttccaggagccaaagtgctgtgtgttaaacttggcactcatctgctgattgctggcattggcggatttggacttggtggtagtggtgagttccttagatttgctgcgtttggcctgcgttttggagtttggtttcttcacaacttgtgttggctgctggctcactttaagctgctcgtatggtaatggaattgcgctgcaaggcttcgccatgttcggattttgctcctcgtgcagaattcggcgcttctcctcttgtttggcatttgtctccgattccttcagtttctcctcttgacttccattgaaatactgcaggcatgatagtccagcactaatgtgctccaaagaaaagctacaccgctcagcagttgtagctattagaggagccggcttggacttcttggcatgagatttaaagtctctcagggcatcgcatatatgacgcacagccacgttagctttgccaccgctctgctcgctactttggtagctcttctcacttgagtagtctagaacatcatcttcatagtcctcctcgtcctcctcttcatcgtcatcatacaacgattgatcatctgagtccacttcctcaaacttcggcgcctttggatcgatgcccgccggcacatgtagatccgagagtatgtagtgggaggagctcacgatttgtgggtactgctccttgggcagtagcttgatgcagttatccagtagtgcacgtatattgcccgctgccttaggacttatgtgaggcagtgtgttcttcatgtttcgagccactgaataaagcagcattcccaccggaacggtgaagggattaacctgttgctcgggtggatcttcatccgacttctcagatgcctgactttggcataatgtagttagatcgtacaacttgacaacgtcatcgttgcgccccttaaagagccaataggtgtgacccgccttggtggcattggccttaagaaaggccagaatgttttgtgcgacgttgcgaaccacttggggcgaaaactgcgagttctccaggtacggcaggtcctcggtcttgatgatctcgtacttttggacaatgccatccagatgatagcacatcaccacctcgggcacattacacataagattgtccagccagtaatcgattccggttaacacatttataggctgagccgcatcccttaaacgcaagctgatgcacggcctgttgggtcctccaaatatgggcatatctgtgccgataagcatgcgtatatcctcaaatgtccagaccacgtttctattgaaggcatggctcgactttgggtctggcacgttctcctctattttcggttctgggagaactggtcccgtgatgggcaatccctgtttgcggctggttaactgagtgggtgtattggccacatcgtagtccagctcatcaccagtttgcttaaggctgtgatacaggaacttggacagcaaattctttgtttgcagcgcctcccgggaccgctcctttaggcagtagttgtgctgtgtatctccataggtcaggacgtgctccagaataaaggatcttagccacttccagtcgtcatccgcctttcgcagcagatacttctggatgtcgaactcatccaggagcaacgtgttgcccaccttgtgcacaaccatgctgatggcgctcttcgcgctgtaaggcaacttgagtagctgcttgatattctccgcgtcgctgaccacatccacctctcccacgcagtccggaaacatctggcccaatcgaaaactggcaaagccagcactttggtagagggcctggtgtaatccatgactgctgtgcgacgttgtcagccagttgagaggcggaagattcaagttggtgttgcactccagccgcttgaagtgggctggcactggaacgggagacaacttaatcaccgcctggctttttacgacgtccaactcatgtggtccaatactcctgcacggttcaatctatcgaaaaacatgtgttatttatttaagcttctttgcgcacattcttacttcttcgtttctatcttccattattgcgctcgctcattggtaactccctgaaaatccaatcccgtggaatattcaagaaactttcgagcagatgtgtttttgttttgccggctcagctgatagctgccgcagttttccaacaccggaccagaccggcgctgccaacttagtgccagcacagttgcatgggatcaggtagacttcaaaacctctacaatttataagggtttaaactaagtttcaagactaattatatatggcatacaataaacctcatatttagttattcaatacttccaacacacttttgctctctagatgatcgaaatgaaacttacaatgaaatttctttcagtggtagctcaaaatttaagcataataattatttcaaaaactatgtgaaaatataactgtgggaaaccgtcccctctcctacgccactggccaattccaagctgatgactttctgatgctcgttatccagcactggtatattattttgttttccattcagtaacacgattatcacaaactgtcgcaaattttcccgaattgaatacaaatctgacacaaaagcatgacactgtttgccctcatcgccctgctcagcctgctgaacacaatcctgccagatttcataaggaactacgtgagtaccatccgcaagagaaaaccccagtgtagaaccttatcctgacctgcagctcaaagtgtcgcggttgtggggcgtaaggaactccgcggaaattcggcagttgcagacagaactggacgatgcccggaagcaagtggaggtggtcagcaatgcggagcattccggagagtacgccaggaccatcaaaattatgcgcgccgagcgtaaagtatcagaggcggaggcgaaactgaaatctgcccggggaatggagaacttcatgcggataagcatcgatacggccatgttctacggatctaaggtgctgctctcagcaataaccgtgtttatcagcatccggaatcgtggaacgcccgtcatgatcat

SEQ ID NO: 14096 - DNA, 3438 bp, DROSOPHILA
atggaagatagaaacgaagaaattgaaccgtgcaggagtattggaccacatgagttggacgtcgtaaaaagccaggcggtgattaagttgtctcccgttccagtgccagcccacttcaagcggctggagtgcaacaccaacttgaatcttccgcctctcaactggctgacaacgtcgcacagcagtcatggattacaccaggccctctaccaaagtgctggctttgccagttttcgattgggccagatgtttccggactgcgtgggagaggtggatgtggtcagcgacgcggagaatatcaagcagctactcaagttgccttacagcgcgaagagcgccatcagcatggttgtgcacaaggtgggcaacacgttgctcctggatgagttcgacatccagaagtatctgctgcgaaaggcggatgacgactggaagtggctaagatcctttattctggagcacgtcctgacctatggagatacacagcacaactactgcctaaaggagcggtcccgggaggcgctgcaaacaaagaatttgctgtccaagttcctgtatcacagccttaagcaaactggtgatgagctggactacgatgtggccaatacacccactcagttaaccagccgcaaacagggattgcccatcacgggaccagttctcccagaaccgaaaatagaggagaacgtgccagacccaaagtcgagccatgccttcaatagaaacgtggtctggacatttgaggatatacgcatgcttatcggcacagatatgcccatatttggaggacccaacaggccgtgcatcagcttgcgtttaagggatgcggctcagcctataaatgtgttaaccggaatcgattactggctggacaatcttatgtgtaatgtgcccgaggtggtgatgtgctatcatctggatggcattgtccaaaagtacgagatcatcaagaccgaggacctgccgtacctggagaactcgcagttttcgccccaagtggttcgcaacgtcgcacaaaacattctggcctttcttaaggccaatgccaccaaggcgggtcacacctattggctctttaaggggcgcaacgatgacgttgtcaagttgtacgatctaactacattatgccaaagtcaggcatctgagaagtcggatgaagatccacccgagcaacaggttaatcccttcaccgttccggcgccgaagtttgaggaagtggactcagatgatcaatcgttgtatgatgacgatgaagaggaggacgaggaggactatgaagatgatgttctagactactcaagtgagaagagctaccaaagtagcgagcagagcggtggcaaagctaacgtggctgtgcgtcatatatgcgatgccctgagagactttaaatctcatgccaagaagtccaagccggctcctctaatagctacaactgctgagcggtgtagcttttctttggagcacattagtgctggactatcatgcctgcagtatttcaatggaagtcaagaggagaaactgaaggaatcggagacaaatgccaaacaagaggagaagcgccgaattctgcacgaggagcaaaatccgaacatggcgaagccttgcagcgcaattccattaccatacgagcagcttaaagtgagccagcagccaacacaagttgtgaagaaaccaaactccaaaacgcaggccaaacgcagcaaatctaaggaactcaccactaccaccaagtccaaatccgccaatgccagcaatcagcagatgagtgccaagtttaacacacagcactttggctcctggaacgtccacttaaaacttctgctgttagaaaaggcctgcctgacatttgccaccctggcagagcactattatgaatcccgccggtacggatctaccttgcgatccattgagctggcctgtcgttgccaacaagtgctcaataagtatatggccaatgtggtttcacagtacagttgcttgctcggccgggcaggtgactgttttttccagatttcgaaaaactgggaatccattgaggagtacatccagcagtttggggagttggatccctcgatggatttcatcggcgacgagttggctcaggagctggaaggcgaagaagaggaactgccctccttggcgccttccaacaatgtggagcaagtgatgctgcacagctgcaagtgctacgaacaagcattggagcatgcccagaaagcggaaagcaatgaactgcttcggcgactaggaaacgtgcggaacgagcttggtcttaagtacatgtactgggctcaagaggaatacagtgagttaatgaagaagaaggagtccacaaaagacgctggaaatgaccaaacggaggatagcccaacggcagatccttccgagccgttgtatgtgaaactgacagttaattcttatgattgcctacgtcgaggaatagaagccttcactgccgtgaaagataatgtcaatttggcgtttctatattgcaatattggtagatttatgcgcctgcgcgcccatcttatcatgcccaatgagagtgccataaccttagaaagccaaaaagccttctacaacgaggcattcagctattacgtgaaggccaaagattgtctggatactcgtaaagcaaaccccgaactatgggacctcgtccattgggaattatccactgccacttttacgttagctaaacaacttcaggaccacagcgcagcagacaaatccagcctagttgacgcctccaaagaagtgctggaattgcttcagaaatcgttgcgactttgtgatgtcgaacaccctggtgcacgacaagtgctatacagttttcgatcgggcttaatacacaaaaggattgcttccttccactactcgcagctgcgttctcatggctgttgtgatttctctcagctgcccaaatctactctacagctctgtaaataccactacgagaaggccactcaaattctagagagccttaaggaggtgggagacctgttggtggtgcagctagagcggatttcccttcatgaatttctggccgaactttccactcacaccgcacagaagatcaagcaaatgcaagcggctttggaaatttgtttacagtgtcacctcatatttgcccacgtcatcgatactaacagtggccaagtggccgatgacgagttcgccggccatttgacgctctttgaaagccgcctgcagaatgcgctgaagacgcttacgaagctcacgctggccggcaaggatcccaagcagttgtcaaagctgtacaagcgcatgtatatggaaaccttgactgggaaacatggcctaggggcccagcaatcgtcgacagcttgcttaaagcatttgcacatgctgctcgcccggctacgggccatgtgcgaaacacagctggccccgcgaccagccgtacgtgtcttctga

SEQ ID NO: 14097 - protein, 1145 aa, DROSOPHILA
MEDRNEEIEPCRSIGPHELDVVKSQAVIKLSPVPVPAHFKRLECNTNLNLPPLNWLTTSHSSHGLHQALYQSAGFASFRLGQMFPDCVGEVDVVSDAENIKQLLKLPYSAKSAISMVVHKVGNTLLLDEFDIQKYLLRKADDDWKWLRSFILEHVLTYGDTQHNYCLKERSREALQTKNLLSKFLYHSLKQTGDELDYDVANTPTQLTSRKQGLPITGPVLPEPKIEENVPDPKSSHAFNRNVVWTFEDIRMLIGTDMPIFGGPNRPCISLRLRDAAQPINVLTGIDYWLDNLMCNVPEVVMCYHLDGIVQKYEIIKTEDLPYLENSQFSPQVVRNVAQNILAFLKANATKAGHTYWLFKGRNDDVVKLYDLTTLCQSQASEKSDEDPPEQQVNPFTVPAPKFEEVDSDDQSLYDDDEEEDEEDYEDDVLDYSSEKSYQSSEQSGGKANVAVRHICDALRDFKSHAKKSKPAPLIATTAERCSFSLEHISAGLSCLQYFNGSQEEKLKESETNAKQEEKRRILHEEQNPNMAKPCSAIPLPYEQLKVSQQPTQVVKKPNSKTQAKRSKSKELTTTTKSKSANASNQQMSAKFNTQHFGSWNVHLKLLLLEKACLTFATLAEHYYESRRYGSTLRSIELACRCQQVLNKYMANVVSQYSCLLGRAGDCFFQISKNWESIEEYIQQFGELDPSMDFIGDELAQELEGEEEELPSLAPSNNVEQVMLHSCKCYEQALEHAQKAESNELLRRLGNVRNELGLKYMYWAQEEYSELMKKKESTKDAGNDQTEDSPTADPSEPLYVKLTVNSYDCLRRGIEAFTAVKDNVNLAFLYCNIGRFMRLRAHLIMPNESAITLESQKAFYNEAFSYYVKAKDCLDTRKANPELWDLVHWELSTATFTLAKQLQDHSAADKSSLVDASKEVLELLQKSLRLCDVEHPGARQVLYSFRSGLIHKRIASFHYSQLRSHGCCDFSQLPKSTLQLCKYHYEKATQILESLKEVGDLLVVQLERISLHEFLAELSTHTAQKIKQMQAALEICLQCHLIFAHVIDTNSGQVADDEFAGHLTLFESRLQNALKTLTKLTLAGKDPKQLSKLYKRMYMETLTGKHGLGAQQSSTACLKHLHMLLARLRAMCETQLAPRPAVRVF

SEQ ID NO: 14098 - DNA, 4528 bp, DROSOPHILA
cgcccggatttgtcccagctgcgccttcagctcctccagctgcttgagaaccttctcctgtcgggcggccactgatgccgtatcgtcctgaaagtaaaagcagggaaagaggatgtgttagggaacgacatataacgttagccaaggccacaagaacacacaaaacgaagcatggatgcattataaatatttctggtactggcgtattgttctttttttttttttgttagtcggtggtttataaatagaatttcgtattttagtttggtggtcttaacctttagcagtcgctgtatttgtcggcctaaagagtccaaatcaagtgcacatgtggctgcgtttcgtcccgttctgtcgatcctgttggcctccaatttctggcaaggatcacacatgcgggaatggaatggatgtggcgttgtagacatacgttgcactttcactgtccttgcgacccgaccaacttctcactggcccggcaaataaacttacgcatgatgatgtggacgcggatgtggatgcggatgtggaggagccgctggccaaggaatccgccgccaggctaacgttcttgagaggatacatgcaggtgggcagctttatgtcgaattgcggcagcagagtcttcagttcgtacattttcgcggcgagaatcgttggataaacacaataacctgcgcaaattatcaattccaaaatgtgcttgccgtctgtgagaaactttacaaaataccaaataatttaaggcaacgctatcgctatcgttccacttaacaccattaatctggtcacattgcgtgcggtaatgaaagctattgaattcaaatttaaaatgtagtttttatacattttatacttcatccagaatattctgcttggtcaactactgttgtgtcgttatacctttaacgaaaatcaaacaaaacattgtttaactctttttaattcaagttttttttatagaaatgtctcagttattaacaaaaataaaaaacaatttgagaaaataatgcaatttatataataatttccctttctatagctaagtaaattaggagactggcaatcgttcatattattcagatttatttttaaaaatattcctagttctatgctatcttggccttgggtggcactttcggtatgcgctttatcctcctgtccacgatgtggcgtagacgcctgtccggcttgaccagctcgctctctgtcatgggctcgattacctggcccttgcgcgtgattactgccggacgggtcagcatgcggaacgccgtctccggcacaaagttccggccaactggagcacggatactggcttcgtagtctgccagggatcggaaaggaaatggtatgctggagaccatgtgctggcgcgcctgcttgctggcggactcgttgaggtaaagattatccttattctcgtcacgacgcttttccggagcagccaacttaagaagaagccgcttgtttcgtcgctccattacctccttcgaaatgccagcacccgcccaggaaccccatccaggcagggcgagctgaagctcagtgttcttaagctcggagtccttgcttttgtcccgattaaaatcagctacaatgtcatcatcctcgaaggcttgactgattgtcaactggcgttcagcagcggcgtcttcctcgtcgtattcagctgcttcatcgtctattagagcatcgttaaagcctcccgagttgcccttcttttgggtaaacaccaaagttgtcaccttgttgggatctatggtatccacagctggaatttccgtgctttctgtgttaccttcaacgtgggcagggatattattctgtgaatttttatcctcctcgtagttaaggggctcgtcaatctctatctgttgctttgtcttttttaaagccagactttttaggttttgcaagacgtccttctttttcgccttctttcccttgacaggaacttctttaagtttgtttatccgttccctcaatttctccattttcttatttagtttggctctgatatgatcctcgtgtttctcaaaaatgtcatcaatggcttttgaattcgggcttgccttggcttctttctgatcagttgggcaaatatcttccacctcccagccattttctatcttaactttcgatttcttaagtttcttcttagcaggttttacttctattaatggtttccgaatagtttctttctcctcctgctcgtcattatcctggactccttccaaatccctacgatgctcctccagtaacttttcgtttttattcctttttgtccaatattgccgccaattggaaccctcactttcaccatttccattttccgtttgctctgtagcttttctttttgtccaaggattaaagggatcgtagtcattatcctcctcctcgggtaaaactctcttcttggtggtttcatcttcgctgtctgacacctgctttttctgggtcagttccctgctaacagccaactgctcggccagatcctttcgcacatccttgtcgtacttggcccgtatctgcagattcttcgcccaagtaccggtgttcttgtgccgcaggctggcacgctcctgcactcgactcttttccagggcattaagcttttccagcgccgcctctggatcggttttctgcagcaactcgaactccttcatctgctccaacattttttgtctcttctgcagcttgtggaactttttcgatttgattttgttttgcatgcgcgcctttgctgacttttgagactcgcgcatcttcaggtaagctagctccttgcgacgggcaaatagttcgtccctggtaagcttcttttgtagtaaaagccgctcttgcttggccagctccttttcatccgtggtatccccaatttgcgctttgcgcagttcccgtagtttacggttgttagcctcgagttcttgagcaagattggacttgacccgggtgtttagaggcctggcatttgccgcagtatttacgtaaaccgtttcagatggtagggggaagatctgtaataagttttggagattatatgtgtatgtcactgttagcattggcattcattcacctgcgtctccgcagatctctgttgagccaccacagcatcccaacgaccgagtttcttggtaactccctcgtagccaatggtccgtttaattcgatccgcagctggtttctccagcggcttctgtagcacctttttgctgccatggatgttcttgagcttcttgcccgtctgactgtgcttggtggaggtgcgtaggatgtctaccagatcgttcagacccacggctctgggggcatgatccgtttccgctgacgaaacaccttttaccagctggaactcatcctggagcgactgccgctcgtcgcgcgtggacttctggatgtgctgcaccttgcccagactgccgatggcctgcagcagcttcttgtgtgcctttggttcgtagtgctcctcgtcgtcactcatttttgtcaggaaaatatttaaaatcaaataacaatacaaaaatacttcgcgcagcacgtgtgcagaataacagctgaagagttatcgataagttttgcggcccatcacaatttctacctgtgctcgatagcatgagtgtggaaaatggagctgccttcttttaaaaattaacttaaatataataacatttactactcaatacatatatctatgcatcaaaaatcaattgatttttttttaacaataaatgtacttttaactcagcgaaaacccccttcgtaacgcccttgatgattactatcgattgtccccccacgaaagaccggctatcgatgacaacgggatgaaaatattttgtttacgaattcgacattcgaatcgtcatggccgacacgaaatccggtagtggtcggcattcggctgccgggggaagtggaaacgccgtcctgtcgcccttggggcagggtcctgcgaacttggagtgtaaggactttcaggagtatctgcgcacccgccaaacgccagagtcgctggagaagctgtacaactatccgcccatttgtttggccgtttttcgggagcttccagagatagcccggcagtttatcataaggatactgttcgtggatcagcctgtgccacaagcggtggtcacatcatggggtgcccaacgttgtgccaagtatgactgtatccaattggataaacaatatcattgcaatgcattacttttgcagggagcaagccgaggcaaccagctgcctgacggctttgaacgtctggcgggtcacagccattccgggtggcctttctgcgtgggagctctcgcccaccttcaagaaaagcgtacgccaggtgctgctgggcggcggaaaaccttggcctatgaccaacacgctggataaggactcgaagcccagggacattgcttttctggatacatacgccatgtcccgctggcgttgcgtgttgcactacatggtcggcaccggaaatcgcaatggcaccgatgcggaggccattagtccggacgccgttcggatt

SEQ ID NO: 14099 - DNA, 2469 bp, DROSOPHILA
tatttttgtattgttatttgattttaaatattttcctgacaaaaatgagtgacgacgaggagcactacgaaccaaaggcacacaagaagctgctgcaggccatcggcagtctgggcaaggtgcagcacatccagaagtccacgcgcgacgagcggcagtcgctccaggatgagttccagctggtaaaaggtgtttcgtcagcggaaacggatcatgcccccagagccgtgggtctgaacgatctggtagacatcctacgcacctccaccaagcacagtcagacgggcaagaagctcaagaacatccatggcagcaaaaaggtgctacagaagccgctggagaaaccagctgcggatcgaattaaacggaccattggctacgagggagttaccaagaaactcggtcgttgggatgctgtggtggctcaacagagatctgcggagacgcagatcttccccctaccatctgaaacggtttacgtaaatactgcggcaaatgccaggcctctaaacacccgggtcaagtccaatcttgctcaagaactcgaggctaacaaccgtaaactacgggaactgcgcaaagcgcaaattggggataccacggatgaaaaggagctggccaagcaagagcggcttttactacaaaagaagcttaccagggacgaactatttgcccgtcgcaaggagctagcttacctgaagatgcgcgagtctcaaaagtcagcaaaggcgcgcatgcaaaacaaaatcaaatcgaaaaagttccacaagctgcagaagagacaaaaaatgttggagcagatgaaggagttcgagttgctgcagaaaaccgatccagaggcggcgctggaaaagcttaatgccctggaaaagagtcgagtgcaggagcgtgccagcctgcggcacaagaacaccggtacttgggcgaagaatctgcagatacgggccaagtacgacaaggatgtgcgaaaggatctggccgagcagttggctgttagcagggaactgacccagaaaaagcaggtgtcagacagcgaagatgaaaccaccaagaagagagttttacccgaggaggaggataatgactacgatccctttaatccttggacaaaaagaaaagctacagagcaaacggaaaatggaaatggtgaaagtgagggttccaattggcggcaatattggacaaaaaggaataaaaacgaaaagttactggaggagcatcgtagggatttggaaggagtccaggataatgacgagcaggaggagaaagaaactattcggaaaccattaatagaagtaaaacctgctaagaagaaacttaagaaatcgaaagttaagatagaaaatggctgggaggtggaagatatttgcccaactgatcagaaagaagccaaggcaagcccgaattcaaaagccattgatgacatttttgagaaacacgaggatcatatcagagccaaactaaataagaaaatggagaaattgagggaacggataaacaaacttaaagaagttcctgtcaagggaaagaaggcgaaaaagaaggacgtcttgcaaaacctaaaaagtctggctttaaaaaagacaaagcaacagatagagattgacgagccccttaactacgaggaggataaaaattcacagaataatatccctgcccacgttgaaggtaacacagaaagcacggaaattccagctgtggataccatagatcccaacaaggtgacaactttggtgtttacccaaaagaagggcaactcgggaggctttaacgatgctctaatagacgatgaagcagctgaatacgacgaggaagacgccgctgctgaacgccagttgacaatcagtcaagccttcgaggatgatgacattgtagctgattttaatcgggacaaaagcaaggactccgagcttaagaacactgagcttcagctcgccctgcctggatggggttcctgggcgggtgctggcatttcgaaggaggtaatggagcgacgaaacaagcggcttcttcttaagttggctgctccggaaaagcgtcgtgacgagaataaggataatctttacctcaacgagtccgccagcaagcaggcgcgccagcacatggtctccagcataccatttcctttccgatccctggcagactacgaagccagtatccgtgctccagttggccggaactttgtgccggagacggcgttccgcatgctgacccgtccggcagtaatcacgcgcaagggccaggtaatcgagcccatgacagagagcgagctggtcaagccggacaggcgtctacgccacatcgtggacaggaggataaagcgcataccgaaagtgccacccaaggccaagatagcatagaactaggaatatttttaaaaataaatctgaataatatgaacgattgccagtctcctaatttacttagctatagaaagggaaattattatataaattgcattattttctc

SEQ ID NO: 14100 - protein, 771 aa, DROSOPHILA
MSDDEEHYEPKAHKKLLQAIGSLGKVQHIQKSTRDERQSLQDEFQLVKGVSSAETDHAPRAVGLNDLVDILRTSTKHSQTGKKLKNIHGSKKVLQKPLEKPAADRIKRTIGYEGVTKKLGRWDAVVAQQRSAETQIFPLPSETVYVNTAANARPLNTRVKSNLAQELEANNRKLRELRKAQIGDTTDEKELAKQERLLLQKKLTRDELFARRKELAYLKMRESQKSAKARMQNKIKSKKFHKLQKRQKMLEQMKEFELLQKTDPEAALEKLNALEKSRVQERASLRHKNTGTWAKNLQIRAKYDKDVRKDLAEQLAVSRELTQKKQVSDSEDETTKKRVLPEEEDNDYDPFNPWTKRKATEQTENGNGESEGSNWRQYWTKRNKNEKLLEEHRRDLEGVQDNDEQEEKETIRKPLIEVKPAKKKLKKSKVKIENGWEVEDICPTDQKEAKASPNSKAIDDIFEKHEDHIRAKLNKKMEKLRERINKLKEVPVKGKKAKKKDVLQNLKSLALKKTKQQIEIDEPLNYEEDKNSQNNIPAHVEGNTESTEIPAVDTIDPNKVTTLVFTQKKGNSGGFNDALIDDEAAEYDEEDAAAERQLTISQAFEDDDIVADFNRDKSKDSELKNTELQLALPGWGSWAGAGISKEVMERRNKRLLLKLAAPEKRRDENKDNLYLNESASKQARQHMVSSIPFPFRSLADYEASIRAPVGRNFVPETAFRMLTRPAVITRKGQVIEPMTESELVKPDRRLRHIVDRRIKRIPKVPPKAKIA

SEQ ID NO: 14101 - DNA, 5234 bp, DROSOPHILA
aaagaatagactagagtgcagaatatagttgtcagcagcggaaagagtaaagataattctggtaatttacaattgttttactccaatttaagtattttaatgccaacacgccagagaaattaaacaaaaaacacaagcgtaatcagcaaatttgaacaacttcaacaaagcaaaacaaaataaaagagaatatgaaatatgtacttatatctataaatacaaatatacaaacatgcaatggacattttttaatggagttggctttaatttcacagctggggggtaaatgtggaccagtagagctgctgggtcaacaagcggccactgcgatattaacgctgaactcggccttgactgctactaactggttacattttgttggcccaacaccttcgacccaaggcagaggctactaatggttcgtttgaagatgtacatcctccagtcggaagtttttttttattcatgaaaacaaatggcaaaatggttatgtagataaatgcttacaacacttttagtttacagtttacatagttggttattgctggatgctctcacgcaggagagctccttgttgaatccctggccatggaatgcaatcgttccacaccctgccttacatccttacacgatcacatggcgactatatcatttacataggatggttcgactctattcttacaacttgctctatttatatttatacacacaaagtacacaacacacagttaattgttattagctttccaaatgactcgtttgcgtttgatttgctggtttcttattttgatttgattcctttcgatttgatttgcactagctaccccgtttcttcttaatatacacgatttgtgtacacaaaatatataattctaggattcgatttaggtatttacaaagggttgttctaatttgaattcgagttccgttcagtcggcgttagtcagtatctctcagttgctttggtccccatcccattcccccgctacaccctatctcctcagtgttcaatggtccatcgttgggattcgctgtggggatcgcaaggcgccacctgggcgtcgtccaggcttttgagtccctgatgatcgaggcacatgcccgtgttgctgtgaatgatgtgctggtgctcgtatcgccactgctcgttgaactcatcattctccatgcagggcaccatcacgacccggtacggtggggactcgctgtgctgcacggttgcacagcttagctcgttgcgcaggacatttgtgttggtgaaggagaatagctgcgacttctgcaacaccttgccgcatgggtacaagccggcgttatagggcttttcgttgttctgcagcaaatcgtccagacatatgttcgaattcacagcgtgcactttaccccatccctgcacgtccttcgtgggcacaaacttctccggatagatgttcttgaggtaccactcgaagctcttgcagcggagctttttgcgcagcattactcggtgggtgacatctccaatgtccgcgtggaactttaggtccggccggttgaggaaaaatatgttgatgtactcatccatccaaaccagagccatgcgggcagtattaataccgtgtgtatcgcgatcgttggggaatctataaagaatttaaatgagttcattataatgcagcaatagataatggcagatgacaataaagttactatagttcgcttcgaaggtcagcttcatcataaattataagtatatagttcgtttcgcttacttgtaaggatggaagtcgcggaatatgtgtccaacgcgggagcagggaatagtctcgatggtgccgccgcactgccagatgcgaaaggacatctccaggttctcaccaccccaaccgtccatttgttcgtcgtagctgcccacttcccagaagtagcgacgatctatggcaaacagtccgccggccatggtgggactgtatgctggacagatctcccgctcctgcttgcattcgcgtcgctggcgctgcttctcccgctccggcagattgatccagtcaaagtggccattccactggaatccgccgacctggaaggatttgtagccatttgtgctgtactgaaagtcgttggcatcgatgacatcgataatgggcaccagcacgctagtccgcgactccttgatgcgctgcaggagtggctcgcaccagccaatgttaccctcgcaatgggcatccaggaagatgagcacatcccccgtggcgattcgcgctccggccaatcgggcacgaatcaaacccaatctgcaaagagacaggcgaaaactttctttatgctatgtgaagggcaaaacaaaacaaatttattgggtcattcgaaaaccttcgatcgtctgccaagcacgattaacaccaacctacatggcatccaccgcgtgaagtcatccgaaagtctgcaaagctcacgggctgacgagtgtaatgcacgcagaaaccgagtctgggagttacaaaaagtcaagcccaacacacataatcgtaacttgacgaactggttttctcttcattttgtttttcggtttttagtttttggttttttgagcgtttgtcggttctggccaaaaagaagatgctccatgcgcgtctgacatggcaaacaagttattcaaatgagtccaagtcgtcagcgtttcgattagccaaattactgaacttttcctagcccataggcaataatggaaattatctaggtgtcaaattttcaccttttttgcattgttgcacttatgaacaataattaagaaacgtgtatatacacttgatttcgatttttaatatatataaatataaataaatatataaataaatataataaatgcttcgaattgtgtctcaaaaacacgaaagcatgctttaagtttaacacttagtatttgcatatgccaaaagtcgcattgaaagtgaatgagcaagtataactactatattggccactaatcaagtctataatttcttgagggtttctaaagtactggagtggatgaaaactttatcacataaacaagattggatttctatagtttggccattttactggaattccttttaattcctttttatcttgcggatatagctcacgtatttttgccattctagattgggaaaaaccgaacatctttttctgaagtctttggcgcaaacagctatttcagatacatttgttcttagttagagtaacggcagctcgacttttttaggtcagacaccttgtagcttcaactcaccggttcttgagacgcagaatggtgaccttccccgagggaatccgcgtgcgaacatagtagtccagcttggcgcccagttccacgttgtcgctaccgtcatccaccagaataatctccttcagggccttctcgttgcaggtgctcagagtgctgtgcacggtcctcagcagcacggagtagggttcgttgaagaagatgatgaccacactggcggtgggcagggagtcggaatcaaagcgctgtttggcgcacaggggattccggtggtcaccgacactccggttgtaggtcaactgctcgcttagctcctcgttgagggcaatcttcttgtagatctcatcgcctcgttccttggcggcaccggaaagatgcactgccacgccctgttcgccgagtcccaccttctgtttctgaagatccagttggattatttgttcgtacggcgactgggtggcgggtcgggctatctcgttctcactgtcgctatacgcctcgaaccgctcgcgcccatgacctcgcagagcggccgcccggacgagtggcgctacaggtggctcctctggtgaaccattctgctgcaccttgctgtagaggatgaagcagagggcgactaggatgaagatgatcagtttgccgtaaaaggaacggaaccgaggcagcatgttggcttaaaatatcttttgactgggactgctggtatctgggattctgaggtagcactagcttcacttctccactccaatctgactctgcggatcggatcgtgtgcgtccgctgtccgattttacccgctattcgatcatttaactccgattcgctggcgaaaaatccagacactttgtaagtatgattcgtggcttctcggttcgcccacaataccacaaattccagtttcttcccgctttccgttgagcgccgcgcaccgccgctttgtggagtggcttaaactagactaaatggcaatattaattctaagcgcgactgccacaacaacaaatcaaacacaacaacaataaaaaacaacgaaaacttactcgggcatgttttctatacgctgttgcttcaagcgttagtacattttgggatacttttgcagcaacagctgttaagtcggcgcttcgcagcactgccacagtgggcattgcttgaaaacttatcgttcactgttattaattaattataatatatttataataacagtttttattatttgtacaatccaggttattagtgttctgcacataatacaatgtgaaaaactacaaaattatatttaagcctttgtttgtcctgtagatttgtaataaagtcttacagaaaacgtgctcatataattttgtctttttaacaaaattttacatctttgtgctttaagaagatgtaaataactttaagcaaagacaaagaccactttaccaaaaaggtcttatacatatatcagtattctccagtgtcttttaaactggttttataagtcagataactaggctgcttggacaacaaaatacatttccctaaaattttttttacattttatattaagaaaatctcgattagttgtaaggtagcttggacattttttttaaaacaaatttgaatataagaaatctacaagtttttaagagtctgacaaaaaaatttttttttaataatttagactatgatttgtatatttatttgtataagaactaatcctaaattgcattatcaaagccgattcgtaagacatggtaactatacgcctaatagtcatttataatgatatactattggaagcagtgtctgccgtgtagatcgtaccaatttaatgtgtgagtataaaactaataattataatttataaccaacaagcatgccaagccacatagttgtcacatcaattgcgaaaaaagcggaaatttaaatcacaaaacttcctgcccccgagtgccgttgaaaacgaaagggactgaccgaccgactgactgtcgcatttgacacc

SEQ ID NO: 14102 - DNA, 2125 bp, DROSOPHILA
tcgcgcttagaattaatattgccatttagtctagtttaagccactccacaaagcggcggtgcgcggcgctcaacggaaagcgggaagaaactggaatttgtggtattgtgggcgaaccgagaagccacgaatcatacttacaaagtgtctggatttttcgccagcgaatcggagttaaatgatcgaatagcgggtaaaatcggacagcggacgcacacgatccgatccgcagagtcagattggagtggagaagtgaagctagtgctacctcagaatcccagataccagcagtcccagtcaaaagatattttaagccaacatgctgcctcggttccgttccttttacggcaaactgatcatcttcatcctagtcgccctctgcttcatcctctacagcaaggtgcagcagaatggttcaccagaggagccacctgtagcgccactcgtccgggcggccgctctgcgaggtcatgggcgcgagcggttcgaggcgtatagcgacagtgagaacgagatagcccgacccgccacccagtcgccgtacgaacaaataatccaactggatcttcagaaacagaaggtgggactcggcgaacagggcgtggcagtgcatctttccggtgccgccaaggaacgaggcgatgagatctacaagaagattgccctcaacgaggagctaagcgagcagttgacctacaaccggagtgtcggtgaccaccggaatcccctgtgcgccaaacagcgctttgattccgactccctgcccaccgccagtgtggtcatcatcttcttcaacgaaccctactccgtgctgctgaggaccgtgcacagcactctgagcacctgcaacgagaaggccctgaaggagattattctggtggatgacggtagcgacaacgtggaactgggcgccaagctggactactatgttcgcacgcggattccctcggggaaggtcaccattctgcgtctcaagaaccgattgggtttgattcgtgcccgattggccggagcgcgaatcgccacgggggatgtgctcatcttcctggatgcccattgcgagggtaacattggctggtgcgagccactcctgcagcgcatcaaggagtcgcggactagcgtgctggtgcccattatcgatgtcatcgatgccaacgactttcagtacagcacaaatggctacaaatccttccaggtcggcggattccagtggaatggccactttgactggatcaatctgccggagcgggagaagcagcgccagcgacgcgaatgcaagcaggagcgggagatctgtccagcatacagtcccaccatggccggcggactgtttgccatagatcgtcgctacttctgggaagtgggcagctacgacgaacaaatggacggttggggtggtgagaacctggagatgtcctttcgcatctggcagtgcggcggcaccatcgagactattccctgctcccgcgttggacacatattccgcgacttccatccttacaaattccccaacgatcgcgatacacacggtattaatactgcccgcatggctctggtttggatggatgagtacatcaacatatttttcctcaaccggccggacctaaagttccacgcggacattggagatgtcacccaccgagtaatgctgcgcaaaaagctccgctgcaagagcttcgagtggtacctcaagaacatctatccggagaagtttgtgcccacgaaggacgtgcagggatggggtaaagtgcacgctgtgaattcgaacatatgtctggacgatttgctgcagaacaacgaaaagccctataacgccggcttgtacccatgcggcaaggtgttgcagaagtcgcagctattctccttcaccaacacaaatgtcctgcgcaacgagctaagctgtgcaaccgtgcagcacagcgagtccccaccgtaccgggtcgtgatggtgccctgcatggagaatgatgagttcaacgagcagtggcgatacgagcaccagcacatcattcacagcaacacgggcatgtgcctcgatcatcagggactcaaaagcctggacgacgcccaggtggcgccttgcgatccccacagcgaatcccaacgatggaccattgaacactga

SEQ ID NO: 14103 - protein, 601 aa, DROSOPHILA
MLPRFRSFYGKLIIFILVALCFILYSKVQQNGSPEEPPVAPLVRAAALRGHGRERFEAYSDSENEIARPATQSPYEQIIQLDLQKQKVGLGEQGVAVHLSGAAKERGDEIYKKIALNEELSEQLTYNRSVGDHRNPLCAKQRFDSDSLPTASVVIIFFNEPYSVLLRTVHSTLSTCNEKALKEIILVDDGSDNVELGAKLDYYVRTRIPSGKVTILRLKNRLGLIRARLAGARIATGDVLIFLDAHCEGNIGWCEPLLQRIKESRTSVLVPIIDVIDANDFQYSTNGYKSFQVGGFQWNGHFDWINLPEREKQRQRRECKQEREICPAYSPTMAGGLFAIDRRYFWEVGSYDEQMDGWGGENLEMSFRIWQCGGTIETIPCSRVGHIFRDFHPYKFPNDRDTHGINTARMALVWMDEYINIFFLNRPDLKFHADIGDVTHRVMLRKKLRCKSFEWYLKNIYPEKFVPTKDVQGWGKVHAVNSNICLDDLLQNNEKPYNAGLYPCGKVLQKSQLFSFTNTNVLRNELSCATVQHSESPPYRVVMVPCMENDEFNEQWRYEHQHIIHSNTGMCLDHQGLKSLDDAQVAPCDPHSESQRWTIEH

SEQ ID NO: 14104 - DNA, 5471 bp, DROSOPHILA
ggccagatagatgcggctctcgtcgtggaaccaagtgagcaggcgcaggatgtgcgggtgcttcagtcgcgactggatctcgatctcgcgtagaacctgacgctgcacgcagcccttgcgcagctcctctttgaacatcaccttcatggccaccagatagtgcgagtggcgctcccgcgccaagtagacacgtccaaatttgccgcgtcccaagtgggcgcccatctcaaagtcccggggactccaatcgtatctggagggagcagattaagtacggattgatacattagcttattgcttgtacgtacggctgtccgtatgcgtcgtgggacatcatcttgaggcacatattcttgatcggctcctggtgctcctcgggcaccttggccagcaggtgcggcaggtggttgcggttggcgtgcttcgcgcgggaaagcgtcatggcgctgacttgtttataatattatgatttttaagtaaattaattattttaagttgtattttctataagcgtcccttttgtttgcgcgtttttttcgaatgctgagattagtgtgaccgcatgctagaatcgagttattctgtgactctcagtgaagcagttaagtcactgtatttttaaattcggtcaacgtataataaaatattttcatgtttcttaaataaaaattaatcttctagttttgttcttatattgtgcatagttattataatatacgcttctcacccgtaggagaatagtttgagtgaagggcatagaaaactgtttaattattataaaccatagctaccagtgctcaaatcatatcagatgtttaatagatttatattattagttgtctaaatttatttaaatatacaatatcaataatatttatatgtatatataaataaaaatgttttgcataatataagtctcgaatacctctaactaaccattgaaaatgagctgcaaaaaatcctttggatttcccgactattcgcaatctggccacactcgccattagtcattttttacacaataaacgtaaattaagcgaatttgcaagcgctattcggaagtttttaggctaatcgaaaagatataagcagcccaaaagagatttggaaaaaagcgaaaaggtctacgcaggaggaagtacaccaaaagcgtgctttcagtcgccgtgacgcaccgaaaatcgattggagaggaaaaacaatagggaaaacagacaaagatcaactgatttggatttattgaccccagggcagcgcagattattggcagatagccgagcgagcggtttggtcataaagatgggaatctttgggcagtcgtcgccattcgacgccgacgtgggtgagttaccacttatcgttaagctgttgtgttggccgattggacaagccgatgttccaattggactgcacaacggtccaatatgcgtttcatagttttctattcttatctggggtctaaaaacccgcacaccacaccattttcccctgttttccctatgaacccgatcccccgattgagcagacaacaaagaaagtcatgtgagatgctgtgcgcagctctgcgtcgttcgttgaacttcttattggagttgttagatggcagtcgctgaccttgagtgacgtagcacccgcagcccctcacaccccctccgtttacgcagccaaccccctcgccatcccttaatgcaatttagttagtttccgattgtattgattttctttagctgcaatcagttttcgaagaagcttatctttgttttgctgtgactcagaatataaatttctatttgactgataagctaatgcggttcatgcctttcttgttttatagaaaaggccaccagcgaaactaataccaacgacaactggtctctgattttggatgtatgcgacaaggtaacgaccaatccccgcctggccaaggattgcctgaaggcggtgatgcgccgcatgggccacaccgatcctcatgtggtgatgcaggcgattacgcttttggacgccctgtccaacaactgcggaaaaccgctccatttggaggtggcttcacgggatttcgagacggagttccgccgcctgttggccaaagcacagccaaaggtttcactggtgagtacaaacagttttaactcacttatttcatttctaattccaattatgattcacagaaaatgcgccaagtgctgaagaactgggctgaaaacgactataagaacgatcgagagctcgacttgatacccgcactctatgccaagctgcgccaagagggatatgatttcaagaatcttggcgataagactagcaagactgttgccgaaaaggccgccgccctgcccaaagatccgaatgtggtcagcagccagcaggaagaggatgacatcgccaaggccatcgaattgtcgctgaaggagaacaagggcagtccaaagactgggagtgtagcaagtaccggcaccgccagtgcctatccctcattgtatccatctttcgctggaaccggctcgagtgcaccgagcgccgaagccagttccgcaccagcgccagagccgagaaaggttcgagctctgtacgatttcgaagctgccgaggaaaacgaattgaccttctttgccggcgagatcattcatgtgctggatgatagtgatccaaactggtggaagggatacaatcaacgcggcgagggtctcttcccctcgaactttgtcactgccgatctgtccgtcgatcccgagcggctggacatcaatcagcagcataagtcggccgccgcagccgggcaacgagagttggattccgctgcggcactgcagcaaaagactgaagcggcagcagctgccgccgcagctcagcctgtggagatcgacgagtcaaagatcgaccggctgctgcatttgctgcacgaggcgaatcccgaagatccctcgcaggacagcgacgaaatgctgcagctggagcaggaggtccatcagatgggaccgctgatcgatgccgagctggaacgcgtcgaccgcaagcacgctcaactgacgcagttgtccagcgacctcgtcgacgccattaatctgtaccataccttgatgcgggatgaccgtgctgcggctggacattttgccgccgctgctggcggctttatgcctggacttgctggtttcccgggtgccgctctgtacggtgctccaggttatcctgcagcgggtggattcccaccggcccaaaattatccgggcatgcactcgatgccatatggccccgtaccaaatcctcccacttctgctccatctcaggcacctggagctcctggtggctatctgggtcaaccgcaggggcaggtgccactgccctatcagaacggacatgccgcacagatgaactgttagtacaaaggattaaaatacttattatatttacctataataacattttcaatcgtctttccagcgctgccagcccatttgactcaacccactggcactgcacccatgccccagccaatctacactcagccgactcccgtgaccacccaacagcagcagcagccacttccacagcaccctcaacagccgccacagcagcaaggccagcagcccccacagcatccccagaacagctaccacatcgacccccagtcacagtacgcccaagttccgcccgcagtcacacaaatccagcagccgcagcagccaccggctccgcacgcttacatgtcgccgcagcatcagcaggcaccgccaccacagggataccagccaggaccaaatctttatggaccgaacggatcgccggccgtcgtcaacccgcagagctacatgtccccacagcagcagcagcaacaacacccaccaccacacgatcagtttagtcagctgcatcagcagatggccgccatgtccatggctggcggaccgccagttggggcgcccggctatcacatgcagaacgatgctgtcaagaacaacattcctatctaccagcagcagcggtaagaccgctgcactaaaacagagaccttcacttggttcgctttgaattgcccgagcaactttaagctttgtcttcattctgacaaaaggatgtcatcgagtatgttagttttggccaacttgccgagaaacggaagttgtcaaatctctgctatgtacattttgagaagagcaattgtcagtgaaccaaatatgtcgactatcctttaaaataacgaaagaagccaaattaatatcaagtatacccttacgagttttcgttttttgtgtttatatttggtccaacgaaatgatatatttttctggaagtaaggcaataccagtcgaaaaagatatatataccatataaataatctgtattcaacagcacgtataactttgtatttagtgcaggggagataactattatgtattatgtttattgtacggattatgataaatctaacgaaacgaatcacattcattaaaatcataaaaatatactaagtaaacacaatgtctttgaaaattgcaagtcaaaagcttacggctacccttctcaaatattttcagcactagcaatcgatgtggaataattttcaagaaaattttggaaatcagatgaagtttttagaaatttttttagtgataaagaaagcagattatttgtttatttctcacttgaattgtttgtttatttttatgatatttatttaaattttcttatcgatgctataaaacatgaaggtaaaattctttatgtaggcttcagaaagagtaatctgcattgctttataaactgaaacaattcagcacgagttttggattcgcaccccttttaaacttaacatgcttagagctccattcaactgcgctcatccccttttcggagaatacctccctccgctcgtgttagtgcgcttttccgatgagattccaatatattcagacaagctttgccacatgccactgtctcgcaatccggcaaacatgcaacaatttagcaaaattccatccggcattcggtggcacaaatatcctgtgaaataaactgtcaaaacggggcagacagacagtatctcagcctggtaaatagaaaatgccaatgaatgcggagtgtcacctggagtgaaagaacgacgagccaggagacgggcgagagcaggctatgcaaatatttgctgattgttgatttctatgggctggcaagtgggtggttgtgggtggtgttgtctagctgcaaaaatgtcaacaaatgcataggtattttttaaattaattgattttgctggccttgcacgcttacatcgaatgggctgggaaacgggaaaatttgggcgaactggctggggtcgtgggaaaatcctgcccagccgaacacctgaaccttgttcgtcctgtgcccttttttttttttttttttattatttgacttacggtaggaaaattaaaatcttctaaagataccacctaccgtccgtaggtggcatgcacgattcataagcccta

SEQ ID NO: 14105 - DNA, 2854 bp, DROSOPHILA
ccattagtcattttttacacaataaacgtaaattaagcgaatttgcaagcgctattcggaagtttttaggctaatcgaaaagatataagcagcccaaaagagatttggaaaaaagcgaaaaggtctacgcaggaggaagtacaccaaaagcgtgctttcagtcgccgtgacgcaccgaaaatcgattggagaggaaaaacaatagggaaaacagacaaagatcaactgatttggatttattgaccccagggcagcgcagattattggcagatagccgagcgagcggtttggtcataaagatgggaatctttgggcagtcgtcgccattcgacgccgacgtggaaaaggccaccagcgaaactaataccaacgacaactggtctctgattttggatgtatgcgacaaggtaacgaccaatccccgcctggccaaggattgcctgaaggcggtgatgcgccgcatgggccacaccgatcctcatgtggtgatgcaggcgattacgcttttggacgccctgtccaacaactgcggaaaaccgctccatttggaggtggcttcacgggatttcgagacggagttccgccgcctgttggccaaagcacagccaaaggtttcactgaaaatgcgccaagtgctgaagaactgggctgaaaacgactataagaacgatcgagagctcgacttgatacccgcactctatgccaagctgcgccaagagggatatgatttcaagaatcttggcgataagactagcaagactgttgccgaaaaggccgccgccctgcccaaagatccgaatgtggtcagcagccagcaggaagaggatgacatcgccaaggccatcgaattgtcgctgaaggagaacaagggcagtccaaagactgggagtgtagcaagtaccggcaccgccagtgcctatccctcattgtatccatctttcgctggaaccggctcgagtgcaccgagcgccgaagccagttccgcaccagcgccagagccgagaaaggttcgagctctgtacgatttcgaagctgccgaggaaaacgaattgaccttctttgccggcgagatcattcatgtgctggatgatagtgatccaaactggtggaagggatacaatcaacgcggcgagggtctcttcccctcgaactttgtcactgccgatctgtccgtcgatcccgagcggctggacatcaatcagcagcataagtcggccgccgcagccgggcaacgagagttggattccgctgcggcactgcagcaaaagactgaagcggcagcagctgccgccgcagctcagcctgtggagatcgacgagtcaaagatcgaccggctgctgcatttgctgcacgaggcgaatcccgaagatccctcgcaggacagcgacgaaatgctgcagctggagcaggaggtccatcagatgggaccgctgatcgatgccgagctggaacgcgtcgaccgcaagcacgctcaactgacgcagttgtccagcgacctcgtcgacgccattaatctgtaccataccttgatgcgggatgaccgtgctgcggctggacattttgccgccgctgctggcggctttatgcctggacttgctggtttcccgggtgccgctctgtacggtgctccaggttatcctgcagcgggtggattcccaccggcccaaaattatccgggcatgcactcgatgccatatggccccgtaccaaatcctcccacttctgctccatctcaggcacctggagctcctggtggctatctgggtcaaccgcaggggcaggtgccactgccctatcagaacggacatgccgcacagatgaactcgctgccagcccatttgactcaacccactggcactgcacccatgccccagccaatctacactcagccgactcccgtgaccacccaacagcagcagcagccacttccacagcaccctcaacagccgccacagcagcaaggccagcagcccccacagcatccccagaacagctaccacatcgacccccagtcacagtacgcccaagttccgcccgcagtcacacaaatccagcagccgcagcagccaccggctccgcacgcttacatgtcgccgcagcatcagcaggcaccgccaccacagggataccagccaggaccaaatctttatggaccgaacggatcgccggccgtcgtcaacccgcagagctacatgtccccacagcagcagcagcaacaacacccaccaccacacgatcagtttagtcagctgcatcagcagatggccgccatgtccatggctggcggaccgccagttggggcgcccggctatcacatgcagaacgatgctgtcaagaacaacattcctatctaccagcagcagcggtaagaccgctgcactaaaacagagaccttcacttggttcgctttgaattgcccgagcaactttaagctttgtcttcattctgacaaaaggatgtcatcgagtatgttagttttggccaacttgccgagaaacggaagttgtcaaatctctgctatgtacattttgagaagagcaattgtcagtgaaccaaatatgtcgactatcctttaaaataacgaaagaagccaaattaatatcaagtatacccttacgagttttcgttttttgtgtttatatttggtccaacgaaatgatatatttttctggaagtaaggcaataccagtcgaaaaagatatatataccatataaataatctgtattcaacagcacgtataactttgtatttagtgcaggggagataactattatgtattatgtttattgtacggattatgataaatctaacgaaacgaatcacattcattaaaatcataaaaatatactaagt

SEQ ID NO: 14106 - protein, 689 aa, DROSOPHILA
MGIFGQSSPFDADVEKATSETNTNDNWSLILDVCDKVTTNPRLAKDCLKAVMRRMGHTDPHVVMQAITLLDALSNNCGKPLHLEVASRDFETEFRRLLAKAQPKVSLKMRQVLKNWAENDYKNDRELDLIPALYAKLRQEGYDFKNLGDKTSKTVAEKAAALPKDPNVVSSQQEEDDIAKAIELSLKENKGSPKTGSVASTGTASAYPSLYPSFAGTGSSAPSAEASSAPAPEPRKVRALYDFEAAEENELTFFAGEIIHVLDDSDPNWWKGYNQRGEGLFPSNFVTADLSVDPERLDINQQHKSAAAAGQRELDSAAALQQKTEAAAAAAAAQPVEIDESKIDRLLHLLHEANPEDPSQDSDEMLQLEQEVHQMGPLIDAELERVDRKHAQLTQLSSDLVDAINLYHTLMRDDRAAAGHFAAAAGGFMPGLAGFPGAALYGAPGYPAAGGFPPAQNYPGMHSMPYGPVPNPPTSAPSQAPGAPGGYLGQPQGQVPLPYQNGHAAQMNSLPAHLTQPTGTAPMPQPIYTQPTPVTTQQQQQPLPQHPQQPPQQQGQQPPQHPQNSYHIDPQSQYAQVPPAVTQIQQPQQPPAPHAYMSPQHQQAPPPQGYQPGPNLYGPNGSPAVVNPQSYMSPQQQQQQHPPPHDQFSQLHQQMAAMSMAGGPPVGAPGYHMQNDAVKNNIPIYQQQR

SEQ ID NO: 14107 - DNA, 4791 bp, DROSOPHILA
actggctttgggtatacaaaagaatcgaaccactttggtgagattctctgacatagttattgatgacttcatgcaacgattttgtaagaaacccgtttgaaaattatggaatgaaagccaataataaagacagcatggagaagtcaatgcattgcagcaaatacgaaaggcacgccgaaatcaaactgagttaatggtaattgataaacttacccctcgaagttttaccttatctccaactgttgctgtctcatgtttactttcttatttattgtaatcccactaacattaaaatgggggtctctataaaataaagataaacacctacatcttatcggacacaagcacatgttttataagtctagttggaacgtattttgcattggactcgaccgatatagaaccaatttccgcatctgcaacagcgacagtttccctcttgagaatttattttgattgcttttcccccattttcaattagaccaagaagaggccattcggaatagagcagaattgtgattatgagtgcaacaagaaatgggttggctggcgaaacatggccgcactcgagatgattctaaaaacggagcagcaaagaaggcaggcaggctgtgcgactgccccgctagtggagtctttcatgctgagtgaccatccgaccagcaaccccttcaccactacccagccactcccttcctggccccaaaatccaaaagagtttgggggggaaaacaaaggaagccggctggcgtttggcggcgcacgccaagccaaacacgaccgagtttatcgaactcatattgaagattgtacgcatggcttcattcgcgcacagatacaaatactggcagatgcagcaacaggcgtggatacagatacataagcacttcagagtgcgctagttaattgccaagaaaaggcccgtcattcaatccgcagaggatgcaattgtagtgcattgattacgcaggcttagcttggccttggacgtggaacgggaatgggcatgggcatgggcatgggcatgggcatgggcatgggcatgggtatgggttgggtgctctaccccttgctgcacagaatgttctcacattatcgcaatctctactgatgcacactctttttcccttaccatcgctccattgcaggctcgtcaacgtgcttccgtcaaatggctgctctcaaaggcgttcaacaatcgcgtgccagacaacctgaaggagcccttctaccgcgaccatgagaaccaggagcgcctcaagccgcagatcatcgtggagctgggcaatgccacgctctactgccagacgctggccaatctgtactcagatcccaactaccaaagcatgaaccactggtcaataatacagacgctagcgcgcaagggagttcccgtggccgaatccgcggacatgcccattaccgaaacggtattaattcaaacaaatccgctgcgaattgtgagtagatcttaacttcaatctttatggcttctccctaatttattgttcggttttatcgtttttagaacgcccacatgtctgtgatagaatcgctgatggttttgtatgcgaaggaaatatcatcgggtgaccgcgtcatggcggccatacgaaggtaagctcacgaaatgttattatgataatgtccatttaatatttcctttctaccttgcagaatatctggcaacaactatcaggcacccactggccagtcctacgagcaagctctgctgggctggatttcacatgcttgcgccgctctgaaaaagcgcattatcaaggaggtggacgctgggctgcccgacgataatgtaagttatcaattcccttaccctcagcgtattatttatcaattacaaaatcacagggttcacgtctgcagacgccggatataccacctgtaagggacttccaggatctgtgcgatggcatctgtttggcgctgctcatctcctactactgcccaaaggtggtgccgtggacgagtgtgcggattaactatttgcccgccgtcgaggactctattcacaacatcctgctggtctgcaatttctcgcagaagcatctgccctacaccgtgatgcatatgacgcccgaggatgtgacctacatgcgcgggtagctactaagtttaactatttagatcgaatattttactaatttgatatcgttttgtttcagatccatgaaactgaatctggtagtgctgctgacggatctgttcaatctgttcgaaatacacccggccaaatgtgtctgctatcccggcatggatggtcagggtaagtggagaatatctttgtctagtttccattcccaaaactttgcaccgcatcgcatttatccgccaaaaccctgaactcacctccaaaagattggcctgcctgtgtttgaatatcagtccggggcatgttttgttatccaagtgtatccgaagtattcttgttttgcgtttcgttttgtcttcgtttttcctatgatttgctttagattttattcttggttttattacgaagaattggttaacaagaagagtgaaattagtcatagtatcaataaatgtataaaggccttttacgcattgcattcaactggatatacgagtgactcaaattataccagtcagcgaaaagttaaagcatttatcacaagtgcctaggaacttagagcgcgtcacagctcacagattgcgttgattacgccgcaaataagtctccgtttaagatcaaccacgaagcaccttttaggaaaagattgatcagtaaaaccgcagttacctaggcaaatcttatttatgttactgtatagttcctgcggttattttcgtttgtaaatcaccgactcctccaggaaatcgacacgaaatcatatgtaattttcatcatcttagcaatcacccattcccacgaaatgtagtgaaattctccacatttcagaaaacaatccaaatcaaataaaccaactctgtacttgaatctctttctttgtttatatgcaaaacgcttcctcttgccactcgtaaccgcaataaatccaccaataatttgggtcctataacctataacacacaacacaccaaaaacacatctacacacttaccaaatgaaaaaaaaaacacactcaacgtaaaacgtacaacgtgccatgttcttctcgattgatccgctctccaattccgtgtcgacgatatccagatgtcatcgcccggcgcactatgggcgccaatgagcacgggatctgccatcgacggggcctcacagtgcagcccgtcacacccattcccgatctgcgcagcgatctcgaccagccgcccgtaggctcgcctcagaaccgaccaccgtttcaaggttttacttcaaattttctatccgagcattttctgtgtaccccaatttcccgaatctcgattttcctccttcgtttgttcatgaatgtgtttccatttgcatttgtttgttttctattcgcttattctgctcacattcagtttgtttgtttgttcgtttgtttgtctaattgattaattcttggggctaagccaagtaaatcgaatgataattatatgacatgcagctgtttgataataactacaattttaatatagtctaagtcacagtcgcacaagacgctttgcaatgtgtattgagttcgtaagtgcaccaccactcatgagatcgatcagtagatatgttcgtacgtacaccatgcattttgtcatcttaatactccgagcaccatgaccgaaatgacttgactgggagaactggatcatatatgacatgtaaataccgacagaagtcatagatgtttgcgcaataatatcaaaccgaattgtcacacattcatcttcataaaagtgaaagtattaggcgttagaccgactagactcccctggggataattgcccggttcatggggcacctctcagcttacttggcacccatccatggactgcgattcaccttgtttctgctttcgaattgtgtgttttgctttgcccgcttccgatgcaacgagtctcaatgaataaccaaccgaaatattcaagttcatttacctcgcaagccgaacaaattgattttacttatttacgtttttctttttcttttctgtttttgtgacttttcgtatatttagttccgcactcgaattcatttggcggcggcttaaatcgcagatcaaccccgcccaacgaataccagacggttcagtcaaataattttgacggtaatcatgccgaaggtaatttatttattattattacttaattactttaattatttctctctaccttttattttcattaatttttgtgtacgtttctgtttgctctttatttgcactcagaaactgcaactcaatgtcttattggtttctgattgaatttaaattttgtaactttttcttttcaccacccaccgacccacacacgcttaaccaccaaccacaacgccaccgctgcccgtcaacctgcagccttcgtggtgcacaagtcgcgtggcatcaccacactcgcctccatgcactcgcagcagcagcagcagctccatcagcagcaacagcatcagcagcaataccatcagcagccactgcagcagcacccgtcccagtcgcagcttcaaatccaacagcaggagcccttggttccagctcgcttgcgccaggctaaagaaaagaccaatgttgagtcgaaggcggacgagagaggtttgcccagcttgcagttgatttcttaatttcctagacaagacgacttgtatgtggcggatgaatgtgctattagctccgc

SEQ ID NO: 14108 - DNA, 1541 bp, DROSOPHILA
atgggcatgggcatgggcatgggcatgggcatgggcatgggcatgggtatgggttgggctcgtcaacgtgcttccgtcaaatggctgctctcaaaggcgttcaacaatcgcgtgccagacaacctgaaggagcccttctaccgcgaccatgagaaccaggagcgcctcaagccgcagatcatcgtggagctgggcaatgccacgctctactgccagacgctggccaatctgtactcagatcccaactaccaaagcatgaaccactggtcaataatacagacgctagcgcgcaagggagttcccgtggccgaatccgcggacatgcccattaccgaaacggtattaattcaaacaaatccgctgcgaattaacgcccacatgtctgtgatagaatcgctgatggttttgtatgcgaaggaaatatcatcgggtgaccgcgtcatggcggccatacgaagaatatctggcaacaactatcaggcacccactggccagtcctacgagcaagctctgctgggctggatttcacatgcttgcgccgctctgaaaaagcgcattatcaaggaggtggacgctgggctgcccgacgataatggttcacgtctgcagacgccggatataccacctgtaagggacttccaggatctgtgcgatggcatctgtttggcgctgctcatctcctactactgcccaaaggtggtgccgtggacgagtgtgcggattaactatttgcccgccgtcgaggactctattcacaacatcctgctggtctgcaatttctcgcagaagcatctgccctacaccgtgatgcatatgacgcccgaggatgtgacctacatgcgcggatccatgaaactgaatctggtagtgctgctgacggatctgttcaatctgttcgaaatacacccggccaaatgtgtctgctatcccggcatggatggtcaggatgtcatcgcccggcgcactatgggcgccaatgagcacgggatctgccatcgacggggcctcacagtgcagcccgtcacacccattcccgatctgcgcagcgatctcgaccagccgcccgtaggctcgcctcagaaccgaccaccgtttcaaggttttacttcaaattttctatccgagcattttctgtgtaccccaatttcccgaatctcgattttcctccttcgtttgttcatgaatgtgtttccatttgcatttgtttgttttctattcgcttattctgctcacattcagtttgtttgtttgttcgtttgtttgtctaattgattaattcttggggctaagccaagtaaatcgaatgataattatatgacatgcagctgtttgataataactacaattttaatatagtctaagtcacagtcgcacaagacgctttgcaatgtgtattgagttcgtaagtgcaccaccactcatgagatcgatcagtagatatgttcgtacgtacaccatgcattttgtcatcttaatactccgagcaccatgaccgaaatgacttgactgggagaactggatcatatatgacatgtaaatac

SEQ ID NO: 14109 - protein, 423 aa, DROSOPHILA
MGMGMGMGMGMGMGMGMGWARQRASVKWLLSKAFNNRVPDNLKEPFYRDHENQERLKPQIIVELGNATLYCQTLANLYSDPNYQSMNHWSIIQTLARKGVPVAESADMPITETVLIQTNPLRINAHMSVIESLMVLYAKEISSGDRVMAAIRRISGNNYQAPTGQSYEQALLGWISHACAALKKRIIKEVDAGLPDDNGSRLQTPDIPPVRDFQDLCDGICLALLISYYCPKVVPWTSVRINYLPAVEDSIHNILLVCNFSQKHLPYTVMHMTPEDVTYMRGSMKLNLVVLLTDLFNLFEIHPAKCVCYPGMDGQDVIARRTMGANEHGICHRRGLTVQPVTPIPDLRSDLDQPPVGSPQNRPPFQGFTSNFLSEHFLCTPISRISIFLLRLFMNVFPFAFVCFLFAYSAHIQFVCLFVCLSN

SEQ ID NO: 14110 - DNA, 2693 bp, DROSOPHILA
tggtgagtgcttagttttgttggtttggggtaatcaatcaaactatgatttaccgaccagaaacgctcgcttttatacgcaaattttagcctggacatttacgtgacctatatacactaattgttctgtttcagcccagaaatggcatttcataattgcccggctggaatatactcacatttgatttatgtacttgttgtcaagccattataaaatcgcttggttacgcgatgtgctattctaccgggtgttgggtagtgatagcactacgaacacgcgactcttccaaatgggaaccacgaacgcgtttattttcgaatacagtccaaaatttgttgaattgaactttatattatccacattctcgggggtaatggtttccaggtcggttgtgtccggaacttggcttgtctaagtgaggattcttctagaactggttccagccggtttttctgataaaacctatatagaatcatccctttaaagtgaccactagtcacatacaaaacttaaaattataactaaaacattttaaagtatttcaatcattttgaaattttacaaaaacataatttcaagcaaaactatattctatctaatctcattttatctaataggttctttacttatggtaacttaaaaaagtcaaggcttatttgacgaactatagttttaaagtggccccacaaatgaatttagttttagcttttcagcttcattcgccatgagaattattctttagcactttaagcagcattttcatttaactacgaaaccacgaaatttttgctggctcaaagtatcgcttggcattgcaatgaaccgcaagtctatgccaattcagctaagatatgcagatctcaattctcggcccgaaactaaaaacccagcaagaatacagtactcaaaattttaagtcttgatgttttggcttttattattatgacctagttccttatgggcaggtaagtttttggttcactgttcaacgttttgccacttagtagctgggcctcttgtagcccttctttccggcggccacggagctggcagcagcggctgcggagcctcccttcaccttctcgctgtgtccgtactcctggttcacgtagctggtggggggatagacgggctgggcgtagcggggagcctccttccagaccagaggagctccagcgctgggagcggccagggcgagcttggcgagggcaatggcctgggcatcaactggtggggcaccgccgtagccggaaccggagtactgagatcccacattggcaccgctgtaggcagaggacacgggcacaggcaccgactcgtaggcaccgccatatcctccatggtttccgccgtatccaccaccgtatgagggaacgatcgccttaacggtcagggcaggctgcacctggtaggcatagccaccgactggggcaccaccgtatccaccacgggaacgtccgtaggagttggccgaaacggcagagatggcgcagaggcagatgcactaagggattcaagaaaaaattcaattaatttgggtttagactgaagtgtattagaaaagaaagatccaatcatattatccaattattataatatgtagttatattttattgaaaggatcatactggactcagttgaggtgtcaatagaaacaatattggaacttaaggcttaccatgaacttcatcattctgaggctgagttggttagttgatcgatgcgaaggtaactaatgtcttattctggcgcaatgttttgtttttataccagatccaggcagaggcccaactcttacgtgacgaatatgatgcaagtttcggctctccgggttcccgcagacgcagttccaggcctcgcctctttgtccagcaatcttgagacgccgccggagacgtgcagccaggccgaatccgcactggccaaaatgctggctctcaattcgggccggtccagatagcaggcgtctgtgcttacgccatcgtctaccagagacgagacccattacgtaagattccgaccgcatgactcttcgtgctccggatccgcatagtttcgatcagtattgcagttgctttgccccacggtgccgagagcttgacaccgatttttcagtgacacagtgaagtcaaggcagtggcctgaaaattctgctgcgttggtagaatttatatacaaaagcaaaaaaaattgagataaaattacaataaaattataaacacaaccgttccactttccaaactgccgcactaagctttttataacattcaattggcgctacacaaattgtgaatggcttatgggcgggcgcaaacatttaataatgaataataaattatttagatgttggccaggctcagggtaccagcatccagtagccagaagacgagtgaaaacgatctttctccgtatgcattttctcttcaagattgctttattgggatttaagctagttgctttgctcttaggaattaagtaaaaatattataagactggaaactggaactagcgccaacgacgacacgataaatattaaatagtaacattattcgcaatacaatgcaaatgtaagtcggctgaaacctcaagccaagattgacggatctgaacatccatcacaagtccgatatagccagcttgttgaacaagatatttagcggaggctaatctagataaacgacacgtttgggcca

SEQ ID NO: 14111 - DNA, 519 bp, DROSOPHILA
atgatgaagttcatgtgcatctgcctctgcgccatctctgccgtttcggccaactcctacggacgttcccgtggtggatacggtggtgccccagtcggtggctatgcctaccaggtgcagcctgccctgaccgttaaggcgatcgttccctcatacggtggtggatacggcggaaaccatggaggatatggcggtgcctacgagtcggtgcctgtgcccgtgtcctctgcctacagcggtgccaatgtgggatctcagtactccggttccggctacggcggtgccccaccagttgatgcccaggccattgccctcgccaagctcgccctggccgctcccagcgctggagctcctctggtctggaaggaggctccccgctacgcccagcccgtctatccccccaccagctacgtgaaccaggagtacggacacagcgagaaggtgaagggaggctccgcagccgctgctgccagctccgtggccgccggaaagaagggctacaagaggcccagctactaa

SEQ ID NO: 14112 - protein, 172 aa, DROSOPHILA
MMKFMCICLCAISAVSANSYGRSRGGYGGAPVGGYAYQVQPALTVKAIVPSYGGGYGGNHGGYGGAYESVPVPVSSAYSGANVGSQYSGSGYGGAPPVDAQAIALAKLALAAPSAGAPLVWKEAPRYAQPVYPPTSYVNQEYGHSEKVKGGSAAAAASSVAAGKKGYKRPSY

SEQ ID NO: 14113 - DNA, 3095 bp, DROSOPHILA
cgggaaagtctaaaaattacccggaatcggttgcttgttgcccgttgtcgaacatctcgtatcggttaattgaagattgtgcggccgacaaggcacgggaagaacagaggatgccgattactgacgcacataaacgaataatttaccatgttccagtcgctactgtttggcaaaatcaaatatgcagtgccattggcctagtttttgcatttgccaaaaaaaaaatgccggctcaatattacatttttaagtgtaatatttaaaatttgtgtatttactgtgagcagacaatgattaattaattaatgattaattaattaatgtaatactataacattaatcgaaaatactattttgctcgtagttcttgcttaaaatcccattcactcgaataatttttgaaaagcccgcgtaagaagttttcaatttgacatttccgcaacagtgctgtccatctggtcaaatgcacagagttgccaatcgaccgcgggccagctgttgacgtttaaaaagctgtcgacttcgcgactgttttttctttctccaaaatatgcaaaacttgtttgtgaagttgaaatggcacttattccagtcgttatcagagacacccgtacttttgccccccaattgcacatagcatttatctcgatttctgatagggcgatgggaattggggaatggggcataaacaagcagcaagagttgtcagcgtagattacacattttaatttctgtactgacgctaatcagcaagcgattgcccactagcagagaattctgtattttgccactgtctttgcgagtgttccaaataccccttcccccgacagcccatcattagcgtatgtatgtactacatatatgtattgtatttttcgtattttgaatttcgttttcatttgcttttatcgcactggcaatactggtcgcatgtgtgtgtgtgcgtttgtgggtggtggggggtatgattatgcataaaacaaacaacaagtagctgcagcaaaacaacatatagcggtaaacgaacccacacatgagcagcaaacaagtttcaacgccgtgcggtgtcaaaaatcgtgcaattgtccgccatggagttcattagccatttcttgcgagcgacgagcagacgcaccgccgcattgggtccaatcctgcaaagaaatcgtagcgaaatcatccaaaaacagtaagctttccatgccacaacactggctgtgtgtgtgtggttgccaccagcgttgccacctacacgcacattgataacgcggttgtttttggtgaaatttcacaactggccaagatctttgaccaatcgacaggcattccgcagatacagatccagctgcagcaccatggacaccaccgttcactccgccggcatcgatgagacccacctggtgcccatgagcgtcatccagcgacccattccctccgtcctggacgagcagaaggtgcaatccctgatggaaaccattaaggtgggttggtgcacgtacccatgtacctagataagggcagggtagaaaatacgttcggataaaaatcgattacaagatcttagttagcgttaaaatgtggaatacactatatataagatattagtacacgattgttagtttgttttaatatttattattaacttaatgtagccaatttacatagcttccagaattagctttttaaatttgttatttgaagctgtatattttgagaatccctgttgactttaaaaagttagttaatcatttttcgcgtataattggtatgctagtcctcagaaatgcctttcaagcaggaagacaactgaaaacatgtttcccaacactgggcacatacatagtactgctccactggttattatttacctctttcaccgcagaacgaaaccagcgaagatgaggtgccccccatcgacctgctgtggatctcgggcagcgagggaggcgactactacttcagcttcggcggatgccaccggttcgaggcgtacaagcggctacagcggccgacgatcaaggcgaagctggtgaagtccacactgggcgatctgtatcactacatgggctccagcgcgcccaagtacctggcctgatctttgtcgctgatcatttgttgttgttgtgcatttgtttttgataagaatgtcgtgatcgctggataaagttcgaaattcacggacatagcaataagaaaagctttattctttgttttcgtaaatttcttttgttttttttaataaagttttttatttggcaatcgttaaatttgcgtaaatatactgcgcttatcgccggactctaaatttgtttacctaatctgccactgatacaaagtagtatgcaaaaacaggcttagattcctttttgcattctgcatatttgttaggtgtctttaaaaataaaataattgtacaatcttgtataaatttgtatgaccccatccggagtgtttccttcctccagggtaatgctttggtcggcattttagcctacggttgcgatactgcttttactctattaacaataacatagcctataaaatcctatatataatacctaaacatattcgaaatgcactgcggcgaccatctcatcacctcaccagaggaagggagatctttcgcggagcacccgcagtccatgacgctgccagtcgttttgcgatatccacagctcgcgggcgctctcgagcacggacataatggccgctcccttccacgccaccatgccggcgtccatgcccttgatgaggacgttcacctcggactggacctgctggctaatccgttgctctagccaggcagccagaccgggcaatttggcactgctgcccacgagcaggatggagccgaacatcttgcgcttggtctcgtagctggacagccggttaatggactggattatggcctggtccaagggcaataccagaccctggccgttgtggtagcagccgttcgagttcatctgcccaccagctgtctgtgcacccagctgcgactgacagttgctgatggtctcgtcttgatccaccacaatgagctcctcatcgtcggcggtcacaggcagctgcggccgcggctggtatccggcgct

SEQ ID NO: 14114 - DNA, 580 bp, DROSOPHILA
caaaacaacatatagcggtaaacgaacccacacatgagcagcaaacaagtttcaacgccgtgcggtgtcaaaaatcgtgcaattgtccgccatggagttcattagccatttcttgcgagcgacgagcagacgcaccgccgcattgggtccaatcctgcaaagaaatcgtagcgaaatcatccaaaaacaatctttgaccaatcgacaggcattccgcagatacagatccagctgcagcaccatggacaccaccgttcactccgccggcatcgatgagacccacctggtgcccatgagcgtcatccagcgacccattccctccgtcctggacgagcagaaggtgcaatccctgatggaaaccattaagaacgaaaccagcgaagatgaggtgccccccatcgacctgctgtggatctcgggcagcgagggaggcgactactacttcagcttcggcggatgccaccggttcgaggcgtacaagcggctacagcggccgacgatcaaggcgaagctggtgaagtccacactgggcgatctgtatcactacatgggctccagcgcgcccaagtacctggcctga

SEQ ID NO: 14115 - protein, 162 aa, DROSOPHILA
MEFISHFLRATSRRTAALGPILQRNRSEIIQKQSLTNRQAFRRYRSSCSTMDTTVHSAGIDETHLVPMSVIQRPIPSVLDEQKVQSLMETIKNETSEDEVPPIDLLWISGSEGGDYYFSFGGCHRFEAYKRLQRPTIKAKLVKSTLGDLYHYMGSSAPKYLA

SEQ ID NO: 14116 - DNA, 6555 bp, DROSOPHILA
tttcatttccactgaaagacgtttcctggcccgcgttcgcttttgccgtccccgttcccattcccatttcccattcccaatccgattccccatccaaatgccgctcctctctcctcgagaagatctttggcatccatagacacgcaattatgcgtgcacttacatacatacatacataggtatgtacatgtgttcccaggcacattgcgtatggagatggctccacaggcgacagttccattatgccgatgcctgggaccgtagacactctggggccacagaaagcactgggtgaattcgatagaatctgccgggtccaccgccagatcaaagtctttggatgttgattggaaaagtagtgaaataaaggggctttagccagatgttgtataatcataaaggtttttattgctgttgcacactgatagcacttaggacatagacatttctccctatcgatatagttatccgttaattagcattattataagtagttatatctgtatctatatcattactgttacagttaattcgattaagctcggggtagcagctagccggaaaatgctctcgttggatattttaactcgtttaaatgtatgtacgtgtgtgttgttggtgggattataggatactgtttactctggatactagtactaggatatgggatatgggtgatgttaacaatacgtgcgtctatatgcgttccatgcatatagaagctgatatgttgccaatattacttggtttcgttccactccgcaacgatgtgtgttcgttgcgtttggggtcgcgtgttcgatcgccttaatatttacattaagtagagatttgttaatctaaatcgcttctatcatatacgtgggtatacgtgggcggtgccacatgcctcatctctacgagtatgtacaaaacattttgccgcatcgctcgggattcccacacaacgggaagcccgcgtcctcaactgtccgcgcattacaaacaagtcaacataacgattcaattaaatattaggacaaaaaaaaagtcgtaataattagaataagattaataatataaaaaataataatagtttcggtttccttcctccgtcctcctcctacttttaagcggctgtttgtacaaagttctttctctaatccatttacgtttccggttccgtttgcgtatcgtgttccggatccattctcgcttcgtcccgcgtcctgcgtccgtgcgcctgcatagccactccttaagtatgtcccttgaccacatctacggctcagcccttcaggccggaacagccgcggacgcccaggcccacgcccatgccgcccaatccagcgttgctctcctcaatgtagacattgccgggctgcagggtcttcaggattcgtcgctcctgatgcttgccgcgtttctctgcaagatcgagagggatgggagaagaagagttcggatgagttgggcagaccacaagcgtggctgtcgaaaccgagtgacagccgtcatttaaattccacccacgcccccgatatcggtctgatttgcatttcgaatattcggattcgtagggggtctgcaaacctgaagatcactaccggcttggggtcagcaaactcggattaataccatttgtatgataatcaaaggctatttaaacatatgccagttgaaacaaattcatatcttatgagaacattttgcaaatcatataataaaatggagagtggactaattcggaaaaccttctcatttgtttaatttattaatttgaaaaactataaataccactggttgtatttgaatagtggtgccatgcaaatggcttgaaaacccaactaatgactgctcgctctgttccaccaaggatgcccgctgggagttcatggcctggcccgcctcctgccaggccactcaagtggccgagctcggtcggggagctgtgatctaggctctagcagggatcggggacttgggacttgggacacttaccaggcagcagcacgtgttgtggctggaagattcccgactgcgtcgttgctggatgcgtcgtcgctgcggaggcgggcagtcctcgcaaggcgtccgcgttgccgatgaagaaggtgcctccgtccaggctctgcacctccgccagcttggccatcagcttggttgacagctcctccacatctgcaaaaatgggcaaagaaaaagaagaacaggactgtgatgagtggaaaaaaacatattttcgattcgcaattggctagagctgtttatatgctccattgttcgattagtgtttaatgtttattggatggcacacaggaaatcccaataccgaattgcgaattgtaaacaatttccctccattggccagtgggagtgggcggagaacgaggccagcggcagaaaatttatcatttatttataaactcaggcggcgagcacgaaaattaagttccaagttgcccaagagaagcgcccgcccgtggacgatgtgatgatgatgatgtgcgtcttctttcttgcctttctggccatcgttcagcggcttttattataaacaattcggccgccagcggcagtgcaaacaataaaatctcttggaaaatggaaaggaaaatagcaaccggccagggaaacaacaactcggcgaagcgaggtcgaaacaattttcaaatttgcgcagttcaattcgatttgaatacgtttctccccattttgttgcggccaaacacatacgtgtacgctccgcttctccgtttttcctccgaacagattagtgaacataaaaggtggaaggggcagcggccggaggatctgggtgaaaaatcaaagcaatagtccaggaagcaaatcggagaactccactcgaaaggcgaacgcttttatgaatcgcaaagtgggacaaaatcgatgaatggcaaatggtgtgtccaacaaaccaggcccttttccttgccttgcggttcttcgggagcggtagctggagctggagccagcacatcttggtttctatttatggaaatgggctgcgtagcgcgaaaaacatggagaaggaaatgtgcaacattctgtggcagttgccttgcgcgaatatttattgcctggcccccaagatgcgatgcagattccagcacagtggagctgcagcgcgtgccaatgaaggaggcagatggaaggggatggaatggggttgcggatgcccaattgtcaatgatgcgcttgaacggaaagtgttgcacttccaccttaccaccttccctgcttttccgctctgaaagcaggcagcatcagcagccgcagctggtcgccgttcaatcatttggccaaaggaaaagggaactgggtgcctatttatagatcccttcgaagcggaagcgactggagctgggggagcagcagcaccattagcggggggaaactccgcttcaagtgcggcagcccctttaccaccgcctgtcacactattttaaatctgtcgatgatcaccaaattctgttgcaccgaaacatgcatgtatgtatgtatgtagttcgtactccctgggcattttcatttcgtttcctgcctgctgtcctcgtgtgtgtgtgtgtgtgtgtgtgtgtattggtgtggaaaacatgtttttccccggctcgtcgcccgtgtgacatgatttcggaatttctccacatgcccgcggaaatgtttcgacaaacatccgcttgtccttgagcggaagggggcgttctgttgtagagacctgagatttttacctgaccgccgagaattcgtttccggctgcaagtgccctgccccaaacccctcgaatccctcctcctcatcctccttcgccgccgctttcgctgcctcctcccgcagctggaaatgcataaattttccacgctggacacgctgcgtgggacgcagagtgtcgacacgccctgaattatgattacacgccaaagaacaacatctcgggtgagatcaacaagaagcgctatcaaaacacggcataaatctcggagtctctgtggatctacacatctctgttctactatgctgtatgggcggggcgggagttgctccaaacggtcggttggtggagcattggaatggttatgccacatgtggcccgcgtctgtgcggcacaagcgctctccacagttgcacaggctccatttgatcgtcgatcctccgcctgccgccaagggcaactgtactgccgccacgaccatgtttcggtcaagttctacatgcttgttcagcggagacccacagtgcctgctaattgtgcccgccattggcatgcgaatcgcgactcgcatgcgccaaaattatttggacatatcgttctactttgttgcagtcgcaggcgcaggcgaagaccaaatccagtggtcgccaccgcctcgttagtattcctttggagacacggtgttgcggatcaccgctgcccagctgatcgtgcagcaattcgctggaaatctcagcactggcgatgccgccgagagattcggattcggattcgactggcgacttggaatcgcgggcctcccatacatcaaagtgtcgtgttctgggcccgtcgccttataaatatgtatgcccttctccctgaacgccagaacggccaatcaaagcgttagttagccgatggcccgagcatgccaagcaggcgggcatacatttctggctgggatttgggactgccgcgaggcccttggccaagcgatgcgctctgaattcacaatcagttgcagggctttggcaggtgaaatgtgcccgggagcgtgtgaaacgcgaagcagacacactgggctaactgggaaagtagagctcaatgcgatggagtacttaccctggtccaggcgacgctccatacgtcgccactggcgcatgtggtggatgaggatgcaggcggccaccgagaagaagaccaggcatgtgagcacggccacgtaaagaacgccagtctgccagtcaaggacccaggcggcggccgcctcctcgtgcagctgctgcagttgctcgtgggtcaggtgctgcagtggggcattgtgctcgaagtgctcatactcggaggactttcggcgctgcaaggaaaggttattgatatctccgatggttagctactctttcgcgacgctaaatgcactcacctccttccagttgggttcggtcttggccaagacaacccagtcgatcttgaggtcgtatatggaaccgcagatggtgtccgtgtgtagctggcagggtcgcagcggtatcatctcgccctggcagcgggtgcacggtgtgcagcgatctcgctgcgagtcccaccaatgctgtggggcgcagggcgagctggaggcgatggacacctggctgaccggcggtggatctggtggcgctatgtctgtgtttgcagcggaggatgaagaggaggcgctggtggccaccagggagcaggtggtggacagcagtagcagagccaggtaactgccgtggctgatgctgatgtggctgccaccgatgtggtgctgctgtcgcctccgtcggcgcttgtgaaacgttgtgtttaagtggtggccactgctgctgctccgactacgcatggctcctccatggccgcctggcagtcttggcggcatcatctgcagcagagaagcgagagaacgatacttttatggattttgtaagatttaatggtttaatggtctcgttgggaagcagctgcccagttttcccatgggaaaaacgaacgcgctgggaaactgggaaaaagaaacactattacttatagatgtggaaggcacttggaagccagctggagaccagaagccatcttctataaaaataattcgcgcaacggcaaactaataaacggccaacggtcataggcatgctaattctgttgttgataatgcgacgccatctccctcatcatcaccatcatcattatcatgaggatcatcatgatggcgatcatcatcatcatcatcgggttgatgaggcttatatggtgatggcgatcataaatgcgtacagtttgcaatcaactttaatgatggcgggtgctgggcactgtagttccccaccacggacaccgaccataacccaccgacttccaactatcaacggcggcagcttgggttcaatgctcatccccatccccatccccatccccatcatcatgctcatgctcatcctcgtccccatcctccccgtgcgtctgcacattttgtttactccccggattcgattcgattcctgtgccgcattaacgacaaactattatagacagtgattattatttatgcggcaaacgcgacggccaagccaagtggaagtggaggagcagagagccaggcaactgcccacttccgttccagcaaagaagtgcacggtgtccctaggcgatcccgaaaaaccagaaaccagaaatcagaaaccagaaacaagaaaatcagaaaaccagaagccgcttcggagtttttccctggaaaatctgcgcttccctttcgccacaatcacagcccattcaccaactctataggataggattggatgggattggattggatggtataggctttaggctttgggctatgggct

SEQ ID NO: 14117 - DNA, 1260 bp, DROSOPHILA
atgcgtagtcggagcagcagcagtggccaccacttaaacacaacgtttcacaagcgccgacggaggcgacagcagcaccacatcggtggcagccacatcagcatcagccacggcagttacctggctctgctactgctgtccaccacctgctccctggtggccaccagcgcctcctcttcatcctccgctgcaaacacagacatagcgccaccagatccaccgccggtcagccaggtgtccatcgcctccagctcgccctgcgccccacagcattggtgggactcgcagcgagatcgctgcacaccgtgcacccgctgccagggcgagatgataccgctgcgaccctgccagctacacacggacaccatctgcggttccatatacgacctcaagatcgactgggttgtcttggccaagaccgaacccaactggaaggagcgccgaaagtcctccgagtatgagcacttcgagcacaatgccccactgcagcacctgacccacgagcaactgcagcagctgcacgaggaggcggccgccgcctgggtccttgactggcagactggcgttctttacgtggccgtgctcacatgcctggtcttcttctcggtggccgcctgcatcctcatccaccacatgcgccagtggcgacgtatggagcgtcgcctggaccaggatgtggaggagctgtcaaccaagctgatggccaagctggcggaggtgcagagcctggacggaggcaccttcttcatcggcaacgcggacgccttgcgaggactgcccgcctccgcagcgacgacgcatccagcaacgacgcagtcgggaatcttccagccacaacacgtgctgctgcctgagaaacgcggcaagcatcaggagcgacgaatcctgaagaccctgcagcccggcaatgtctacattgaggagagcaacgctggattgggcggcatgggcgtgggcctgggcgtccgcggctgttccggcctgaagggctgagccgtagatgtggtcaagggacatacttaaggagtggctatgcaggcgcacggacgcaggacgcgggacgaagcgagaatggatccggaacacgatacgcaaacggaaccggaaacgtaaatggattagagaaagaactttgtacaaacagccgcttaaaagtaggaggaggacggaggaaggaaaccgaaactattattattttttatattattaatcttattctaattattacgactttttttttgtcctaatatttaattgaat

SEQ ID NO: 14118 - protein, 330 aa, DROSOPHILA
MRSRSSSSGHHLNTTFHKRRRRRQQHHIGGSHISISHGSYLALLLLSTTCSLVATSASSSSSAANTDIAPPDPPPVSQVSIASSSPCAPQHWWDSQRDRCTPCTRCQGEMIPLRPCQLHTDTICGSIYDLKIDWVVLAKTEPNWKERRKSSEYEHFEHNAPLQHLTHEQLQQLHEEAAAAWVLDWQTGVLYVAVLTCLVFFSVAACILIHHMRQWRRMERRLDQDVEELSTKLMAKLAEVQSLDGGTFFIGNADALRGLPASAATTHPATTQSGIFQPQHVLLPEKRGKHQERRILKTLQPGNVYIEESNAGLGGMGVGLGVRGCSGLKG

SEQ ID NO: 14119 - DNA, 14929 bp, DROSOPHILA
gcggtcggaggcatctgcgcaacttgggtcatcatttccatcgcaggagtgggagtcgccgaggtgagcacatggttcgggttgggtggtgaacttttaaccgctggcacagtgccgttggccttggcctggcagtaaagttgacacaggggcagcagctccttgtgccgcctcttgatatggctgagaaagttccccgtggacttggtggtgccggagatcagtccgtggcatgttgtgcaggtggcctggatagcacctggcgtcttctggttcggctggatgttcttgtagaacttaccgtccagtagcttgggcagggtaaagggtttccggaacgattcctcgtcgcttaagtaggtgacggcaagggcggccacagcagcatccgatgagtgcccaggcgtcggcgaaggctccattttgatcttgactgcaaaatgaaaagattaacagattagttgggatttaagaatgcttaacaactatatagtaggtacagaacgagaacactgattacgtattatgtgcacatttaatttaatttatttatgttaaggtagagctgaaatcgatgagtatattatattaactgctggtcctccggagcttactgcagctccggaaattcgtccagcaggtcagtcgtgagatccatcgagctgacctccggagcgtgggtgtgcggagtgccagcgatgcgcagggtgacctcctgcactttggaggtcaccaaagtggcccggcagctgtgtttcacgtagcgtgagcaccgccagaagacgttcttcaggctctgacgattcacgacataccgataaccctcgtagaccagcatcaccctgcctcgttgcgtcgtggtgtactggatactggcaccggtggttttgccctcgaagagcgccttcagcgactggatgacacctggaaagggaggtagatgtgttttgacagacattagttgaggttattttgggagatccaggtgagaccactaactagtgcacaataggtttaaagggaagttctagtacaggcatttatttcggtttacgaatgcaacaatcaatttaaactatttcccctcctttataggcataagtttaagagtagacagcttgtggtcaatgaactcctgtactgcggacggggtcagctggttgccgcgcagggcaaacactttacacacatgggctgaaaagatggaagacacacaggttagaacgactaatcgtgcaacgggcgcagcctcccttatgtacttatgatgtcctggatcaggtccttgtccgtggtctcctcgtgctgggcgatgcgcaccagcttgtctttaccaatcaccagatccatcacacggcacgtatatatcatcggcatggggatatacgccttggccagagccaccttggacacaaagacccggctgccatcgaacaaggggatagcgtcagcatctctaggggacttctgcacgctatcagttactggtttccttggatgctccgcgggcttcgggatggcagtgtccttgcttgggccatctggaacggcacacgatggcaaaaacgattaaaacactttagcttaggaggtcaacggaaaacataaacaaaataaaacacggttattgcggttttcttttttacaaagtctttatttcatttcgattaggaagctttcgcctacacttttagcgcaattctggcgtcaaaacagttttcccattatttttcacactcgttgcccaatttgacatattagaacacaaattatttattgaagtaagtccacgcgagtcacagtagacaaggaaatggcagcaacaatgccagggctgcactcgatgcacagcgagtcctcggtaaaagggcgagcaaaatgctacgttgtttgatctaaagtttttttaattatgaaaatgacataccttctttaatattactatactcaagtaaacatattactaaattatagcaaaatatgcatattggtattggtactaataaatacgtcatgcaaacagctcgttccgtgttagaaaacgatttaccggttttaagatggtctataatttttcagtagttttgcgcatacctatagctactgtactcccgaacattgcagccctgggtgcaagcgcttgatctggcaactctgttaaaatgtcgcccacagttgtgaaaaaatgaagtgatttccgaaaattgttgctaaattactaaacaaaaggtgaaattaagatttgtaatggccccgaaaagtgaatagtgttggtggagtcctagttgtgcatgaaagaaccgccttccaaagaagggagcccaatggcgagtaatgaagatgaataaatgccaacgacgcctggaatttcaatcaaatgtgtacaaatgttaaaacgaaattgcaaagcgacgccatgcgcgcaatgttaataaagtacagaaactagagtgaagcagggatatattacttggcggatcctcttgggcaatcaatcagtcagagcgttctaatcaataccccttcctcccacttcaatttgtgtcttgcagaacaggaggatgacttcaagttgcacctgcctctcctcgtgacaagaagaaagaagacgcccggtggctcccgcaagcagagttttgaccacctggaggtgagcttcaccagaagcaataggggtaacaacttgctgaccatcgatgggaagcccttcaccctcaatcgtcggatcaaggatgtgtgctactgggagtgcgtcaagctgcgctgcaagtacatcaagtgctccgcccgtgtggtgaccaaatccaatcggatctcggcactgagcgggctccacaaccatccctaagttacgaactacctgtgccatctcattagtctaataaaggtgtttacgttgaatcagtttatatcttccgcctctcctatcgttgttgattctatagtgtccttgcgcaactcaggacgccctctgactaatctctttcaattcttgcagcatgctaccaactggtgcccaatcgccgcggtgggaagaacctcatcttccaggggcacatgtactccgtggagcgcaagtaccgaaacagcatcaactgggtatgttccaagaacagcaacagcgtgcttcgctgcccggcgaggtgcgtcacaaatccggagagtggcaatggcatcaagctgagccaccgacgccacaatcatccggcggatgcctttaagccccacaagcgctgtcgaaagcgtcccggcgatcgaaagtaacaagtaaccatgtttcaggatgcaaagcatgcaggcttcggcaattgttagtcacactaaatataaatgtttctcatcgttgtcgaattgtaacattttggtgtaatggaatcactgttcatttggttttgggctttcacatatccgaattactttactaatactcactcatcagcacgtttcccataaactaattatagttttaagctgtagttaattccaaacgacttatgacttactatgaaaatctcctaacagattttcgccacagttgtgtttgccgacggaacggagttacgataatcgatggctaccgcttcgtgatcggtactacaaatctgcgtcgcacctatctgaagtgcgccaactttcgcagcaactgccgggcccgggccattcttaatacggatacgaacaaagtgcggatgaggcacgaccgccataatcactcccgtacggatgctgtgagcggacgtatctctaagaagtagcaggtaccgagctgtctagaggaataaacatgctgtttccgtttaaaaatgtttaactgcttttcactaccaacgaaaaaccataataaccttacatcctcacccataatttgaaagacctgtcctaatctaactaaattcgccaatctcttgcagataactcgaaaatagcgcagtatgtgcgctccaaccgaggaaccgatctcgtttaccacgagggaaacacctacacacccaatgaaaagctgagggagggacaaaagagtcgagactggaagtgctcaatgtaccataaggccaagtgccgggcccgcctggttactcgcattaccggtggaggggatattatacacgtgaccagcaacctgcacacacatcccacaatgtacaccacgcagaaaacggacattagcgtggttgaccagaaactgtgcctcgaaaggaatccactctgcgttaacactcgatcgattaaaatgtagatcaagtaaagaccaccgactgattactcgttacgattagcatgatcttcagtataaataacgttttagatttaaaaagtattaaaaaatgctcatatacattcaataatttttaagtaatttcatttatttataataagcatattttcttaagttctttcacatttgatttgtttactacgacgaattccatttttaattcaaaaccgttttatttacaggacatctttcgacattgcgccatctcccagttgaggccatatttgatgcggacggcaaacagatggacttcatacccaacattcgcgtcatccgaagtcagcggaagaccataaagctgatgtttaaaaaatatgcctactcgaagaccaacgagcacgataccacaacctactggcactgccgaagtcgtcgcaatggaaggcctgcgtgcaaggcccggttttccaccaagaagctcaagaacggtagctacaaagtatatctgacccagccggagcacaatcatcccccaaagaagcgtcgcctataatcagaataactatattttaagaagaatgatatattaaagagccatgtcttggcaaaatgacttgcaccgactctgaatctctactctactactctactctcaaatagcccagcaaatgaccatttactaattacaatgtgttcctttctccttccacagaaagcagcgtggcgatctactcggcaacctcccggggacgaatgcaactgatttacggcggacagccattcatcttcgagaagacgctgaaactgtcttcgggagaggagaagcgcttctggcgctgcaaccaatggtggaaccaaaagtgtcgctcgcgcgtcttcaccatcaacgacgttgtctgtccgcttaaccgattccacacgcacgaggagatcgtgcggcgaaagaagcgagtgcgccgcgtgccgccggtggagacgattgccaaggtggttgccacaacacccaggcatccgcagcatcaacagacaacccagcagcaacaagagattcagctgaccagcgatgcaattgctggagcaatactggatgatgaatccccagctacaatcgatgtcagcgagctggggatgcacctgaaatacgaagaaatcgtagcggatgtcacgggcattgtgggcggcacgcgagtggtcagtcgccgaaagtgaagattgctttttattttctgacgtaagatcgcagattcagattccttctttgtaaaaactcatgctttgagttttcatttttgaacttgccacgtcgaaaaccaagagccgaacagttttgatgaatttaaaaaggctaagcacaaccactagccaataaatacaatttttattattattttaaggacatatttttaaaactctttttattaagcgtaatattccaaggtttcctcccccatttgtaaaatttgataaataccccatgatttcctttgacattttggagttgtttagaataaaatctgttccttctgttatgcctttgttcaaacaaaattgacctagcctactcccataattattaatacaaaactgcgtttaagaaggcggacaagctagctattatgatacagcttataaacaatttattatgtgtacatttaataaacgtaagacccaaacagtgcaattgaatcgttgtagaacctccgaactttctccacaacccacttgagatccttccttcaagcgaatatcaccgacttactaacgcaccgggtcacatatctattctcttttaaggtgacgccacccagttcttcttcaccaagggtcagcgcgaatcggtcaaactcaactactgcggtcatagctacgtcaagttcatggagaatggacgcggcaccaagtggatttgtgccacgcgctccaccaccaagtgccgtgctcgcatccgtaccaccaaaaacaactacctggaggtactgtatgcgtcccacaatcacggttttccgccgcagaagaaggatcggggtcgagccagccaaaggatgtgatccaaaatgtaactgagagtgtgactgtgactaaagccaacttcccctacaatacaatttcaatagtttacaaaacacttgaagcctcctctaaaacagcttgactttgaaactatatattgaaaaaaaggctgagacagcgccaatcaatttcccagccaacccaatcctagtggtcaatctgtctaatggatgtagccatatttccttccattaaccaagctcaaagtttgccagatgcttagattggctaacactattttcgttttcaatacaaaagaacgcctatatgatcttcctaactcgaaatctgcgagcgagaaatatacttacatgaacagactttaaaaaaaaacgagttcaccataatgagggcccaaaaagtgtgctaaagaaacattttattcttcatggttaaattctcttacatacttaaagtgaatattgttaaataggaaatgaaattaaatttttcgagaggttacgacacaccacgaagtgcagaaatcaaaataatatagatcttttctaacttgtgtctttgaatttgaacttataccttgattaagtcgaccactttttttttgggtaatatcatcctttcctcatccactcaagagtggagttcctcgaagcagggctcgcacatccagttgcttccaggacatgtgttgcacagcgtattgatcctcctcaggcccgtcctgttcttttttaggcagttcacgcactttcccttcatgcgaggcaatcccacatacacaaagttgtgctcgttggatgaggtgcggatgatgttgtccgggttctttaggttcagccttccagcgggctccagttttatgattgtggctaaaaatttgtcatcccgcacctgccgcactttttgaatcggtgctatatgtcgtgcagccttaaaaatcaaacctgtaagtttaagaggaggaaagatatattatatggtaatgattttcttatgaatttaaagggtattagaataaaaatataccattaaatagtttaactaaactatcgtttgcttgtttcatttaataaattattactcttcgcttatttgtacactgttttgttcattaatgcattaaactttaatattcaagccgtatgttttcccaattgagcgtcagtcttgcaaacggtgtacaaatgtcacatttaaatttaaatataaaagatttagattagaggaaagtatcaaactaattttatagattataatggttcttaaaatttaataatcctctttatgaggacgaggtgggcaatcgagcactctgggaacaaatgtctttagtcgttccggcggcttgtgattgtgaaatcctcggattgattttattgactttatgtgagtggtcagcgccgaagtgcagtgcatctttttgtacatggagcagcgccagaaggccagacatttcccgggattcctggagtaacagctaaacgtgaatccctcgtggactaattttcctctatcgtcgtaggtgagaactgaaagagaagtattcaattagtcaatggagacaggaactaggcctactcttcgatacctcgcctcctaattgatcagaacgaagctcggttactttcatgagttcagatctttatttcacatgatcacatagccgtcaagggaatggaacaattggatttgcaaagcatatgcgaacttaaaaaaaccttcattggttaatcgaactcaggggtcttacagctatattcacaatcttattcattaaacttcaaattaaactcgattcgacacttcaaaatgcatattcgggtaactaggatgaaaatatcgaaaataagtgtacatagtccatttcctagatatgtacttttaatagctgttacttagtaactacattgcactgccaagaccagttggatagccaatctattcgtgcatgagcatcatggaggcgtgcatcagttcttgatctgtcaactgcaatgtggccgcatcgctagtcaactggtgttcatcgatgaactcttgcttctgctcctgaagctgcagctgtgtgaagctgtgcgtcctggagagctttcttcctgtgccgatcgctgccattttgttacgctgaatgatcttgtctatcttctccgtgtgcggctggtggttatgtagtccgcctgtcacactcttaaggcgtccgttctccaggacgcagcgagatcgacagcgcatttcatgcgcctttttggagtagttgtggcagcgccaatactgtttattgctcttgcgactgtggcagttgtacatgtagccatttaacactaggcacggcgtcgaccaggggctctctataaaaaccagctcgtcctctgaaaagaagaagtttttatcgttagttcagttgtctacacttaagatatttggttaataacaattgggttacccagtccacaatgagctccatcttttgttttggtcttaatttattaggagctaagtatgaaatacgtttacagaactcagacaagtcgcttaaaatctactttcgagtggtcgggtcgatttctttgggcaaaatggtcttgagccttgtggaattgtgaatttttgcatgacttactaacatataaagatgtattactattaaaataaatatgtattaattattacagagctggaaagttttaggttttaaaaataagccaaaataataccagctatggctttcttatctttataaagactttccaactgattgactgtagattggttaaaaactcccaagtgaaatcgactccttccgtggttcgagataaataattagcttaggtgttagctgataactcctaggggtgctcgctcttcagcagggatcgatgcttggcctcttctgtccgccacctgcccacccgttgccgatcccggatccgctcctctgcatgccgctcctcctcatctaactcctcctcagcggcgtccacaagggcctgcatctcgatctcggtagcctcggcagcgggcaggaacaacttgcagtccttgccgtccttggcagtcacaatgatgttgctactgcccagatactgtgatatctttgggttcgacgtgcagatctcgatgtactcctccagttcctgctccaccttatacagttgtcgctggccaatcctcgaggcgtgggactcgtgattgtgctgacgtcgtgcgtcgatgaagtgtccgtcgcgggtgatgaccaccgccttgcagcgcagcttgagcacatccgcacagcgccaggtcgtctgtccattggcctgggtgagcttcttgttgtagatgtagttgcggaacaccagctgggcgttcttcttctggctgcgaatgaaactgatctccgtatctgcgagagtcgaggaaaaccgaaagcatggggtttagtgggcataatataattgacagatgatctagttgctattctagtgaatgtacatatatggcttaagcgttaagttaggatcggcgaaataaaacaacgtttagtttagactttggctttaagcagtttattcgcaatcagtgaaccggaggacccttgggtttggtggtagaaaacttaccaaaatgcggcgggatggcattttacaacttacggtagcatttgcatcgcttggttttcaaataagcactatcacagattatcaaaagggtggaaatagggaggcgttgccccccttaccagccccatcactttaaatattaaataaacaccacaccaaacacaccgtcacaagctggaaataattaattgtgaacaaataggccgtgtaattcggatgcaataaaataacaaaacaaattggcttgcatttttttaatgaatttgcacggcgttgccacacagccgaagcaccagggctgcacattcaattagggtttccggaagtggcaacaccgtcctcaatttccacaaaatggcaactccgcattaattcaaattttaattctttattttttcatactacaaatatatatataatatattctgtggatactttctaaatatccggaccaggcgcgcaaaatataaattacacgattcaaacgttaatataaattttctcaaatacgcttaacaataaaaaaacgaaaattactactacaaataaaggaaatataagtcggaaatgcttcaaggcggtccaaccttttgttccaaggtatataaactatcgcctatatgaattaaaacggtttatgattatctcttaccaattaggtaagaggtctagtatattctgttttttttgtttaaggttaccgcgacatccgtaaatatcgtgaaattcttcagacaccctttaattcggaaccatataaaaaaaacacgcaaaatgttccatacaaaaaatttggaatgaaaaaacaaaatcagcacgcaaaaagtaaaacagaatcgacgctgcatgaagaaataaatttcctctccactgataacgttaaaagagtctccctatacgtattattaaaatctttccttttttttttacgtgaccactaaaacgattagaaatgaacctttactataacacagcgttataaatacaattttttttttaagactcggcaatcaatgccgttgctggatttgcatcagcaagcttttacgttgcttaaacaaatccagacaacatctttaagtacgagtttgaaaacataaataacaacaaacctcagtagccttagcatcaccagaggatcattattaaacagaaatgcgcatgcccaaataataaccccctgatcatgtaagattgaaaactccaattactcgctttgctcagtcaaataaacaattacaaatgcctgcaaattttggaaaaatatatggataggtgtggttttaagagtgccggtattaccttgagtagttgcagctcttcacgggttcggcttcacgttgacatcagatatccatcgtagcagcttcttaaaatttcatcactctacttaccttttaactgaataagtgtaaaaccgcgcgatctccgtccagcatttaacaaatatgcatcggacagcagatctgcctagtgctctttgtcgattcgaaatagaacacaggcccgtaaactacttattaactaatggccagcgaagtatagcttaagtttgttcaaaacaaaattaaacgcactttgccgaactctaaaaggacatgatccgcttgcgacgctaatagatttggaaagtgttcaagtttggaatacatatgtgatcttttttttaacgtgtttgcatttcgcaagcggacttaatgtcctttaaatattgcttatatctattggcctctggccatgtatgctttgcaattcaaccaaccttgagcctctgtgttgccctgatccccgctggtgtcgacaaacgatgattcactgtagttctgggactgttgcttgaccacagccttggaagtggtcgccgtcactccgccaccgctcgtatttgccgcagtctggttgccagcatcctcgttttcagtgaagtagctgtcgtcgtagcgcatgtctccgtaagtatcgtcctccacataggtgccctcggcatcgccggcggcgtcgccatggtcctcagagtagtcaggttcagatttcgtgggcaattccatggggagatcaatgtactcggcttcctcctgtcgaacctgctgcggcgattgctggtggagctttgcttctgccgcagagaccacagaggtttgcacggtgatctgttgcggcacaagttgggcggttgtcgtggctccagtttcagtggtcgagtcgagagggtccataacatttgcggaggtgcttgtcttggagcgctttacgccggcgctcgaggaggcgggggtcagggaggagcgctgggcagagcgtttgtttgtcgacaccagcgtcgccgtcgtcgtggttcccgtctgcagctgctgcgattggatctgctgcgccgcctgctgcggttgctgctgttgtacaatggtggcttggggtgcggccgtggtctggatgacgatctgggtggtgctctgtttctcgtcgcccaggccgtcgtccacggtctcgatcttgtagcgggcggaggcgcgaggctgctggcgctgcacccgctgagccggtatttgctgttgttgtacatgaggtgctgctggcggcgggctggattcctgcggcggctgaggcgcaggatcgttctgaaaaaaaaatattggttttttaattattaacatatattttaggaataagtgaaaagatattttgtatgttctagcacctctttaaaaatgaaccacgatcaaaacttaataaactttaaaagtatctgcatttaataaaatggacgatttcaaaactatatgttgaaaagaattattccgttagaatggaatttgcaaagaaataagaaatctggccattaattagtaaagtacgccttccttgaattgggaaacaataatacattttctagttccgatgcctgtttctttaggtacagctgcactaaatttaattttgcaaatacgttaattttagtcgaaaacattaagagatatttcccaatttaaacattagtttaaaagcaaaaaatgtttatgctttggcatcgaattcgctgcgagacaaaaacaaccactccaatttgccgctgccgtgcgagccagagcgagacaaacgcttcgcgtatagcccctgcagttgtctctctctggcacgcgtgccttttggcatttggtttgcgagaaatttctcggtacagtcaaaccatgctcttatacagacgccagccatcgcgtctgtatgtattgggcgcgaaaggttgcgttgtagttgctcgattcgatataccagtatatcacgcacacaaatgtatacatatactcacatccgttagccccttgatttgcagcgattccgcggtgctaataaacgcgggcagggcgtcctgcttcacgttgacctcgccgcagtacatgaattggatgaggtccttcagcgccgagtggctgacgttgttcaggaatactgcaagataggcgaagagagtataaggtaaaaaatcacgtagagctacagatctgagctgaggggcacaaactcaccgatagcgtgggtgttcgacggcatctgagtgaacatcttgcggaagaagggcgagcagacggataacaccaatcggtgggccttcactatttggccctcggcggccagcgagacgtccaccaggtcgccgcggcatagcgactcgtggaagccggccgacaaattcgtgttgaagttgttccagcacaagctgaattgctcgtcgtccgccatcttggacgaaaatcaatacttttctgtatctatgcgtttgttggctgcaggcgaaaaagtgcaatgcgcgtttaaaactcaatgcagcgagtgctgaaaaatggcaaaggcacacacaaaatagaatgcactgcagccaaaaaaaactgggaaattttcacgcgtctgtctgtgtgtgcgtgtgtgtaaattacatttatctcgcttaatgaccgcaacctactgtgtatattcacttggggcgccattactcacctcttgactaaatatttttccaataaaataactaactaaagccagagttttttgctagcgcggccgacacgcagaacgcgtccgagttctttgacgtgaaaattagaagtgttaccaggcgacgagattgctggcgatggcaaaacaaaaagtgacaatatatcgatagcttaaaatatttatatcgaaatacttttatgaatattgatagttgatgtgctttgatattttttttttaaatgttagtacgaaaatcacataattaagttcataactttttgaaaacttttacatactttagtttacatatgctgtaggattttagtttgcgggtgtgttaaaaaaggttgtaggactaagaaaatatcggcctaagtatacgatgtatttatgttatgacgaaatttcttatttcacaacagttttgttgtctagcttaatgtttaatttattttaaatgaaataaaacaaaatacaaattaacgagtttaaagactagcagtcaaactagcacaactagaataaaattcataagataaacagaaaaattttaacttttttaaattctcctattttttaaactgggccttcgattttttacgaatggaggattattttctagcggaattcattataactctgacaaactcttatggagcgcatcgtcactacgtaaaccctacactctgaatgcacaagggcactatatttttaaaaaaaaagtgacttaataggattataagaaaggcaaatattcgctaaaagttcttaaacataccaaacaaaatatgtatgtacataatatgtatatctgtgtactgtatgtacatatgcactacatatgcaattatatacatatgtgaacacgtttttggtgcaatgccaagattcgaaatgaaggtattcatcccataaaggcgaaatattattaaaaatgttgctctatttagacaacttcacatatccatgttattcatctctattaaatcataacagtttcaagtgaaataaacaataatatatgagagcgtaacgtttaaaccaaacatattccccacgatttatttatttgttagcttagtacactcttaaa

SEQ ID NO: 14120 - DNA, 1942 bp, DROSOPHILA
caaagaactcggacgcgttctgcgtgtcggccgcgctagcaaaaaactctggctttagttagttattttattggaaaaatatttagtcaagagacagacgcgtgaaaatttcccagttttttttggctgcagtgcattctattttgtgtgtgcctttgccatttttcagcactcgctgcattgagttttaaacgcgcattgcactttttcgcctgcagccaacaaacgcatagatacagaaaagtattgattttcgtccaagatggcggacgacgagcaattcagcttgtgctggaacaacttcaacacgaatttgtcggccggcttccacgagtcgctatgccgcggcgacctggtggacgtctcgctggccgccgagggccaaatagtgaaggcccaccgattggtgttatccgtctgctcgcccttcttccgcaagatgttcactcagatgccgtcgaacacccacgctatcgtattcctgaacaacgtcagccactcggcgctgaaggacctcatccaattcatgtactgcggcgaggtcaacgtgaagcaggacgccctgcccgcgtttattagcaccgcggaatcgctgcaaatcaaggggctaacggataacgatcctgcgcctcagccgccgcaggaatccagcccgccgccagcagcacctcatgtacaacaacagcaaataccggctcagcgggtgcagcgccagcagcctcgcgcctccgcccgctacaagatcgagaccgtggacgacggcctgggcgacgagaaacagagcaccacccagatcgtcatccagaccacggccgcaccccaagccaccattgtacaacagcagcaaccgcagcaggcggcgcagcagatccaatcgcagcagctgcagacgggaaccacgacgacggcgacgctggtgtcgacaaacaaacgctctgcccagcgctcctccctgacccccgcctcctcgagcgccggcgtaaagcgctccaagacaagcacctccgcaaatgttatggaccctctcgactcgaccactgaaactggagccacgacaaccgcccaacttgtgccgcaacagatcaccgtgcaaacctctgtggtctctgcggcagaagcaaagctccaccagcaatcgccgcagcaggttcgacaggaggaagccgagtacattgatctccccatggaattgcccacgaaatctgaacctgactactctgaggaccatggcgacgccgccggcgatgccgagggcacctatgtggaggacgatacttacggagacatgcgctacgacgacagctacttcactgaaaacgaggatgctggcaaccagactgcggcaaatacgagcggtggcggagtgacggcgaccacttccaaggctgtggtcaagcaacagtcccagaactacagtgaatcatcgtttgtcgacaccagcggggatcagggcaacacagaggctcaagatggcccaagcaaggacactgccatcccgaagcccgcggagcatccaaggaaaccagtaactgatagcgtgcagaagtcccctagagatgctgacgctatccccttgttcgatggcagccgggtctttgtgtccaaggtggctctggccaaggcgtatatccccatgccgatgatatatacgtgccgtgtgatggatctggtgattggtaaagacaagctggtgcgcatcgcccagcacgaggagaccacggacaaggacctgatccaggacatcataacccatgtgtgtaaagtgtttgccctgcgcggcaaccagctgaccccgtccgcagtacaggagttcattgaccacaagctgtctactcttaaacttatgcctataaaggaggggaaatagtttaaattgattgttgcattcgtaaaccgaaataaatgcctgtactagaacttccctttaaacctattgtgcact

SEQ ID NO: 14121 - protein, 534 aa, DROSOPHILA
MADDEQFSLCWNNFNTNLSAGFHESLCRGDLVDVSLAAEGQIVKAHRLVLSVCSPFFRKMFTQMPSNTHAIVFLNNVSHSALKDLIQFMYCGEVNVKQDALPAFISTAESLQIKGLTDNDPAPQPPQESSPPPAAPHVQQQQIPAQRVQRQQPRASARYKIETVDDGLGDEKQSTTQIVIQTTAAPQATIVQQQQPQQAAQQIQSQQLQTGTTTTATLVSTNKRSAQRSSLTPASSSAGVKRSKTSTSANVMDPLDSTTETGATTTAQLVPQQITVQTSVVSAAEAKLHQQSPQQVRQEEAEYIDLPMELPTKSEPDYSEDHGDAAGDAEGTYVEDDTYGDMRYDDSYFTENEDAGNQTAANTSGGGVTATTSKAVVKQQSQNYSESSFVDTSGDQGNTEAQDGPSKDTAIPKPAEHPRKPVTDSVQKSPRDADAIPLFDGSRVFVSKVALAKAYIPMPMIYTCRVMDLVIGKDKLVRIAQHEETTDKDLIQDIITHVCKVFALRGNQLTPSAVQEFIDHKLSTLKLMPIKEGK

SEQ ID NO: 14122 - DNA, 6437 bp, DROSOPHILA
acactctgcgattgccgtctcgaagtcagcaggctcatcggtattatcctttgctcgatccgccatctcttacaattaataagaatattttgttttgggggtgggcagtgaaaattttgaaaatgactagaaagactcctggatagttacgaaatggaaagggacttcaaaatattgtggcatatgggattttaaaatttataaattcgtgtacttgatactcaatatgctttctataactaagaaaaattgaatcaaatattataggtaataattatcgctagatcattgttttcagtacattatctcgttatgttcctatttctatgcaatttgagagatacttatgcatttccagaaataaaaggcatgccagcactcataattagcaattttattcaatattttaagattaagaggctaacattgagtgcacatttggtgaaagttcgtgttgtttgggtttcactaatgcactcaatctgataaatagcatccacttaaaggatgctacgataagtcaattcaggcagcactaatttccactttgtttaatgttatctgtagttgatcactcacctgccaatttacctgccaacacagccacccaccaaaacgccaaaccaactgaataccgcctgatacacttaattagtgctaatgagatttgcatgtctccaacttccgccgtcttttgtccttgcccaccagtggagtcctttgagggatccgcagatatgtatttgcccccatctggcttaagcacgtaggaacttgaatggagctctcataacatcgtaatttgtacaacagtaaagatatatttggtttaattacttagggtatgtataaatagttgttcagcgcctatcttatccagttgagtcgttatctctaatttgtaaaactaaacaaaagctaatgtcgcaagatccgattctaaatgggcactcctaggtctagtttttattatcttattatttgtatttcttattttgttctaagaaaacgttgcctttgccggatcaggcagagatattgacaggatgccagatactgcaataaaatgagataaaaatgttgtaaaaaaatgattagagagtaaactaacttcaacttacatatcagcactgaggacaccattataaatggtggcaaacatccggtttgaacgaatacggggaagagtaaatttccggacagagcaccaaagcgtccacacatcatggcaatggcaacaacaacggttctgcaaatgttaacctttcatttaatacgatttcgatgtcattaatggaaaacctacctcaattgtgtgggaaacagggccaccacagcacccaaaagtgaagagacagcaattcccgtaatcgtaagaaaagtcgcagacacaatgagtgtcattagactgctcacggaaaagtagagcatcaggccaaaggttcccgacagaaacaatccgtaagctggaaagtacgttatatgaagttatatcaccaaagagatatacaatttcgggagcaacttactcatcatgcgttttggacccagagcccgcaagattccaccggcaaagaagtagcccacaaagcccgtggccgaaacaataatgttattcagatacatgtccatcgaaattaccttgggctataaaaataaattaaggggctaattttagaagctttatcaagaaagatcacttccagtttgcatgtaactatcaaataaactattgtagtatacaacttccacatttataaacgattatggttatctttcgttttgtgttcagagatagccacgtcacgatcacgatgacgaggcgttaagtgagattgcagataagcccaatctacagatccagaccataactagatctgctatctccaagcattatctgcagatcaaaaccagatctagatctgctatctccaagcactatctgtcacctacctcggaacaggcgtcggcgtaattcagagctgtctcagccgtctgattgacgctgaactcgaggatggtgcacatgctgacatccaatccgtccccggcgtgcagggcctcgtactccgccatggaggcgaagagctgcggcagccacagacggatggtgttcatgcccaggaagatgccgaactgcatcacgtagcagcaaatggccaaacccagcaggggcttcctgaccagcggcttcatctgctgcagcccggctcggaggctctcagccagggtacgagactgtcgcttggttggcacctctccggatttctcctcgattgtgtagataacctcgttctgggcggccttacgattgggcacttcctgaatgagagcttttatctgtaaggatttgatttcgtattaaatttttaaacactgtctatagttttgaatattctcatacgggatagctatccttgggcttgcgagtgttgacatggtagatctgcttaaaggcttggagcgcctcctcgttccgtccttgggccattaaaaatcgcggactttccggcatgctgcagaaaatcaaaccgctgatcaaacttggaatgcccagcacgaacaggaaaatttgccaactgtggactgagttaaaatacattaaattagaataatctaacatttcaataagtatgacggcaacgtaccttgcaagccccagaactcaaagtcccaatctctgggaaaaattccccaggccaaaagaggtagcgaaaccgtcgccgtagaggtgaccatgcccacgatcatcagaacagaggatcggtgcttgggtccgtgcatttcagtcagataggtgaagagcacagcagccggaccattcaccctttaataaaatataaattaacgattaaattataaaactgattactcaatacttacaccaagccccccagaaacttgaacatcaccagcatactgaagttttgactcaaggcactgccaaaaacgcacacagcatcgatcagatagccccagtagaggatctttttgcgacccttcgtatctgccagatagccccaggcaatggccgagatggtcatgcccgcgtaggccaccgcattcagcacacctttgtcctccagagtcagacgaagatcgcactcggcaattggcaggatgtaggacattgagctggactcgaatattgcggcactctgggcgggaatggagacgatcagcagcatcagattgaaaattccaaagccagctccttcgatcgccttgtcgaaggtggcagaaccttcttccgtgggcgtggcttctgcctccgcggtactatctgaattaccatcagcatccttgtcattttctagtcctaaatcgataagagggctacttattccatggggctataatttcataccactaacactaaacttttccacacttgtttaaggcacttatgataaatttctagaaactcagattacgactaatcacataattttacgtctatttttcagtgtcataaaagattacgcttaaatttgtcacaataaacacatttcagttaatttgcgactggttattacatgatacttcttaaaaacaatgcactttttaaggaagctctgttttattgggtttataaggttttttctactccatcgtagttagttgccaattattttttaaccctttacctttgcttttctctggaatcgctgttttaatattcttttccgacatcttagctattactgtttgtcaccatgggttttcacaatcggcttgctcttgaaattgattgttcaattaatacgatgcagttcttaattaaaaagcgcaaccacaagttctttaaaaaattaagttcaaagtcaatgagttaagggttttcaaaatattcctattcaaccgacttgcacacttgcaatgctgcacgagaaatgatcatctagagcgcatggcacctccttttatcggagattacttcaataaaagtgaagattcacttaactacatctctcttatcgcgggctttacaatctaagaaagctaataaacgtattaaaccatgtttatttagaaaaacacgttggattttgtaaagggcacagtgagttaaaaaaattttagggaaaacattatactccagttgtgaatgaatatctctattgactttttaatcatgtttatcaaacaaaattagtaattttgatgaaactccatacaaattcattaaaaccacatatgtatatgtacattatgaaacgcactgtacgagcatatttcggctagccacgatgatgccatgcggtagcacccattaaaagtaggaaaacgtgtgaggtgttcatgtctcatgtcatgtcacatgtctttacaatttttacaattaaatatatacatttatattgttattcctatcctgaataaattgttctagatagattattaatttatgacatttgactatattattactccacgctgactacgtcattttaatggtgaaatttgtgggatgcttaatcatgagcctttatctcggatcttatctgtgtaaagcttatctcaaagatgacttaacacattaattcccattgaatgaattactcattagacgtgcaagattctcatcccacaattggggttttatttcttatactaaaaggagttataaatatgaggagctcttttttccaagccattcacaatgattgacactatttccagcgtcgatgtccagtcttttgccaactcagcttactcgatagcgtccacaagcttgcacaacatgcgatcgtgctggtaactgggatcattcttggccgccgcattcgcctccaacggatccacctccgtcttaatctttgctccgccgctatcgtcgtcatcatctagaaccggcagagctgagaaggcggtattaacgatctcgcgcacacgttccaagtgcttttggaaacgggcggcggtctcaacgcgctgccgcttctgcatttccatcatgacgcgcagcgtttccctcgcctgatgtgggcgaaattcattgaggaggtgatgcatgttgacgaacagcagactgatatcgtcaatctaagatatcaaatgagtgtaatacaatagatgctacattttaatgggtcaattgactcaccttttccgtgcgccgcgggctgtcaggattcaggataagaaagtcaatgagatctaggaagttgaccaagagggagtggttaagcttcttgagctccttgcgccgatcgaaatggatggggatcagtcgcttaatattctgggactccaagctgcggatcatctcgtcgttgttgtactggatgccaaacatgctatagacttcgtgctgcgccggcggcggcggtgggcgtggcgctcggttgcggcggatattctcgtccgtgtaattggcgatgtaccgctccggcggcatcggcaggctggaaacctgggtctcctggttggacattatgagattaacaagtgcggaaatacaaaaataataaatgatttttgttttgaagaagtgatggcacctgagacaggcgaatcactcacgatagtgatgacactatcactcaaattgttttcttaaaaatgagcacactagaggtttgaagctagacaatgcaataataagcagaatttattataatatgttttgagacactgacaaataatttacaattacaaaaattaaattagatattaatcgagctcgaaataataaatgattcaccgtgcctagctatcgataacttaaaggtgaccatgcttgcatgcaccccctacagcattgccatagcaatttttctccgtctcttccctcattcgtcggtagagcacaacaaaataagaaacacatatatatcttgatgtgaatagctaattgttccagcaccgattcgcgccaatattcctgttcctgccaaagaaatgaaaacaaaacgtaaaaccataacataactggacccaactaagagacaagccgtgctgcctccaccattttgatttccccactcagcgtgtgtgcgtgcttgcagtgcttgtgcacgatgccagtaaaatgtgcaaaaccggacataaaacaaacttttcctagtgtcatctagtgagccatggagcggattttgcctgaagaagcggaagcgggtaagcatccagaacttaggtaaccaacgcaggacagccccaggcgtgatcttcgtttcccattgattaagtcagcgctatttccagtataccgcgtgtgttggtgcttctatgcgagtgtgtgtgtgtgtgtatggggagggccgaaataaacaataaagcggatctgcgattgggtgtgtggtttttgcttaagtaaatccaatcggtttctatttaattcacagcctacttgagcgaagcgcgggagcagatattggaaatagccaagaatcggccgggaacccaagtggccaagtgcatccgcgcctacgatg

SEQ ID NO: 14123 - DNA, 2322 bp, DROSOPHILA
atgtccaaccaggagacccaggtttccagcctgccgatgccgccggagcggtacatcgccaattacacggacgagaatatccgccgcaaccgagcgccacgcccaccgccgccgccggcgcagcacgaagtctatagcatgtttggcatccagtacaacaacgacgagatgatccgcagcttggagtcccagaatattaagcgactgatccccatccatttcgatcggcgcaaggagctcaagaagcttaaccactccctcttggtcaacttcctagatctcattgactttcttatcctgaatcctgacagcccgcggcgcacggaaaagattgacgatatcagtctgctgttcgtcaacatgcatcacctcctcaatgaatttcgcccacatcaggcgagggaaacgctgcgcgtcatgatggaaatgcagaagcggcagcgcgttgagaccgccgcccgtttccaaaagcacttggaacgtgtgcgcgagatcgttaataccgccttctcagctctgccggttctagatgatgacgacgatagcggcggagcaaagattaagacggaggtggatccgttggaggcgaatgcggcggccaagaatgatcccagttaccagcacgatcgcatgttgtgcaagcttgtggacgctatcgaccctcttatcgatttaggactagaaaatgacaaggatgctgatggtaattcagatagtaccgcggaggcagaagccacgcccacggaagaaggttctgccaccttcgacaaggcgatcgaaggagctggctttggaattttcaatctgatgctgctgatcgtctccattcccgcccagagtgccgcaatattcgagtccagctcaatgtcctacatcctgccaattgccgagtgcgatcttcgtctgactctggaggacaaaggtgtgctgaatgcggtggcctacgcgggcatgaccatctcggccattgcctggggctatctggcagatacgaagggtcgcaaaaagatcctctactggggctatctgatcgatgctgtgtgcgtttttggcagtgccttgagtcaaaacttcagtatgctggtgatgttcaagtttctggggggcttggtggtgaatggtccggctgctgtgctcttcacctatctgactgaaatgcacggacccaagcaccgatcctctgttctgatgatcgtgggcatggtcacctctacggcgacggtttcgctacctcttttggcctggggaatttttcccagagattgggactttgagttctggggcttgcaagtccacagttggcaaattttcctgttcgtgctgggcattccaagtttgatcagcggtttgattttctgcagcatgccggaaagtccgcgatttttaatggcccaaggacggaacgaggaggcgctccaagcctttaagcagatctaccatgtcaacactcgcaagcccaaggatagctatcccataaaagctctcattcaggaagtgcccaatcgtaaggccgcccagaacgaggttatctacacaatcgaggagaaatccggagaggtgccaaccaagcgacagtctcgtaccctggctgagagcctccgagccgggctgcagcagatgaagccgctggtcaggaagcccctgctgggtttggccatttgctgctacgtgatgcagttcggcatcttcctgggcatgaacaccatccgtctgtggctgccgcagctcttcgcctccatggcggagtacgaggccctgcacgccggggacggattggatgtcagcatgtgcaccatcctcgagttcagcgtcaatcagacggctgagacagctctgaattacgccgacgcctgttccgagcccaaggtaatttcgatggacatgtatctgaataacattattgtttcggccacgggctttgtgggctacttctttgccggtggaatcttgcgggctctgggtccaaaacgcatgatgacttacggattgtttctgtcgggaacctttggcctgatgctctacttttccgtgagcagtctaatgacactcattgtgtctgcgacttttcttacgattacgggaattgctgtctcttcacttttgggtgctgtggtggccctgtttcccacacaattgagaaccgttgttgttgccattgccatgatgtgtggacgctttggtgctctgtccggaaatttactcttccccgtattcgttcaaaccggatgtttgccaccatttataatggtgtcctcagtgctgatattatctggcatcctgtcaatatctctgcctgatccggcaaaggcaacgttttcttag

SEQ ID NO: 14124 - protein, 773 aa, DROSOPHILA
MSNQETQVSSLPMPPERYIANYTDENIRRNRAPRPPPPPAQHEVYSMFGIQYNNDEMIRSLESQNIKRLIPIHFDRRKELKKLNHSLLVNFLDLIDFLILNPDSPRRTEKIDDISLLFVNMHHLLNEFRPHQARETLRVMMEMQKRQRVETAARFQKHLERVREIVNTAFSALPVLDDDDDSGGAKIKTEVDPLEANAAAKNDPSYQHDRMLCKLVDAIDPLIDLGLENDKDADGNSDSTAEAEATPTEEGSATFDKAIEGAGFGIFNLMLLIVSIPAQSAAIFESSSMSYILPIAECDLRLTLEDKGVLNAVAYAGMTISAIAWGYLADTKGRKKILYWGYLIDAVCVFGSALSQNFSMLVMFKFLGGLVVNGPAAVLFTYLTEMHGPKHRSSVLMIVGMVTSTATVSLPLLAWGIFPRDWDFEFWGLQVHSWQIFLFVLGIPSLISGLIFCSMPESPRFLMAQGRNEEALQAFKQIYHVNTRKPKDSYPIKALIQEVPNRKAAQNEVIYTIEEKSGEVPTKRQSRTLAESLRAGLQQMKPLVRKPLLGLAICCYVMQFGIFLGMNTIRLWLPQLFASMAEYEALHAGDGLDVSMCTILEFSVNQTAETALNYADACSEPKVISMDMYLNNIIVSATGFVGYFFAGGILRALGPKRMMTYGLFLSGTFGLMLYFSVSSLMTLIVSATFLTITGIAVSSLLGAVVALFPTQLRTVVVAIAMMCGRFGALSGNLLFPVFVQTGCLPPFIMVSSVLILSGILSISLPDPAKATFS

SEQ ID NO: 14125 - DNA, 6744 bp, DROSOPHILA
gccctcaaagcttgaatgccatctgcaaatacctgtgcgttccgatgtctctgtggacgcaaaaggtagtgtgcgagtggaaggcatacagagtgaactgctgcaagtcaaagcaaaggaaggcatccttaccaaaaatatcaaggccacccatataaacttgtacagtgaaaatggcaacatcaattgccagggcacattgctgggcaagattacccaaatagagtcacaaaatggggtgagaaaaaatttactatcaatctgatcttattattaacctttatatttcttttttagaacattgcgatggataagttgcaaggagacagcttgaattgttccaccaaagctggcagtattgtaaccgattgttgttatgtggaaaagtcaaagtttcagacacaaactgggcgtctggagctcaagaatgtccacaaaagcagcgaagtgcacgtccatcagtcgtcggatctcaatatgagtatgcgaaacaacgaagaataacaccatcatgctaaaaactttcaatttcagctggagtacatggcaatattcaaataactaccaaaggaggaaatttaaatgtccaactctctgagctagtggggagcaacaaaatcgacgccgagaacttattagaagaggctatcatacacatttcccaagccatagagcagaatcttcacatcgaggtaacagcccccgaagtgaaattggaaaacgaactggagcatgtagcccatgctctcaacgagagcaagaacaaattcgtgctaagcaatccaaatacaaatcgactggaagtaagcagcacaggcgacaagggcgtgcgcctgggaaaacagtcatggagcgatatgatgcgtaataagttgaaggctaccggcaccttggacgatttaccttaggtaaagacagagactaactaagttaagaatatattgtgctgcaagctacaatctcagtcatttttgctttatccatcatggaggcatgttgtttaggcttggcccgactccttagccactttatcctttaagcattcaagtgcccttgagaaaatggcttcttcctttccggctttgagtgcagacacaaacagttgcaccttttcatcgccaatctcttggagatccgagttttccgcttttatcaccatacatgccaacaggcgcagcaacttcaaggcgttctccacatactgctcctttggagcgtcatcctcctcctcttcgtcctcttcgaactcattggcgtcgggatcacttccccccgtgtagttgtcaatgtgctgtttaagtctataccacaattccaaaagatttaagaaggcctccttgtgatagaagtacttcaggcgctgcaaaaataaatatttaaatagaacgtcgaatattaagtatcttttccaaacttacactccaaatgtgcgccagatcctcgagatactcctcctggcgttcgcctaatggaatgagttgcagaggctgctgcaaaaactgcagtattcgcgctagacaactgactatactgggtgcatacacatccatggaggcctgcgcctctggcagttggaccagaatggtgcatatattgaggtaggtttgtatgatctccacatcacaggttatttttggtccgcacgagtcgtaaccgacgtcggcatcttcatcactgtcgtgggccgctggcacttctgcatcttcgttgtcctcgccagcttcctcgtcggtcaattttgtctgatcatcgcgcatgagtcgcaaaaacgcgctattgaccccctcgcagagttctggcactagaaagacctccgcaaaaggctttagattcaacgtggagtttgcgttttcctcctccaccaaggcgcaactggccagcacagcatttgtggccttcagtgcagctactagcagttcatcggctaacggacagttgcaatatcctgcccaggttctgcgcggagttctcaaaggcagcaaagcagatgtaccagttcacagcgaacttctccttgccgctaagcacatgggccatgatgtactgaaagagtcgcatcagctgtatcaacatggcggtgtccatgcagtatgtcatcttgaacagggtttccaacgtgtagcggtcacaggccaatatctctgcgcactccacctgggcgcacatattgcccagcagtccgataagaatctcgtagagccgcacatcttcacagcccgccaccagggtgtacatgatcggatcaatggctccgttctccagcagcagtgtgaccacttcgggggacaccgacatgtcccacactttgcacaggtcatcctccagctgctgatccagtgttgaatgccgcagtaattctcccaccctcatcaccgttttcaggatgaatcgactgctgtacatggtgttgccgactgcatcgccgcgcatacgctccagcagctccgcctcctcggcgtcttcctgggcgggtgggggcgtggtcgaggcgctactggcgctggcagaggcggaggcgtatgcgtcgctttccttgtgattcgagttttccgcggatggcacatcgttttgcttggcggccaccgcaagaccactcgccgatggctccgcttcttccttgggcatttcgatctggatccgggtctgggcaaactgtttaacgggttcgtttggcagaatgcagaatggcagtggtactaatcaatatattttggacaagatctttttttttagacgctgtcagtgggtccgttggttctttcataaaaaataccttaagctttggaaaagtcagttcggaaaagctcggtatctaaatcacttttacataagcaggtcacactttctcgcacttcggtgggttgatcgtttaaatatattgctcaaatgtgtgatacttctgaactgggaaagttagtcagctggttaacaatatcagtttacaacttaaaacaaccaaaactacctttaacttctttgaaagcaaccaaaagtgtggatttcattagttagtgaaggtgcaaacctaatcatcaccacacgttgtggaatccaatggaatccacaaggaaatttaaaacattggcgcctacacttattaaatatcgtattattagtatgtttgttactaaattcaaaaattccaacagcaacgttgctataatattattcttttaatattatatctaaattcgaaaattccaataaaagataacattattttataaccataactttctattaataaatgacttagatgtaatgctaacaatgaaaggtaatcacagtttatgaggtttttggttttcccttgagcagcaaactagacagattgctgtagggcagctcaaaagccagcgaaaaggcgatggaggccagataaacgatcatcgtaaacccgcagcagatgacgctctaaagaaacaactcaatattattaaaaagcaaaatcaaatgagaatgcaacttaccagcagaaagggatcaactgcagagctcgtactggtcagactgtaaacgagggcaatcaccaggggatttaatagatatatggcgtaggacaggcggttcaaatgctgaaagaacttggcctccagcaggcgtgaccaccaaacgccagtacccgatgcactgcccacgatcatccagcaaatggtgagggaaaacagagcgcgacccagaacaaatagcgatatggtgataaggtaacccagatcccgcttcaccgtagagtagatgcagcccacgaacaccttgagactgaaatgccaccaccggcatatccggcgttcactcagctcactcacttggaatcgctgctcctggtaataccatgcggctatggctcccacgatatagggcaaaactcttacaaagggactcgtgtatatctgagtgccagtcgcataggtggagtcgaaggagaactcgaacttcttggcgattccaatgccgtaggaccacgttatcgtgcccattagtccagtgagtgtaattgccttggctagcttttcatgcctggatagaaatataatgaaaataataatatatttccttgcgattttaaatccaaactcacttggcgtaaataaagagcacgatgtttgccagcaggaagaactgcatgtcgcaggcgaggctccaactccaattggcgcacatttcgcggtgatcgaagaggttctggatgaagagtagattcctccaccagtgctgtgggcacaactcgtcgaatctctcgttgatgtggaaaacggaaacgtctccgatgtaggcgaaggccaagtccacgctgcccatcaccaccaagtagagaggacccaatctcaggtagcgatggaacagcagcttgccaaagagcttcacattgccccacaggccattgcgacgcactgcgtccagctgctgctcatttctcaggaagttgtacgtttgcaaaaagccactggacaattttttgttttcaaatggatcagcaaaatacattagataatcgaatgattatatttacctgatggtaaagaagacgtccacgagaagtggagctgtggagacgtactggaagaagacctgttccgcataggatatcagtaccgttttgttgtgcacagtgaagtacatgtaccacacgacatggaagatcagaatccagatggcacacaccgatcgcagaccattcataatgggaatctcgcctggctggttctccctcatggcggagatcttccgccagttattggccacatcgaaacaggacacgaaactctgaaaaggctgccacttcaagagggtatccagtgcctgccacaactctgattccaccggagccagacccagatccggctcatcggccctcttggccacccgcacttgctgggcgcagagcattagggcaccggttaccaggatggcggccaccaccaaacggaaggtcagcctctggtagaagcgttcgctcagccggaggtccttcatgtagagcacctccggcttcatatcgaacatatcatccgcggcgaacaaatctccggccacataatacctggccagctgcttcacctcctcggagctgcaggagctgggcaggcacaatccaatgtggagcacctgttcggacatcaccttaatctccacctgccacggtgagcggtggcgcatgtatatcacgcggtagtccatcccaaagggagcactttgcgtgaggatgctgtagtgcattactcgctcgtagttccgcgacaaggtgatgcctacgggccgacggacaccttcacatccatcccgactgcccagccagtagttctggccgaacacaaagccggatggcttggttcccgacgcatctaaaactaaagatatacggaaaattatattgtatatatttatatatatactaaaagttctggtcactcacccttcatggcccatggttgcctgctgaggattccccgctgcacttgcttcaagtgggcgtagcagctgggagtcacattgctctcgttggccactttggtaagcccgaagatgacggagctcctggtgagatggggttcatgcggtgattcgatggcagctgcttcttttccccgaatatccgttgagataatttctggggacaactccaggctgccgttgagaaatccgtactcgtagcggtgccgtcgcaaagtggactcattcacggctgcattcaccactaaaatccagatgctgatgatcaagaccaatctccagtgcttttccatgccgaggaaccgctaacgaagcggcagctgtgaaaagtaagaggtgtttaattgttgacccgtcaatacgaacgcactcgagttacgaaaagcaaaccgagttggaccttaagttacgtctacttcctaccggaaaaaatttacgagacgcgtaacgaagtaatgatgtttttcaaattagttaaccctttaagatcccaatcaatttatttcctaatttcttatcctccttaaaatcagcaccttttaagaaaccaactttcactgtttgtttaaattgatcacagaggtaacatcgaatgtatctttattgaaatagctgtccaaataatgcgtgatttattccagattcaatgctttaatgggctaaagaaacgtatttcgttcagaaacatttacaatatatataggttttcttatatctagaactttctttagagagctatttaatgtgagatcttacattttttcactaattaatattctttacattaaaagggttaaaaaggaaaatcgcagaacatggaagtggtgtggtggccaagtggaggactttagagctcaattcaaatatcaattagccgcatccgaacaagtaagtgcgtctcaatgtcagctgcaatgtatcggattagttcgattcacgagaaattcgtgagatactgtatctacaatgaacagtcacccgaaggtttacggatgcccgaggcaaaaactgtcgaacttgtcacttgcgcgctgattcatggaaactcaattgccaactattgaagccaccaagttcagtgttattaccactaaatgtctgcaaaggtcaacgactatggcctggtacatattgctacgatcatttcatctggtgtctccagaatttacttgcatacattaagcttgaccaggcgtatggcatcttattgtcgtttgcccaaagtactcattccaaataaattcgttgtttgcattggctgattgaggtagaaattcgagaataagtcccccg

SEQ ID NO: 14126 - DNA, 3699 bp, DROSOPHILA
atggaaaagcactggagattggtcttgatcatcagcatctggattttagtggtgaatgcagccgtgaatgagtccactttgcgacggcaccgctacgagtacggatttctcaacggcagcctggagttgtccccagaaattatctcaacggatattcggggaaaagaagcagctgccatcgaatcaccgcatgaaccccatctcaccaggagctccgtcatcttcgggcttaccaaagtggccaacgagagcaatgtgactcccagctgctacgcccacttgaagcaagtgcagcggggaatcctcagcaggcaaccatgggccatgaaggatgcgtcgggaaccaagccatccggctttgtgttcggccagaactactggctgggcagtcgggatggatgtgaaggtgtccgtcggcccgtaggcatcaccttgtcgcggaactacgagcgagtaatgcactacagcatcctcacgcaaagtgctccctttgggatggactaccgcgtgatatacatgcgccaccgctcaccgtggcaggtggagattaaggtgatgtccgaacaggtgctccacattggattgtgcctgcccagctcctgcagctccgaggaggtgaagcagctggccaggtattatgtggccggagatttgttcgccgcggatgatatgttcgatatgaagccggaggtgctctacatgaaggacctccggctgagcgaacgcttctaccagaggctgaccttccgtttggtggtggccgccatcctggtaaccggtgccctaatgctctgcgcccagcaagtgcgggtggccaagagggccgatgagccggatctgggtctggctccggtggaatcagagttgtggcaggcactggataccctcttgaagtggcagccttttcagagtttcgtgtcctgtttcgatgtggccaataactggcggaagatctccgccatgagggagaaccagccaggcgagattcccattatgaatggtctgcgatcggtgtgtgccatctggattctgatcttccatgtcgtgtggtacatgtacttcactgtgcacaacaaaacggtactgatatcctatgcggaacaggtcttcttccagtacgtctccacagctccacttctcgtggacgtcttctttaccatcagtggctttttgcaaacgtacaacttcctgagaaatgagcagcagctggacgcagtgcgtcgcaatggcctgtggggcaatgtgaagctctttggcaagctgctgttccatcgctacctgagattgggtcctctctacttggtggtgatgggcagcgtggacttggccttcgcctacatcggagacgtttccgttttccacatcaacgagagattcgacgagttgtgcccacagcactggtggaggaatctactcttcatccagaacctcttcgatcaccgcgaaatgtgcgccaattggagttggagcctcgcctgcgacatgcagttcttcctgctggcaaacatcgtgctctttatttacgccaagcatgaaaagctagccaaggcaattacactcactggactaatgggcacgataacgtggtcctacggcattggaatcgccaagaagttcgagttctccttcgactccacctatgcgactggcactcagatatacacgagtccctttgtaagagttttgccctatatcgtgggagccatagccgcatggtattaccaggagcagcgattccaagtgagtgagctgagtgaacgccggatatgccggtggtggcatttcagtctcaaggtgttcgtgggctgcatctactctacggtgaagcgggatctgggttaccttatcaccatatcgctatttgttctgggtcgcgctctgttttccctcaccatttgctggatgatcgtgggcagtgcatcgggtactggcgtttggtggtcacgcctgctggaggccaagttctttcagcatttgaaccgcctgtcctacgccatatatctattaaatcccctggtgattgccctcgtttacagtctgaccagtacgagctctgcagttgatccctttctgctgagcgtcatctgctgcgggtttacgatgatcgtttatctggcctccatcgccttttcgctggcttttgagctgccctacagcaatctgtctataccactgccattctgcattctgccaaacgaacccgttaaacagtttgcccagacccggatccagatcgaaatgcccaaggaagaagcggagccatcggcgagtggtcttgcggtggccgccaagcaaaacgatgtgccatccgcggaaaactcgaatcacaaggaaagcgacgcatacgcctccgcctctgccagcgccagtagcgcctcgaccacgcccccacccgcccaggaagacgccgaggaggcggagctgctggagcgtatgcgcggcgatgcagtcggcaacaccatgtacagcagtcgattcatcctgaaaacggtgatgagggtgggagaattactgcggcattcaacactggatcagcagctggaggatgacctgtgcaaagtgtgggacatgtcggtgtcccccgaagtggtcacactgctgctggagaacggagccattgatccgatcatgtacaccctggtggcgggctgtgaagatgtgcggctctacgagattcttatcggactgctgggcaatatgtgcgcccaggtggagtgcgcagagatattggcctgtgaccgctacacgttggaaaccctgttcaagatgacatactgcatggacaccgccatgttgatacagctgatgcgactctttcagtacatcatggcccatgtgcttagcggcaaggagaagttcgctgtgaactggtacatctgctttgctgcctttgagaactccgcgcagaacctgggcaggatattgcaactgtccccttttgcggaggtctttctagtgccagaactctgcgagggggtcaatagcgcgtttttgcgactcatgcgcgatgatcagacaaaattgaccgacgaggaagctggcgaggacaacgaagatgcagaagtgccagcggcccacgacagtgatgaagatgccgacgtcggttacgactcgtgcggaccaaaaataacctgtgatgtggagatcatacaaacctacctcaatatatgcaccattctggtccaactgccagaggcgcaggcctccatggatgtgtatgcacccagtatagtcagttgtctagcgcgaatactgcagtttttgcagcagcctctgcaactcattccattaggcgaacgccaggaggagtatctcgaggatctggcgcacatttggagtcgcctgaagtacttctatcacaaggaggccttcttaaatcttttggaattgtggtatagacttaaacagcacattgacaactacacggggggaagtgatcccgacgccaatgagttcgaagaggacgaagaggaggaggatgacgctccaaaggagcagtatgtggagaacgccttgaagttgctgcgcctgttggcatgtatggtgataaaagcggaaaactcggatctccaagagattggcgatgaaaaggtgcaactgtttgtgtctgcactcaaagccggaaaggaagaagccattttctcaagggcacttgaatgcttaaaggataaagtggctaaggagtcgggccaagcctaa

SEQ ID NO: 14127 - protein, 1232 aa, DROSOPHILA
MEKHWRLVLIISIWILVVNAAVNESTLRRHRYEYGFLNGSLELSPEIISTDIRGKEAAAIESPHEPHLTRSSVIFGLTKVANESNVTPSCYAHLKQVQRGILSRQPWAMKDASGTKPSGFVFGQNYWLGSRDGCEGVRRPVGITLSRNYERVMHYSILTQSAPFGMDYRVIYMRHRSPWQVEIKVMSEQVLHIGLCLPSSCSSEEVKQLARYYVAGDLFAADDMFDMKPEVLYMKDLRLSERFYQRLTFRLVVAAILVTGALMLCAQQVRVAKRADEPDLGLAPVESELWQALDTLLKWQPFQSFVSCFDVANNWRKISAMRENQPGEIPIMNGLRSVCAIWILIFHVVWYMYFTVHNKTVLISYAEQVFFQYVSTAPLLVDVFFTISGFLQTYNFLRNEQQLDAVRRNGLWGNVKLFGKLLFHRYLRLGPLYLVVMGSVDLAFAYIGDVSVFHINERFDELCPQHWWRNLLFIQNLFDHREMCANWSWSLACDMQFFLLANIVLFIYAKHEKLAKAITLTGLMGTITWSYGIGIAKKFEFSFDSTYATGTQIYTSPFVRVLPYIVGAIAAWYYQEQRFQVSELSERRICRWWHFSLKVFVGCIYSTVKRDLGYLITISLFVLGRALFSLTICWMIVGSASGTGVWWSRLLEAKFFQHLNRLSYAIYLLNPLVIALVYSLTSTSSAVDPFLLSVICCGFTMIVYLASIAFSLAFELPYSNLSIPLPFCILPNEPVKQFAQTRIQIEMPKEEAEPSASGLAVAAKQNDVPSAENSNHKESDAYASASASASSASTTPPPAQEDAEEAELLERMRGDAVGNTMYSSRFILKTVMRVGELLRHSTLDQQLEDDLCKVWDMSVSPEVVTLLLENGAIDPIMYTLVAGCEDVRLYEILIGLLGNMCAQVECAEILACDRYTLETLFKMTYCMDTAMLIQLMRLFQYIMAHVLSGKEKFAVNWYICFAAFENSAQNLGRILQLSPFAEVFLVPELCEGVNSAFLRLMRDDQTKLTDEEAGEDNEDAEVPAAHDSDEDADVGYDSCGPKITCDVEIIQTYLNICTILVQLPEAQASMDVYAPSIVSCLARILQFLQQPLQLIPLGERQEEYLEDLAHIWSRLKYFYHKEAFLNLLELWYRLKQHIDNYTGGSDPDANEFEEDEEEEDDAPKEQYVENALKLLRLLACMVIKAENSDLQEIGDEKVQLFVSALKAGKEEAIFSRALECLKDKVAKESGQA

SEQ ID NO: 14128 - DNA, 11376 bp, DROSOPHILA
tagtcaaacaattgtccacgcaaactcaccttctgttgcatgtacagcgaggcattgacaacgtcggaaacactggtggccaccaccaccgaattggccgttgatgcaccaccgcccccacagccgccacttgaatattctgtggtcaatcctccggctgcgcctggcgctcctgttcccgcaccagctgtgttgttgttattgctgttgccagatcctgcggcctcgctgcccgatttcatttgggtcactggatcagcagactgtttggccgctgccgctgccaccgccatggacaaactgtccgcggcgctgggtggtcctccggccacctgttgttgctgttgctgctgggcctgctgctgctgctgttgttgttgctgctgctgctgctgctgttgttgggcggcggccgctgcggcaacaaccgctgctccaggattcggtgcggcggcatagccggccggagcgcccggaaaaggcgctacgcccgcctgcaccatgtgctgcatgttcaaaagagaaaaaagaaacggaaagagagagaacggggaaagaaaagcagagagagagagagagagaaagagagatgggtttatggattagtaatggtcgtaaaagtgtaagtgctccctaataaacactcaaagaaattctaatatatgttttacattcgatacctcttttaaataaattttcaagaaatattgtatatcgctttttaaggtcacccttatattaaagttagcgttttacttcagtcgaattgtcaaaatatgcattttcttgaaacactttttaagaacaattttataaaaatatgtgcagcccaatattaggattgcaaaagcatcgatcctttacatatcttttctaagcaatcctatttaaaatctgcaattactcgattaatacatatgcaaataatttgtatacaatatattttattgacttaaaatgaaactgagtgatttataccaagagtactaatcacaagctacaaaaatttaattaattttcttctattcatagaccatctcaacaatgtttagagtacacatttaaaacgaacataatgggtattattttttacccggttatacttttcattccacatacttgggcttcccacttcccgtacctcatcatgctaagcattttcccacttgtctgtgtgtttgtgtgtgtgtgtggttgggttgactgtgcccgtaaaagtgcaaaattaaatccaggtagtttattctgcaggtggtaaccccatcgggagctggtccagagctttccgtattaagcactcggttagacaaaggacacacacagacaggcaggcgaatggcaaacaggcaagcaggcagtctggatgagggccaggatttggttggattttagagcggaggataacaaaatgcgctttaaattgtcagttttatttgtataaatttctttttttttgccattatttggcttgtctcgcccggactgccaacccaacctctgtcagcagctatgaaatatgcaaaatttgcagcttattgttgccggttggccaaattcatatacacacgggagggggggtgtagcaaaagaaaacttttgctgaacacttttttcggttgctaaaaatggaaagaaccaggcttatcctgtgagtggcattttaatatgtttttcggctaccgaaaatgtttaccgctaccccagctgcttacataaaatggttattaattccgagatttaatgcaaatgtcaaagaaatgcaggtaaatggtacaacttgaatgctaaatgctgtaaaatatgtttgcttttcaattaagaaacacttattttcccaacatgtcatgttgttacgaaaacgtacagagactaatgtgtttctgctgcattttagtttagttcgtgtagtgtgtagtttaaaaatacccaaaagcgatgttaaatgcctagacgctaaactatttcatccgatggacacagttcatctatcttggcgagctggccataaaccagctatttcaacgcgacgcaaatatatatcaatgcctctatgggtatgattttagttttagttgctttcatttctatttctcttggcacaggccaccatcaaattgcagtcgtcatatttgtgtgtgctctgtgtttcggcatcttggcgatttgcgctttgaaaaattagcttgttaattaaatgcaagccacatatgacaagtaggcgaggtgcaagtatctctaccttgatattcaccccccaccccatccaactagtgacacaatccgctgtgcaaattggtgctcatgttgctcatccgccacgttggccaacccatgatatatgcgcactcctatgctcgcacatacatgctactacacctatatatcaacgtaaaactaaacagcgtgagcagaaaaaaaaataaatgaaaaaggagaaacttgtcatgttgaatttacataaaatttgtatgaaaattcattctgttgtgccaatgaaaatgttttccctccgatttgcgccccgcttttccggcagctgctgacgcacagaatgtgctgacttgcacttgagaaaccacaaccatcttcgtttaatgagtctgcgtatgtgcgtctgtccctcatcttgaagttttccatttagaaacttcatccttaaacaactccccaataagtttcataattttctgtcaacggcattttgaacgcagggtcacaggcacttgaagcaaatactttgctgcattcgcaaatatttttcatttaattgctcttgaacagtgaggaccgtcggccaggacgaaaaagtgttcctttttttacacaattttttttttcttttcgttggaccatatttacatggcaaatatttcgttcggcactgcggccctggcaatttgcatttgtagttactctgcagaataagaaaaaaaaaataacatcaagaggcaacaaaaattgtcggcagctggcactgttttattgactggggccaccagcgccaactgccatcgttttttgtttacatttgccactgttgtttttggtgaattttcaacaaaacactttacgtttccattttgcaacaatttcgcttgctgcactttcaagtggccgcattcaagcgttttgtctaccagcgatttttcgtctgttcgatgctgaaaaaatattagagcaattttccatactcatttaattatattgcgttttggcagcaccacgctgcgtatgcgttacgtttaatgtgtgtcacacattccacggctggtgattgatgggcgccgcaaaaagccaaaaagaaacattatatacgcacctcaaaaagaaaatataaatatgaaagaaaaatgcgttcaaatatttgtggggggaaaaattggaaaaaatcacgctgggaaatgcatttcgaaaaaagaagcaaaactggaaaagtaagtgaaatataattacactggctaacagaaaaaaatgtacatcatttcaaaataacgatatacaacatatttgttatctcaattaccttgttttgcaaactatgatttaaagagagtactatgatgaaattaatttctagttaattgcaggttgtatttgcatgtttttggttgatttgttttaaaattcttgcaaggatatcaaaacacagcccactttcatcttttgaattttgcaattagactttccaagagacagaaagattttcaaattcttactttctgtttttgttgaatattgttgtcttgattcggaccaaaatatttagacagaaactaaagaaacccgaaaggctgccacacttgtcagaagtcaaaccgaattatatataaattatgtgtgcggtttcgggcgcattacatcaacggaatattaataaaccgtgacgtgaatggtgagtgaaattttttcgtgtgcttcgactgcgtactttttcctcaaaccaatatattctctttttttttttcttggccgtgtgcgtccgtttcgattaacattaccatcacccataacgtattcctgtgccgaacaagcgaccaagtttgaacctgacatagtcagagaagtcatttgaatttgaccaattgctcaatcgctgacgcaattcagcgatcgaagcgccaattttggcctgcgttgcaatggcaaatttggggcgacgctcgttaaaaagccgggccaactcggttgcttggctcatgacgcgaataccaatttaaaacaaaaaatatttgtctaacaattgaaactgaaattttgcctagcgcgcgccaagcgattgttttgaattaaactcggttgggtctctttgatttcaactgatttttggtgattgctcaatgggcgtttaagttgcaagtgggtcgatgcaggtcacgtctgccgcccagataacatttggaaagtattatgcatatcgatgtcacggcaatgtgtctgtcacactgcctattttggtgagatctggatccggtcaggatttttggcctaatggaaggtcacatctccataattgccacggaaagcgaatgcagcacgtgccaattcaatttacatgccaattgcaatttgacatagccatccaaggatattaaactagagagccagtccttgtacaaattaggacactacacacaaacacctgatatagtagagggcggtagtggaggtagcttttctgccactgtcagttttcagtttttgccaacaggaaattacagcgaaagcgtgttgaagcataagaggaagttcaggtgtaagggacggattttgcactgtgctgtgacatgtaatatgactgcaggaattgctcgggctctgaaattgcagcatgcgggtgttagcgacaagctacaagatacaaataccatggatgccatgtgtgtgcatttgctcgcaaatcaacagaacggaaatttatttcaaaacacacaagatgccatgttcgccactctgcatccttttaataagacaaacactacatcatcgcattgcaatgcaatgaagtgggcgtttgttgggtgggaaaatgaatgaaaagcgcatcacacgtctcgtatacgtaatgagcattgtaacgcaataagcccagctttattgttcatcattaggggctgagcttaatgctcagatacacctatctgcattgtcaaggattaaataggtctataaactaaggaatttaaaaaaaaatgttagtctattaattacaagttgaaatctgtaaaattcaaaatatacctggataaaaacgcatttggatatctagcaaaaccgaccacaggcaatagttcttggttatggcccaccactttgaccaccttttctgaaattgcctgaccatttttccccattaaacttaaagttacgaaacgcacagtaggccaactttatgaatgaaattacagcctcgacagggcaaagcactgggcaataactgaccaggttagcagtggaaaactgccactgcaaaacggtaaacctaaaacgtcaaatgcaggtgcctacagcagcaatattcacaacaacggcaaaacgtttggcaacgggaaacggcaaaaacccaaaacagaaaagccagcaaaaaaaaaaaaaaaaaaggggggaaaaaaacagaatagatggccctaggcaagcttggctaagccataaagccggttggttgaaaaatcgggatatatagaagggaaaaaaaggggggaactggtcttctctgccagcgcatctgcaaaaaccaaaagcgaaacttgaatggcagaccggcatttaaatgcggtttctgttacctcgtgcagacatgctgtttttcttattattattttttttttatatatatatatataaaaatgagattttttgctgctttcctgggtgccactttagtgtgtcactgggctgcccacatagcagttgccatagttgttaatggcccaacctgatgtagctgaagatgcatcacgatgacgatgatcatgacgatgatgatgcagctgaggactggtttgccatttaaatggaatttatgctgccttacccaaagtcgaaactccaactccgggtctgtcatcaattgccttgcagctttgccaaatgaagcatgagcgagtgaatggaaaaagtagcacacacccacacatgcactgagaaaaatagtgccataaaatgctaactgcttttataattacgacaagcaatgatattacactaaataattataataaatattaaatagtttatatattcaaacgtattcttatattttattattgattcaagtggcaattgttctgagtgcattatatacaaccctcttacaatcccctttaaatggtgaaggcgatcaactaaaccttaatgccaatggaaacgtgagaatgtcgccgccttcgagagctgaagatgcactttcggcttcgcttctttttcaaacgatttttatcgcgaaattacgttgggattttccttttgtcgcatttagctggagggccaatgaaaaatctacgtgaaaaactaacaaaacgtgagcggaaaattaaataattgaaaagccactgtgctagtgagtgagtgggaaagtgtgcgaaaaaggtcgatagataaatgcattgtgattactcactggcttagcaaatgaaaacgaaattgtccattgaccactcactgtctaccatcgcacatatatatatgtatgtaggtactaaatcagcagcgaaaccagaggcagtagcacaaaaatcaatataaataaatgaagacaaatatccaaaaagcgcacaaagagtcgaaaaagaaaatacataaaacaaaaagcgcagagatcttcacgttcacccaacttgtcaataaacaaggcaaaatgtgagtgaaaaaactcgcacaaataccaaataaatttttatttaagagcaaatgtttggctatgcaaacgtcgtgccaccaacagacagcaaagacttgaattatggcagtcgaacgatgcgttgacaagaccaaaggaaataaaaaaaaaaaataaccaaaaatacacggcaacgagacggcaaataaaaaccgaagaaattaaaggccctgtcaattggcgcaacatcaaaaaaaacaaaaaaaagagcaagacatccaagataaactttacttttatttatatttttgatgtggcttccttcatggactaacaggcagcatgaaagcgtgtccaaagggctgcagcagcagccacgaatcgcatttgaatcgatgcgaaacccatgctaaatacgtgtccgccttagaatcgtagaaactcagcatgtttgaagttttctcttttttaattggatagcgattatcggagtggacaaaaatttattcttttccctctgacatcgtttacggaatgatgaagtaccaatcggtaatcgccaattgaaccgaaagcgcaatcaagccagaaatatcacattacagtggaacgtttactcccaatttcacatatattttatcgattgcactggcaaaacacaagcactaaagattgtcaaccatttgagaatatatggatttaattttcaaaagcggacttctttctgttctttttttttgctttttttttatcaaaatgaaatgcactatcgtgctcatttcagctaattaccttacatacttaatacttgtaacgaacgaatcatatttttgtgtgccccatctattgaacccttagtcattataagctcatttatttcccattaaagtattacaacataaatgtaattgatacgtacttttttttctgtgtggcttcaagtcgagtgctcacttgtctctattgaattacccccaaaaagctagacgcaattgaacagcattttagctgcgatttggcaacaaataaacgacgctcatgattgcagcgattgcaccgaaatcgagacgttgtcgcttgttgttgccactgattgattttcacgcttaaacattagatgcaatcaaagttacaatatttgtcctctgtgctcggcttacgcccagccaagaaaaacatatagcaggcaaacccctcatgcaatcaatgggaaacacctctttaatggaagtcgccttaaaggcccttctcagctttttcaaacgagccccaacaagaaacacgcaaagccccaagacgcttattaaattgccttccacaaacaaggcccaaacaaacaggccaaaacaaaacggaacataacggaacggggatcggaacagtacgtaggcaaataaacaagcagtcgaagcggaaggaactaacggctgaaaaacaaaagcctacttccggccacccaatgctgcaccgcccaaccccccgccccctcgcaaaccattaggtttatgaaatataaatgagctttgtgagcattcaaacagtaagaaatccaaaattacacgcaatttatggatgtagcaggtgcaggaagtgggcgtggccgggcgtgccattaggttggctttaaagagcacgcgacaaaacagcactgctacacatggcaaaattaattaaaacaccaaaccttacagtaacctaccaaaaatttaattcaatttttaatatttctgtgtatgtggaagatcgttcttctatttcactttttttttttaagtcgagttacgaatacatttcgaataactttcgattaagcatgggattaccatgtcttctactaactaccacttacgtttaccaacatttcttcatttcacacattttttttctcactgcaataaaagtgcttttaggggtgcgggcgttgttgggcaattaccgttaagcggattgtagtttacactctgtgttgccgtatacaccagaactaagccagaactaaatgcgcattcttaaggtacgttttcattttcattcccatttcccgacaggcgttattgttatgacccactggcattgccccccaccaccacctgtcgtctcgctctgcgcattttcacacttgtaaatcaattaattttacagcttattgttgttgctactgtcgctacagtgccatcgtggctctggccactggtcacttggccactggactacatagcattggatactaccaaccaaacccaccacctgctggttggtcatttagcctaagcgccggctaagctcgaaatgctcaactggccaaggattgtgaagcccctgcaatgcccaactcaaaatccaagtgattgtgtgtgtgcgtgtgggaacttttgtttctccccttttgttgcttttgaaagcaaattgttggctgtaaatgttgttgttgttcgctgtcggttttgttggtgctgactggattttctgatttgcctgagcggcgaccgttgaaatgtaattaatacgtggcccacaacttgtacccacacattcggggtcaattgtgtgtgtaaagggaagagcctccgcaatgcggttactaaaaggtgattattagggctcaataggtaagacagggttaaaatcccaagggggaaaaaatgttgggattttcagaaaattttaagcaagggcttaagatttttcctttttaggaataagtatttatttcctaagtagctaagtagccttttcaacagctgttttaatggaggtctagctgtttctcaaaatctttgtacaaatacacgttttttttttaatcttatccaaattttaagtaaatgtaaaaagtacttcacaaatagtttttcaaattcgtttttaaccaatatgtctgcaaattcaaattcactagaaatctcaccgaatagtactttaactttcacaaaaaccaacaataagcatgaaataaccatcaaaaatgttggcgaaaagacagtgacctacaaggtaataaatacatatattctaatatatactaatattcacgcatattatcgataaatcaccaggtgcaatgtacagtgcatggcaagttcaatataaaaccccgctggggagtcctcagtcccaatgagcactcacatgtcctcataaccatgtgcaaggatgtcgagctctcgagaaagggacgcgacaagatagtggtcgtttgcatggtttcacccatcaatgctgtggacttcgagatgaccgcctccttctggcgtcacaatatctgctacgatccaagtatcgagaagcaccaactcacctgccatcaaatggatggggcaggcgagggccatggcgacggaggcgacaaggatgcggagccggaggatctaaggtttcgccaggggttattcccatcattttgcagtattcgcactccgagcaagtactggcgatagttttcgaccggagatgggatgcggcattttcacccttcagaccaacagactggagtgtcaattatcccgcccgagcattttgccctaatggctgcaatgactgagtaattggttagcagccctaccttgtctttctgtgcgcctctatcggccaacattgttgatgatgagccttcattaaaaactaagagcgtgtctatctctctgtgagtttgtgtgttgccaacatcaagtggctcgaaggatgctcatgcatcctggcaacatcgagtgcgtttaccctccacatctggctgataaaaaggcgtaaattgctggcattttaggcgcgcgcctgcttcttccttcactctcaattaggcaaacgttaacgaaggctcttgaactttgaatactccaatcgattgacattcgcttgggttcaccaggttgcaaggcaattaactcgcagcgttaagcacgaaataagggaaaccataagaaagcaatgctgaacaggtaaagtagaatgtttaaccatttaaaaccgcatttaaacgtgtattgtacctgtttacacctaaatgctaaacttcttagcccaagcattggtccaaaattaaagttgcataaatccggccagctttgtgtatcgaggcacaaggtttatgggctgatagaggaggcttttcaaaggaaatgagagccaacgaacgagataaagacatttggaaattcttcgcaaaaggccaacagcatgaaaggcactcagccagtaaattaggttcatgtctcaactatagttttgacccaagtccaaaacaaacaattcgatgccgttgccaatgatgatgatgatgatggtaatgtggacttgcgggggcgttgccaaaaactgggcacttgttctgctcgagctgtattgttttagtgttgtttttggggtggccaacagccctgaacaatggagtaaatcatagccatgaaatatgtgccaagcgaggagacgagtagaagaccactacacctggctagcaagcaagctggctaactggctgactggcagcttggtaataataatgaaaatacaaaatagcccagctgtgggacgggcgagtattcatc

SEQ ID NO: 14129 - DNA, 1307 bp, DROSOPHILA
tgttgcatgtacagcgaggcattgacaacgtcggaaacactggtggccaccaccaccgaattggccgttgatgcaccaccgcccccacagccgccacttgaatattctgtggtcaatcctccggctgcgcctggcgctcctgttcccgcaccagctgtgttgttgttattgctgttgccagatcctgcggcctcgctgcccgatttcatttgggtcactggatcagcagactgtttggccgctgccgctgccaccgccatggacaaactgtccgcggcgctgggtggaaattacagcgaaagcgtgttgaagcataagaggaagttcaggtgtaagggacggattttgcactgtgctgtgacatgtaatatgactgcaggaattgctcgggctctgaaattgcagcatgcgggtgttagcgacaagctacaagatacaaataccatggatgccatgtgtgtgcatttgctcgcaaatcaacagaacggaaatttatttcaaaacacacaagatgccatgttcgccactctgcatccttttaataagacaaacactacatcatcgcattgcaatgcaatgaagtgggcgtttgttggtgccatcgtggctctggccactggtcacttggccactggactacatagcattggatactaccaaccaaacccaccacctgctggtctagctgtttctcaaaatctttgtacaaatacacgttttttttttaatcttatccaaattttaagtaaatgtaaaaagtacttcacaaatagtttttcaaattcgtttttaaccaatatgtctgcaaattcaaattcactagaaatctcaccgaatagtactttaactttcacaaaaaccaacaataagcatgaaataaccatcaaaaatgttggcgaaaagacagtgacctacaaggatgtcgagctctcgagaaagggacgcgacaagatagtggtcgtttgcatggtttcacccatcaatgctgtggacttcgagatgaccgcctccttctggcgtcacaatatctgctacgatccaagtatcgagaagcaccaactcacctgccatcaaatggatggggcaggcgagggccatggcgacggaggcgacaaggatgcggagccggaggatctaaggtttcgccaggggttattcccatcattttgcagtattcgcactccgagcaagtactggcgatagttttcgaccggagatgggatgcggcattttcacccttcagaccaacagactggagtgtcaattatcccgcccgagcattttgccctaatggctgcaatgactga

SEQ ID NO: 14130 - protein, 398 aa, DROSOPHILA
MYSEALTTSETLVATTTELAVDAPPPPQPPLEYSVVNPPAAPGAPVPAPAVLLLLLLPDPAASLPDFIWVTGSADCLAAAAATAMDKLSAALGGNYSESVLKHKRKFRCKGRILHCAVTCNMTAGIARALKLQHAGVSDKLQDTNTMDAMCVHLLANQQNGNLFQNTQDAMFATLHPFNKTNTTSSHCNAMKWAFVGAIVALATGHLATGLHSIGYYQPNPPPAGLAVSQNLCTNTRFFFNLIQILSKCKKYFTNSFSNSFLTNMSANSNSLEISPNSTLTFTKTNNKHEITIKNVGEKTVTYKDVELSRKGRDKIVVVCMVSPINAVDFEMTASFWRHNICYDPSIEKHQLTCHQMDGAGEGHGDGGDKDAEPEDLRFRQGLFPSFCSIRTPSKYWR

SEQ ID NO: 14131 - DNA, 2419 bp, DROSOPHILA
aagcggttctcagggacacttacagcgaacttgttcatggctatgatgtatgggttttggcacagttggctgaattaacatattaaatggccaagcacacttctttatataagcaaatttattgttgcactcgaaacgtgatctcgcccagaaatttatcacggctcaagagctggcttcgtcgtctcttctcggccagtttgttggggaactttctgtggatttctagcttttcctagccagatatcggggctccacgttgagctcgtttcggctcgagcaggttgctcaccgcagcgtatcgtatcgcctccattcgccggttgaccttcgttgggggtggcagatgcagatgctcccaactgaggcccaaaatcaatggttgcatttgggtgcgtgcgggaacgcaagcgggttaatgggataacgggccaacgactgaccaatggttattggatatggattttataatattatctataccttcaagtaaacagaacaaaccaaattttaacgataaaacataacttcagagtctatgcctttatgcacattggcaaatatgttattgtaatatatatagccctttgtttgattatacaatttaagatgttcgtctaagaatctattagtgaaactaagggtttcataggtgactaaattcttgagtcactgaagcttaacctgtcgactttgtagcttaaagtgcaatagtacttctatatagtattgtacaatctgccgcagtgaatattctagctgccccactttgaaacccatcttgtgtgtggaataataataatgacccaccgctaaatcttaacccgaatgcgctgaaaagtatgtcacaatgcaaaacacacaatacgtatttcttttcggtattttccattgcgttcaagctgcttttattcactgattctcagagtttcgccatgacagccactcgaggattttagcaaggagtcgatagttcaattcactgccgatgaagcgagaattagtaagcacgttggccgtagccgtgtccgatctcgtagccgcgagcgccatccaactcgtaggagggaatggcgtactgcttgtaggttccgggattcacggcagcggcggaagcggcggcagcggcagcggcacttcctccattaccctccgatcgcaggctgcggggatagctgttgtagccacgggatggtccgtaggcgggcacctcctcgtagacgacgcgctgaacaggaccgtagccaccaccgtagccaccaccataacctccacggttgccgtacgctgggctggcgttgatgtaggcgaaaagggccagggtaacgcagacaatctgaaggtgaaaaggggaaatccggaggatcagttggctgccactccttcacggggactaccacaacttaccaggtacttcatggtgagtgcttagttttgttggtttggggtaatcaatcaaactatgatttaccgaccagaaacgctcgcttttatacgcaaattttagcctggacatttacgtgacctatatacactaattgttctgtttcagcccagaaatggcatttcataattgcccggctggaatatactcacatttgatttatgtacttgttgtcaagccattataaaatcgcttggttacgcgatgtgctattctaccgggtgttgggtagtgatagcactacgaacacgcgactcttccaaatgggaaccacgaacgcgtttattttcgaatacagtccaaaatttgttgaattgaactttatattatccacattctcgggggtaatggtttccaggtcggttgtgtccggaacttggcttgtctaagtgaggattcttctagaactggttccagccggtttttctgataaaacctatatagaatcatccctttaaagtgaccactagtcacatacaaaacttaaaattataactaaaacattttaaagtatttcaatcattttgaaattttacaaaaacataatttcaagcaaaactatattctatctaatctcattttatctaataggttctttacttatggtaacttaaaaaagtcaaggcttatttgacgaactatagttttaaagtggccccacaaatgaatttagttttagcttttcagcttcattcgccatgagaattattctttagcactttaagcagcattttcatttaactacgaaaccacgaaatttttgctggctcaaagtatcgcttggcattgcaatgaaccgcaagtctatgccaattcagctaagatatgcagatctcaattctcggcccgaaactaaaaacccagcaagaatacagtactcaaaattttaagtcttgatgttttggcttttattattatgacctagttccttatgggcaggtaagtttttggttcactgttcaacgttttgccact

SEQ ID NO: 14132 - DNA, 348 bp, DROSOPHILA
atgaagtacctgattgtctgcgttaccctggcccttttcgcctacatcaacgccagcccagcgtacggcaaccgtggaggttatggtggtggctacggtggtggctacggtcctgttcagcgcgtcgtctacgaggaggtgcccgcctacggaccatcccgtggctacaacagctatccccgcagcctgcgatcggagggtaatggaggaagtgccgctgccgctgccgccgcttccgccgctgccgtgaatcccggaacctacaagcagtacgccattccctcctacgagttggatggcgctcgcggctacgagatcggacacggctacggccaacgtgcttactaa

SEQ ID NO: 14133 - protein, 115 aa, DROSOPHILA
MKYLIVCVTLALFAYINASPAYGNRGGYGGGYGGGYGPVQRVVYEEVPAYGPSRGYNSYPRSLRSEGNGGSAAAAAAASAAAVNPGTYKQYAIPSYELDGARGYEIGHGYGQRAY

SEQ ID NO: 14134 - DNA, 2531 bp, DROSOPHILA
taacggatacgttaaatattacctaaatagcttaactgtctaacctgaataacttattctttaagtgcgtcagcagtgcacgttttgccaagaaaagcaatttaagcaattacatatatcggtcgttgttcgctaaaaccagatcgaaactcatttgaaatcaactgaattaaaagtccagattcgtttatttgtagcaattaagttaattcgtcattaaattgacaacttatacattcaaaaaaaattcatgaaaatttatacgctcaaaacttgattacccaagattgtaaggtattgataatttatttatgtctgctttaaaatgtaaaaaaaagaaaatttgattaaaatgctttattttcgcacacacccttcaatgcaaccctattaaaaaaaaggacataggaaggtaacttgggaatcggctatgccgcaccgaaaggaaacggacacgggacaacaacaactgaaaggtcggaaaggacgagcagggcgcgcctgtgatcccggggggatggggtgcaggacggatgcacggaggaagggaggatattcggagcgcggctgctgcagcggcagagaaagagagagagagagagagatagagagagagagagagagaggtagagagagaggcagcgccagctgagggttgcaatatcctgctgctgccgttcaggctgtggcctgtagccagtatcctgttgccctcccgcttcagctgccgcaactcaaacagctgcaacaatttttttttttttggttgccgatggattgttgtttttaatttccttggcgcggcacatcccctaatgccactatctctggtccctgccgcattttggggttggagtcggcagttgccagttggtcgccggggtgcagttggtcgcagctcagtcgtggcgatcgccaggtgaacgaaggttgtgtcgcgcaggagcgagttggaaaaccaaacgattgcagcttaagtctagtagatcatcctctaagcatgtcgggcaaactgatcatgaagcgcaagcgagccagccaggaggagcagcagcaggcgcaggagcaacgtgtccagccgcaggaacagcaacaggagcagcaaccgactgaagcggttccggagaaacgccatcgtcctctaactccaccagcagaagagccagggcagaattgccccaacccgccagatgcccccaatcgaatccttctggaagcgctgcaaaaaataatggagctgcaagcggagctggatgcctttgagcaggatctaaacgatcgagatggctatgcggctgccggagctgaagcggaggatgttgaggaaagtgacgaggatgccgaggtggcggcccagtttgcgccaccgacgccagcccaaaggagtcaggcggaggcactgggttttgccatgtgtgccagagaaacattgctgtttctgcagagcgagggaatacccacggagtcgccactctaccagactctccttgggaaattggttgggcaaagcgatggacttctgcacgcctgagagcaaaccggagggcaggaactcctcctcattctagtcactttgctgcgatctcattgcaagtaaaacgagagagagaaaccaagggttgcgaactttccgggggtggaaattatgcaacacagggatctgggtattcctaagctatttactctagtcaattattgtaaagcaatataaaacacataagcaacaacgaaataaattatgtatattgaaagtaaaacataaaggaagaggttttaattaagattggggggttccatcctagctgggaataaaaaaacactctactacatcgattttcgatacattttaaatatatttatttattcatttagttattacttgtgttatttaattttacatataataattaatgagaataactcaatcgccatatattatttctttgaattcattttgtaggtatgtatatcatataagtgtatatattcttattgttgttagggcggggtgtttttgttgttcggttatttcattaacttggtatcataaattatctgggggcttggggaatcgccctaaagtagcatttgttataatttcatattagttatctgtataatttgtaacaacgataattatttgtaataaatggttgtaattcctttgtattatctgtattactgatatttcattaaaactagattttaattgtttttaacaatttaacgtttcacatggttgtatgtaagtaaatgtttcttaaggtttttggacaagatatcgttttattcatcttcttattcgaattcgagtatatgtttatttcattgcgttagcaatgccaactttattcgctcgatactcaaattaggttacataaatattaaaaatgataatatctataaattggcatttcaattggtaatttcagaccgggaagggatccgtccattgccatccactccctccgaatcccttcctacaaacatttggcacactctcttggttctacttaagctctacagagaat

SEQ ID NO: 14135 - DNA, 531 bp, DROSOPHILA
atgtcgggcaaactgatcatgaagcgcaagcgagccagccaggaggagcagcagcaggcgcaggagcaacgtgtccagccgcaggaacagcaacaggagcagcaaccgactgaagcggttccggagaaacgccatcgtcctctaactccaccagcagaagagccagggcagaattgccccaacccgccagatgcccccaatcgaatccttctggaagcgctgcaaaaaataatggagctgcaagcggagctggatgcctttgagcaggatctaaacgatcgagatggctatgcggctgccggagctgaagcggaggatgttgaggaaagtgacgaggatgccgaggtggcggcccagtttgcgccaccgacgccagcccaaaggagtcaggcggaggcactgggttttgccatgtgtgccagagaaacattgctgtttctgcagagcgagggaatacccacggagtcgccactctaccagactctccttgggaaattggttgggcaaagcgatggacttctgcacgcctga

SEQ ID NO: 14136 - protein, 176 aa, DROSOPHILA
MSGKLIMKRKRASQEEQQQAQEQRVQPQEQQQEQQPTEAVPEKRHRPLTPPAEEPGQNCPNPPDAPNRILLEALQKIMELQAELDAFEQDLNDRDGYAAAGAEAEDVEESDEDAEVAAQFAPPTPAQRSQAEALGFAMCARETLLFLQSEGIPTESPLYQTLLGKLVGQSDGLLHA

SEQ ID NO: 14137 - DNA, 11572 bp, DROSOPHILA
gcatgcgtggtttctttgtgaccgagggagatcctcctgctgcgtcagccatcgagctataggatctattgatgtacatcctaggagtagaatgacttcttattgcgctaccacgagcatccttgcgaactctatcgggtaaaatcgttggcaaggtaaaattgtcgaaaagattcgccttggtgccaatgggaggagcaagggagtgtgaagccttaagacccgggcttgaagatccagtagtcagcatcgaattggagccagagtttagaccaggagtagaagctgttaccggtgttaggggtggcacgggcttgggattcggtggctgagtctcagggaccttgtccttcaattcggccattgtacccatctgacactgccgccaggtgggcagcatcagtccacggctcacagtcggcgagggcagagatgcctggctgggaataagggacttcaccggcgtatggatcgctctcttgctcagctcctctgtccgctccaggttggccatcttcaagtcctcgatactcactttggtgcgattgaccaactttgcgaaacgttgagcctcgacgagtttgtcccttgccaaagctatgccaagacattctcacattaaatgtttctatatatctactctccggatatcaactcactataagccagatccaagatgaccccacgagcctgcggctccacctccaattgcaggtccttcagcataccatctacgaactccagatcagagcggatgtctaagtcgcgctcgcttagcttgtattctggttttttgttcattttacaaatgtaattgattgacaggcagaacgttcccaatttgctactgacaacttgtcgatgaacaaattgcaggctaaagcgcagcaactctataaattgtcataatttttatcgaactctgtgcggtaatcttttaattcattatacatgttgttcagcaaatatatttttaaacaaataccaattttggaagatatttttttttttagaattctaaacttaataataagttggtcttttttttgccatatgccgtctttgaaaaactcaatcataggatctttttctttctttgaactgcgattatttaaatttaaatgccatccaaccgttaaaatttgcatatatatcttattttattatttcattttttattttattgtgatatttacttcaagtttgttattttaagaaacagtgctttgaatacacgttttcttaaatggtcgaaatatttctaacccatttttcattttcaataatttcaatttcaatcaattttgctacagctcaatataagtttggtttatttaaacacagttttttacaataaagtcgagtatacatatagaaaactcaagataaggataagataagtatatccatggatgggatagtgtgggctggtggcggcactgcacataaaatcattggtgcagttataactgacccggtaattgcggttggagttcgatctggaggtagtccatccttggtattggttgtgatatagagagctggaaatttgttttctgggaggcttgtatgccggcggtctttcgcgaatgttcgtgggtgctccacccacggtatcatgagctgagtaagccggcggaggtcctttgggcaaattgtgtcccaagtcgaacgtgggaagcgaaaaggttttcgacaaagatgaataggatggaggagagtaggagtgtcttgacccagaaccgtaagtggacccataattggatccataactagatccataactggatctaggactggatctagaactggagctgctacttctgcttccgccacggggagttcctgttgcaatattttgagcctgaaggattatcaccatcaccaggatgctcttcagtctcctcggaaaacgagacattctaaaatgtacatataaaattcattgaaatttaaattaaataatcaaattcttggaacggatgccaattaaaatattagtgtacatgacgcatgctaataaaataataattatattcttttgaaatttgataaggtaatgtacaaatttacttaaaaaaatgtacgtaatcggtaaagaagaacagatgtttttatttacttaagtatcagaaaaagacgatattcaacttttagaacaaaataatttttgaaaatttggaagccatggaaggtttagtttacctgcaaactaaggattctggcacacaagaaatgtagttgtctgagtttagttttatacgttttattgctaatttaaaatattttgtgccgcgaatattggttttactcagagaaagtaaaccaaagaactaagcttccgaaaatatttcggacggtatttatgttttttgtggaccgctgaagagatcagagttcgtctacgagtcaaaacaatgctgattagaataatctgttgcgatttagttaagtttggattatgcaaaaacaattatcgatttatgattcattaaaaaaatttaaacgaaaaatgacgtcaaatgcgaaaagtttgagcttaaaatccaataaataaatgttatttccggtttcttttctattgtttttatttaattttccaattgttattgtatcacaaatgttatagtggtctgaaatatttaagtatattaatgctaccttcatattgtttaagaaaagctagtaaaaagagtttctgcgcacataaatatataaaacaaattttaataattttaaagggaggttaaaacaataaagtgatttaaagcttttatacagtaagtgtaatccattttcctctttttgttcacccattttaagtattaacacacataagattattgtaattgtttggtacatttattggtggcttacattcaggtctaacagaactacgagtatacatcaaaaattcgattgttttttttttattttttacaaaatacatttaaggaaaaccgtttgaccggcgatagacatatatgcatatccataagaatcttgagtcccataaaatggcaataaattacggtagccaacgagactgtgtccttgagtcaattaaggattgtatggaggcaatgggccgttagtggagacagtaggccacgattagggtcaccaccgtggagatgaagctaaagtgtccaaaagttcgctctgccatactatgcgcatccttgacgatagattccgccgagagtcgagcctgtgtcagacccggcatcttcataatatcgggctgaccaccgggaactatgggtgccaatggtacagatccctcgggaatggccacaggagtggtcggctgaatgggagccagttgaacggattcgggagcggaaacgggagggggtactgcaccctccacggctggtgccgttccattggctggagtagcagtctccggtggcggtgctggatagcacgcgatctgatccaactcaatagtcttggtaggatctttaggatccggaccgggcactttaacgggcacacagatgatgccaccaccaggtggtgcattgggatcagcaggggctccaggtgcaggagggactggcgcgtttggatccgccggattgggtgcaactgcgggtgcaggagccacaggagatccgggtgcaacaggagctccagaagcagatacaggtgccgctggatcaacgggagcaggtggcgatggacctagaggcgccagtggaactgatcctgcaactggggctggaggaacgggtagagcttgagagtcagtaacaggtggagcggcataaacaggtggcactggcacagctggagaagcggctgcttggtttcctccagcatttatcaccgtagtacccgatcccacatctgtggtggtcacagatccaggtggtccgttattgataatgatgattttgtcgtcaccaccatgggtgcctccgcctccaccaccgccggaataagaattggaactctccaccacacgcgtgtgggtgggtgtcagtgcgtgacccaggatggcaccacccaatgctccagcgataagaccagtgcctgttaaagcaagaaatacaaactagttactactctgcgtaatgcggattactccattttggactcacccaatcccaagcctgatgatgacttctgcggcgcctgtggatagtaaacagctcctgcaggcaaaactccgccagcgggcaggaaggtggctcctgcgggcagacctccgccgactggtccttgtggataataggtggctccatggggcacttgtccgactggatggtaagatgctcctgcgggatatccacccgacggatggtagctggcaccggctggaacctgacccgtggggtagtaggtcgctccgtggggcacttgacccgctgggtggtatgaagcaccagccggcaattgacctgccggatggtatgaggctccggctggaatttgcccggctgggtggtaggtggctccggctggaagttgacctgccgggtggtaggtggcacctgctggcaactgttggcgaggatagctggactgcacattatgggcattggtggccgttatcggctgatatccaccggaggaaccaaatccaccagtggagttattacgtcctctataggctgtgttgtgtgctccgccatagtagtgggaaccacttgaactggaactggcaccaggactggctgctcctgctggacgatatgggctctggagattcgtgttgctgtgcgtttgggtggcagccgaatagctaggtggagctggcttgtatgccgggttgtaggctggcggacgctcatgtatgttggtgtgagctccgcccactggattcgaggctgagtacgccggcggaggtccttggggctttgctgggacattccagccaattggtgacgcgggtgccgaaggagccgcactgtgcgtttgggagctgctcaccttgctcaccggctgcgagtgggatccacctccgtagctcagcctgacattatcatggtgtggagcaggagctgcgtggtgcgatgggactgaatgcgatggcgcagagtagctgtgtgaggaggtccttctgttagaagaggaactggtgcgacttctgctgccagtggacttccatttggcatgcgcatcctcggtggtcagggccaatattaggagcaccaccaccagcaggctgccactgaaccgcgtcgggtaagtggtcattctggaatggatccaacactcaattagtcacagtatttcttgtgattgggtttttgagtaaaacaacatgcctgccacatacatatgtaatggggtctttcacttcgcaaccaaaacaatataatatccacttaaaacatagctcaaggtcaacctaaagcataacacttacagaacatattctatttttgctatgaatttaataaaaaaatataatttttgtatgacgatactgttacgttttatatacttttgctaatatgctttaatatgcaatacttggagcttattcgcttgcttcctcctgcaccccaatgtcagtcatcattagcgcgtatggttttatctatatgtttgtgtaaaaaacaattgattcaatttacgttaataataagcacaaattatggttggcctaatgacacttggtttcccgttagctttcctaggtagctaccatttgaatagctaaataaacatgattaaagttttacgcaattctggaactttgctgttccacttaaaatattaaacaatcagcgagtgtcacgccctgattgccaaaattccaggaggtgggcaacagtctgcgcccactttatttgaccaaattagaagcgcgttatgcgtgtcttgggcggtcctctaatgataattaacttgctgatttggccggcttgtcgcgtggctacgctccattgagtttcgccttgtgttctcaaacacacccacgctgggttccagaactataaacacgggaatttaaaggccaggtcttcgacttaagaggccaacggaagcttttcttattacgccacaaggtgacagtgggaaagtaaggcgcaaatcgcaatataggacttttataatccatgactaagagacatataaatgcaacatatttactactgtactaaacaccccgattccatcgcctttttcggttgaattccgcatctagaaacaatagttttccgtgctttatttacatgcaattataagtaaacttttgtttggaactgacacatgcacctgctgtaacttgcgagtgatgctaaaaacatgatagactggtttgatgactcatcgaagcactgaactgcaacgcatgcgcagctatgacgtcagtggggaaattgtagcggctcaacacgaaatcgcttatctcatgtttgcttactttcgatttctacgaattttactagttctggagcatcttaataacaattcttgcttattcgttcttgaaatactaagcttatcgctagtgtcaaatggcaaaacactaagagattggcgtgggttcgatgacaaagttgtttcaacccaaaccttcaataattttcggaaaatgtaataaccatcattgatgggactttaaataatatgcgctgtacgtacatatattgctcacattacccattactagattaagtctagaaatcgcttgctaatcgcagatttcatgtcagatgtcaaagctttttgagattattgcgtatttcaagtacaacgttttaatgcaaatgagttgctcaataataagtgaatcacttatttactgggccttcaaaagagtttatttttggagaagacttatatcataaatggaagaaattcaaagactcattccaaaaagaaatcaacacacatgctcgaaagccggttagttacgtgtgtttttgagtgggtgcctcgtggaaaacatttttggcacgaatcggttttatttgccatttggtcagctgctctcaaaactaaatgggcttatataaaattttatttgcctaactaatgagatggggcagctgtttctacaggcatgatcttatagagattgctttgtgcccttatcatgtaattattatttttaattttatatattttttattatgtttgaaggctggatataaaattgttatatacgtatatgtataaaacatacatttgcataattgattatttccccatttcgaggtattctaacccacggtgcctttacaattccaaatcaacctgttgagtgcattttattaggaaaagaatcaactagtattaattgaagacatacatatgaatgcagattaattacatacatctgcatgttactatgcgaaataattaaaattaattagaagggaggagttaaaaacgcgtctattgatttcgattgaaaaaagctatttgatatgtatggcttcttttatatttgaacgcaatttcacaaacaaacttttttacttttgcttttgagtgaccttcaagtcgggcaatgtttgcaaaaaaagatataaacaaaagcaaccaccgcaattagtgtttaaaccaaggaaattacacttctaactataaacaaatggagctgtagtacatttttgagaatcagattttgacatatagcactcacaacaccctcagcttaaaatgtgataaacttaaatttattttaatatttactcgggctatctgttttattccgattgctgttttgccgcgtgcgatattcgctttgtgtcgtgcaaagtttctcgaacaactgagctatgccagcgaaccaaccgctcgtgttttgcgtttttctcgtgagcgacgaccgcgagagcaactcggtggtcagtacactgtgcgaaacttggtgtgcagtttaaaaaattcattcaaactttaacttcagccttaacaagccttaacagcacgtataactaaaaagacaatgacagtataatattagtaaataaacagtaaaatattgattaaaacattaatattaattaattaattagttaatttattattaactttaaaatatgaaatgctaggatgcaccgaatgctttttatatatagtcacttggccgtttttttctgtgcaattttgagatacttgacgttgttattgttcctttggcaataaattttcttaaattcagcatttctagtgtcccaagtgaatttttgatattactcatcatcatctcatgctcatctcagttggaaaataatttacgcttgtacttgtagtacaaaaaatgtgtgctgcaagattgatgttttaagcgaattttaactaaattgttcccaactatttttttcctaaaatgatccctgaaactcggctttaaaacttatgaatgacaaaacctctcgccatattcactaccctttaaccactgtgtagctcagtggatgcttttgttgtaggtgttgttttggatctaatgagcgccaagtgagcttcattgctcttgttggatcatcgcacgatcaccgttacaaaaggtttttgtttgtgggtgagttttgagctcgtgtcgctttgttttttgttttgataatacccattacttgcagtttaatggggtatttcgattttttggtttggtagtttggtaaaaaaagcatttaagatgtataaactatcaatggaaaagtcaaaatttcaaaagcattttctctttgactggatgatgctcgtgctgttacaacctcatttaatgtgaacaaccagattgtagttaccagatccctaaaatatcatattaaagttgcatttttattcccagtgtgctttcaccttttttatagcgggacaagccctttgacaaatatgaacattccgatgaagcacaaaggagtctctgacgtgcgttctattttggttctatttactgacttgcgtcaaactgtttgtgtgctcacgacagaaaagtcctttaaaatttctttgcattttacaaggtaaaaattaaacttgatagttctttaatataaatttttccagaaacagttccctgatgattttttccgtttgctaacggtctacaaccatttatatgccaaatgcacataccgaacaagtttaaatctttagttcgctttatttaacttagtttttagtagaatccgtttcgacttcatcatttcttgcagctacaaagttggccacatccacgggagtacctgcatggctgacctcatcaccaccaccaacttctgtaccatcatctgcacgaccaacaatatcgccggcaacgatgggtggctcagtggttatggtgggttggaaattgcccggattgtggggtggagctggaaagcaaacgacccgttccacttctcgcatcacctccgagttttcgggatctgtttcgtttagcatgatgggaaagcaaatgatgccaccatctggatagggctgaggagttgcctccgattccgtggattcctcactggaaacagcttcacttcctccgtcaccttcgccctgcccctctacgtcatcctcctccgttaggggattttccggggggaccactgcggaggattctcctgaaatagtggtctcattgtgcaaaactccctcctgctgaccattgttgacgatgatgatctgtcgaccatttccctggggcgacgactggccctcctccggatttctatggtacgtatggtgtcggtggccaaacagaacgttgttcatcatgtgacccgccagcattccggtgaggaaatctcctgtacctgttcggcgtaaaaaatgagtgaaaaagtaaaatgggttgaaatcgtcaaagtagattagaaactagacaatgtgagagcaattaattgcattagaaaagtaacaatctgtttccattaataaagctgcattgttaaagctatgaatttacaaaaatttacagattttaattcaagctatctagttcactacaagtaaggaagttaaggaaaacgtcgtccaagctaacgtaactactattgagccacacacataataaataaatgtagtcacttatttagcaacctaataagtcttatatcgattatatgtatatgcttaatggtcttttgccttttctgattttccaatgctatttaaatcgaagcttttaatatcaaggtactcaccgattcctcgattcattccgacgggtggttgggcatagtaaaccgctcccgctggcagggcctgggcattggcgtagtacgttccactgccttggcccggatacgatccaaagccatagccaggtggcatctgctggcgaggatagctggggatttgctgcttgggcggcatcatgggcatctttggtggtgccggcggaggcggtggtggtttcggcaccgtcatggccgtgtgaactggcgaaccgctcaccacccgccgaccaccgcccgacgacgagggcttcttgtacttgcgccaaccgccaaagagtccgccaaatgagccgccgccacgcccccttccgccacgagcgtcagtgggctgaattgtggatgcggcgaggagcagcaggctgagtgctaggtaccaggatttcatcttggatgcgatagttttcaaatgatctcaactgatcgagttttgcggacgaactggaggcaggcggcttaactgcgaaccgtttagccgaggaaggtggcaaatgcgtgaacgatgcgctacaatctgcagcaggggtatatttatttcactagcaaacttatgtattatatgtaacaatttaacaaattcttcgtttggttttagatgtttggccgtgttcagatatataagtacgccgatcattattattaagtcaatataatatagaagggtgtccagtcgaatccatgctcacgtcgcatttgtctatcagaattgtgacaacacttgcccgtggggatgagcccctatcactgaaaattgaatgagtgtcgtcgtgtaataattcaattgccgctaattgagacgagctggcaaagttctcggattttcctttggagcccaaaaagcaaaatatcatgttctcggccgatgttgatgcatgctgctgaagcaacggcaatttgccaaatgtgtcgcatcaagttccattacggcaggaattcttagtgaaatcggactgggcgatcacaaaagatacaaagatacacagatatatggcgtacttggggctcgtcacgttgacgacgatgacgacgttcgctcatgaaccttatgttgacccatttcgaaggcaatgcatttgcatttgcaccttgaagaccagaggccattggaatccatcataatgctgaaaatgtttagcataacttataatacattgaactacaaaataattttattagaagaaattaaaaagtatttaatatgttgcactaacaaagcaagctaatgcagcctgttcaaaaaatactacttcatctattaggtacttatagtcgttatggcgtttgtcgacctctcagccgtggcaagtatctaatgggtggaaacttgatcattattcaatgggatttcatttcagaatcgctgttcactgccaagggaatcattcagaaatgccaatcagacatgtggtctcgccagaagtaca

SEQ ID NO: 14138 - DNA, 3418 bp, DROSOPHILA
atcagttgagatcatttgaaaactatcgcatccaagatgaaatcctggtacctagcactcagcctgctgctcctcgccgcatccacaattcagcccactgacgctcgtggcggaagggggcgtggcggcggctcatttggcggactctttggcggttggcgcaagtacaagaagccctcgtcgtcgggcggtggtcggcgggtggtgagcggttcgccagttcacacggccatgacggtgccgaaaccaccaccgcctccgccggcaccaccaaagatgcccatgatgccgcccaagcagcaaatccccagctatcctcgccagcagatgccacctggctatggctttggatcgtatccgggccaaggcagtggaacgtactacgccaatgcccaggccctgccagcgggagcggtttactatgcccaaccacccgtcggaatgaatcgaggaatcggtacaggagatttcctcaccggaatgctggcgggtcacatgatgaacaacgttctgtttggccaccgacaccatacgtaccatagaaatccggaggagggccagtcgtcgccccagggaaatggtcgacagatcatcatcgtcaacaatggtcagcaggagggagttttgcacaatgagaccactatttcaggagaatcctccgcagtggtccccccggaaaatcccctaacggaggaggatgacgtagaggggcagggcgaaggtgacggaggaagtgaagctgtttccagtgaggaatccacggaatcggaggcaactcctcagccctatccagatggtggcatcatttgctttcccatcatgctaaacgaaacagatcccgaaaactcggaggtgatgcgagaagtggaacgggtcgtttgctttccagctccaccccacaatccgggcaatttccaacccaccataaccactgagccacccatcgttgccggcgatattgttggtcgtgcagatgatggtacagaagttggtggtggtgatgaggtcagccatgcaggtactcccgtggatgtggccaacttttgtactgaccaccgagttgctctcgcggtcgtcgctcacgagaaaaacgcaaaacacgagcgaatgaccacttacccgacgcggttcagtggcagcctgctggtggtggtgctcctaatattggccctgaccaccgaggatgcgcatgccaaatggaagtccactggcagcagaagtcgcaccagttcctcttctaacagaaggacctcctcacacagctactctgcgccatcgcattcagtcccatcgcaccacgcagctcctgctccacaccatgataatgtcaggctgagctacggaggtggatcccactcgcagccggtgagcaaggtgagcagctcccaaacgcacagtgcggctccttcggcacccgcgtcaccaattggctggaatgtcccagcaaagccccaaggacctccgccggcgtactcagcctcgaatccagtgggcggagctcacaccaacatacatgagcgtccgccagcctacaacccggcatacaagccagctccacctagctattcggctgccacccaaacgcacagcaacacgaatctccagagcccatatcgtccagcaggagcagccagtcctggtgccagttccagttcaagtggttcccactactatggcggagcacacaacacagcctatagaggacgtaataactccactggtggatttggttcctccggtggatatcagccgataacggccaccaatgcccataatgtgcagtccagctatcctcgccaacagttgccagcaggtgccacctaccacccggcaggtcaacttccagccggagccacctaccacccagccgggcaaattccagccggagcctcataccatccggcaggtcaattgccggctggtgcttcataccacccagcgggtcaagtgccccacggagcgacctactaccccacgggtcaggttccagccggtgccagctaccatccgtcgggtggatatcccgcaggagcatcttaccatccagtcggacaagtgccccatggagccacctattatccacaaggaccagtcggcggaggtctgcccgcaggagccaccttcctgcccgctggcggagttttgcctgcaggagctgtttactatccacaggcgccgcagaagtcatcatcaggcttgggattgggcactggtcttatcgctggagcattgggtggtgccatcctgggtcacgcactgacacccacccacacgcgtgtggtggagagttccaattcttattccggcggtggtggaggcggaggcacccatggtggtgacgacaaaatcatcattatcaataacggaccacctggatctgtgaccaccacagatgtgggatcgggtactacggtgataaatgctggaggaaaccaagcagccgcttctccagctgtgccagtgccacctgtttatgccgctccacctgttactgactctcaagctctacccgttcctccagccccagttgcaggatcagttccactggcgcctctaggtccatcgccacctgctcccgttgatccagcggcacctgtatctgcttctggagctcctgttgcacccggatctcctgtggctcctgcacccgcagttgcacccaatccggcggatccaaacgcgccagtccctcctgcacctggagcccctgctgatcccaatgcaccacctggtggtggcatcatctgtgtgcccgttaaagtgcccggtccggatcctaaagatcctaccaagactattgagttggatcagatcgcgtgctatccagcaccgccaccggagactgctactccagccaatggaacggcaccagccgtggagggtgcagtaccccctcccgtttccgctcccgaatccgttcaactggctcccattcagccgaccactcctgtggccattcccgagggatctgtaccattggcacccatagttcccggtggtcagcccgatattatgaagatgccgggtctgacacaggctcgactctcggcggaatctatcgtcaaggatgcgcatagtatggcagagcgaacttttggacactttagcttcatctccacggtggtgaccctaatcgtggcctactgtctccactaacggcccattgcctccatacaatccttaattgactcaaggacacagtctcgttggctaccgtaatttattgccattttatgggactcaagattcttatggatatgcatatatgtctatcgccggtcaaacggttttccttaaatgtattttgtaaaaaataaaaaaaaaacaatcgaatttttgatgtatactcgtagttctgttagacctgaatgtaagccaccaataaatgtaccaaacaattacaataatcaaaaaaaaa

SEQ ID NO: 14139 - protein, 1039 aa, DROSOPHILA
MKSWYLALSLLLLAASTIQPTDARGGRGRGGGSFGGLFGGWRKYKKPSSSGGGRRVVSGSPVHTAMTVPKPPPPPPAPPKMPMMPPKQQIPSYPRQQMPPGYGFGSYPGQGSGTYYANAQALPAGAVYYAQPPVGMNRGIGTGDFLTGMLAGHMMNNVLFGHRHHTYHRNPEEGQSSPQGNGRQIIIVNNGQQEGVLHNETTISGESSAVVPPENPLTEEDDVEGQGEGDGGSEAVSSEESTESEATPQPYPDGGIICFPIMLNETDPENSEVMREVERVVCFPAPPHNPGNFQPTITTEPPIVAGDIVGRADDGTEVGGGDEVSHAGTPVDVANFCTDHRVALAVVAHEKNAKHERMTTYPTRFSGSLLVVVLLILALTTEDAHAKWKSTGSRSRTSSSSNRRTSSHSYSAPSHSVPSHHAAPAPHHDNVRLSYGGGSHSQPVSKVSSSQTHSAAPSAPASPIGWNVPAKPQGPPPAYSASNPVGGAHTNIHERPPAYNPAYKPAPPSYSAATQTHSNTNLQSPYRPAGAASPGASSSSSGSHYYGGAHNTAYRGRNNSTGGFGSSGGYQPITATNAHNVQSSYPRQQLPAGATYHPAGQLPAGATYHPAGQIPAGASYHPAGQLPAGASYHPAGQVPHGATYYPTGQVPAGASYHPSGGYPAGASYHPVGQVPHGATYYPQGPVGGGLPAGATFLPAGGVLPAGAVYYPQAPQKSSSGLGLGTGLIAGALGGAILGHALTPTHTRVVESSNSYSGGGGGGGTHGGDDKIIIINNGPPGSVTTTDVGSGTTVINAGGNQAAASPAVPVPPVYAAPPVTDSQALPVPPAPVAGSVPLAPLGPSPPAPVDPAAPVSASGAPVAPGSPVAPAPAVAPNPADPNAPVPPAPGAPADPNAPPGGGIICVPVKVPGPDPKDPTKTIELDQIACYPAPPPETATPANGTAPAVEGAVPPPVSAPESVQLAPIQPTTPVAIPEGSVPLAPIVPGGQPDIMKMPGLTQARLSAESIVKDAHSMAERTFGHFSFISTVVTLIVAYCLH

SEQ ID NO: 14140 - DNA, 4648 bp, DROSOPHILA
atcaaattgttgccgtagttccgcacacaagagctttggtttagcagaaccggtaaaaaggatattatcctttaagattcagtattaacaaaaatagcgcctgattttagacagttttcccctgcaactgctgggtgtccaactggtgccctccgcacgcgtcccgcgacccatgctgcactttcacttttcagtgggacgcagtttttcacctatttttttttctgtatttgcaaattgcatcgagcgctttctgttgcttctgatgcttttctgcaactggactttccagtgcttgctcaacaaacaaacccttttcaagtttgccgttagtttaaaaagttaattaccgctgttaaatggccctttcgattattgctcttaatttaaaaggttgcgaaaaaactgcaattgaattcgcgaaaaaaacaattgtggaagtgtgaccgcggatcgaaagctcaaaaaagcccaattcgcaaaaatgccattgtcttcggcggttagtacagtaagcactgaataatcagaaattatttgggatatgaaagggtagtagttttaatttatgtttattttctttattgcttacattatattaattattacagaattatttatttaccgtataaaaaatgaaatttacaaaaatttaacttcaatgattgcaataaaattaaaactagtgaatgcaaaacagcagtatcattattattacaaagagaatgaagtgtaatattttcttgtatatgaatttctttattaactaaaaatttatttgaaagcaaaaacccaataagaacaatgccaataagaatttagctgataagagacccacctatcgatgagtgcagcatatcgatatcacctcgatatacttcggtctatttcagtatatttgcctaagccaccgctcctaggagagccaaaccagcgaacacaaaggatctataaaagtgggatctatattagatgtattagcattgagccaatccccgaaatgtccgccgtgagccccaactcttgtgtggagacgcccaaggcgccggaatggctatcgaagctggagagtcgtcgggagcaactgaaacgctccaagctgggtcacgaagccggagctggagccccctgtgccgagtgcaaggacaaatgtccggggctggacttgcacttctggcgcaaggtttgccgcaactgcaagtgccccaagattcagcatgtgtgtccggacgacgatgatgccactggctgggcgcagttcgagattctgggccagattagggccaaaccggcgtgtaagtaattgcgaaacatatttataacatataaaggttagaaatgaaaacataacacatactgttgcagatatcaaaatcaaagctctggccagtcagcccgttcagctggagtgggtgccgccaaatgctgctccggatgtggtcacagattatatggagaaactgggcaccgcccaaatacctgtggctggaagcgatgccgcgctcaagcggaaaatgcaactcgagttgcaagtgccgccacacgacctggatgccgcactgtgcgatggattgacggaaacggaggccatccagctgcagcaatacgttcagaaattgcgagagcaatgcgtcggacagggcgttgttgtgcgccttggagatcgtcttaatcacgcccaagtggagcacgtagctcctgccttgatgccaacccaggaggcgcaacagacctggcaatcattgggcctcatgcccgttgcggatgacactttgaacgaactgcttgccaatcccaaggtggcccaggctttggcaagtcctgcgagtgcccatcccaaactactggttgcgttttcagagcctctatgcgaatcaacagcccaattcgaggaaaacggagctttgcgagcccaaactagagaaaagctgttggggattagcaaaccggctctgcttagccttgtgactcatggtattgtctatgacaaggttctgggaatattacaggtaattaaattagcaaaatcgttagcaagaccaatacaaatctgtaacatatttgtttactgcaggaaaagaagcttaacatctcgagggatccaaagcttggtcccattgctgaatttcgcaaggagtatgtgaacaatccgcaattcagagccgagatcaacaccatctgtcctcagccgcccatgacacctataaaatcacctcctggtacaccattcaattctccattgccgttgaaaaacccagtgcagatcagaatgggagcacagatgcgccaggatacgcctatgcgaagggtcaagtttggtggggtctccaccatagtttatgactgcggactgcctgccaatacggactatgatcgtgatcctgtctttgcgcaaattcttcaggcggaaccgcttaaacatgcattccaggaagcgcgtgctggacgtgctccctcctcggtggttatctccaacatcccagctccagtggccagtcttgcggagcttaggggtctaaacccagccaccagggctcaacttcaatccgtgggacttgacaagaacatgctgcagtccgccgtttccaacgctccatattatgatcgcctgttccgctcgctccatgacaagggcatctcgcatgaccaatgccatttgctgcagccaatgaaacaagtgcacgactggctgctcgatgacgatcagttgctggatgagatcgacaaggtctttgccgacatggctaatggctgcaaggatatttcctacccaaaacccagccttggcgagctgcccacatcgcagagcagtgattctggcttccactcaaagccaccgacaccgggttacggcagcgaggatcttaccgctgggcagggcagattcgccagcattccgggcattgaggacatgaacatgtacccaagttgcgccggcatgccggaacagttccaacagctacgacttcacggggatgaggcttctggcaagagtgagtgctccctctctcactacttgaataatgcaaataatccttccttccacttattgcagattccactcgcactattttgtgcgccgactgcaaccaaccgatcgccatgggcgaagttgccgttaaggcagatcgtgcaggaaaggagatagcctggcatcctggctgcttcaagtgcatcacgtgccgggaactcttggccgacctggtctacttcttccatcaaggacaagttttttgcggtcgcgatttggccatcaggctgaaaatcccgcgctgccgtgcctgcgatgagctgatctttaccaaggagtacacagccgcggaggaagcaacgttccacatcaagcacttctgctgctatcagtgcgatgagccgctggccggtcagcagtatatagcggatgagaagtccaacatgcccctgtgcctgctgtgctatgaccgcttatttgccgtccgctgtcagcgctgcaaagtagcgattggacccgcagatcagggcgtcgcttggggcgatgtccactggcatgccagttgctttgtttgcgctggagtccagtgctccaagccgctaataggaggacgcttttgcgtcaaggagaacatgcccttttgcagtcccacctgcgtgcgcagcttgattaattaaggcagccaaggaaccacaacagtattcgctcacacatatatatatatatatatatatgtatacacaaaggatcaaagacacaatcatcggatttttgacggtgcactatatacagtatttaataaccagctagtgatcaatagatgccacagactcaaagtgcctagaatagacttgaatttgaaaagaagctgagtttaaatgtaaaacgccaatcaaattactgctattcaaattattccattagtcgcaaataattttataaaatatatttcgtgtctcaagattttaaagacaccatacatcaaacagaaaaaaagacaaacacgaattttagatatacaaccgactaatttgattggctttttaaatgaaaacgacgcctaaatatttacaattccaaccgcttttgcagtgccaatagaccaagtagagtatatacaaatattttatatataatatacacagatctatttacttattgaaaagtattatgtatacaggaaacgcacacttttaaaataaagattttactcgaaacaatatgttaattgaattcattctgggagaaattaattgaccaaacccaccaccaccaataaaataaaatgaagtcttgtttttcgattttttacgtatctgctggtagtttttattggtaattgcattttttttttttgttttattaattaatcataataattccatttttgttgatttttcttgttcttgctcgtatatgtatatgcatgtataaagttgccgatttctcggatcgagccattatgcagaagcgaaaacaagggggaaaatcacattcacataactgccaaatttgtattgagagaggttgttcgttctgcataatgcagttcagttaagtggcatttatttcaagtatactttcatagtggctcaagtattctacagattagtggcttgcagttgcttcagttcaattgtattgctaagtattgggtgcgcgtacgtacataatata

SEQ ID NO: 14141 - DNA, 2451 bp, DROSOPHILA
atgtccgccgtgagccccaactcttgtgtggagacgcccaaggcgccggaatggctatcgaagctggagagtcgtcgggagcaactgaaacgctccaagctgggtcacgaagccggagctggagccccctgtgccgagtgcaaggacaaatgtccggggctggacttgcacttctggcgcaaggtttgccgcaactgcaagtgccccaagattcagcatgtgtgtccggacgacgatgatgccactggctgggcgcagttcgagattctgggccagattagggccaaaccggcgtatatcaaaatcaaagctctggccagtcagcccgttcagctggagtgggtgccgccaaatgctgctccggatgtggtcacagattatatggagaaactgggcaccgcccaaatacctgtggctggaagcgatgccgcgctcaagcggaaaatgcaactcgagttgcaagtgccgccacacgacctggatgccgcactgtgcgatggattgacggaaacggaggccatccagctgcagcaatacgttcagaaattgcgagagcaatgcgtcggacagggcgttgttgtgcgccttggagatcgtcttaatcacgcccaagtggagcacgtagctcctgccttgatgccaacccaggaggcgcaacagacctggcaatcattgggcctcatgcccgttgcggatgacactttgaacgaactgcttgccaatcccaaggtggcccaggctttggcaagtcctgcgagtgcccatcccaaactactggttgcgttttcagagcctctatgcgaatcaacagcccaattcgaggaaaacggagctttgcgagcccaaactagagaaaagctgttggggattagcaaaccggctctgcttagccttgtgactcatggtattgtctatgacaaggttctgggaatattacaggaaaagaagcttaacatctcgagggatccaaagcttggtcccattgctgaatttcgcaaggagtatgtgaacaatccgcaattcagagccgagatcaacaccatctgtcctcagccgcccatgacacctataaaatcacctcctggtacaccattcaattctccattgccgttgaaaaacccagtgcagatcagaatgggagcacagatgcgccaggatacgcctatgcgaagggtcaagtttggtggggtctccaccatagtttatgactgcggactgcctgccaatacggactatgatcgtgatcctgtctttgcgcaaattcttcaggcggaaccgcttaaacatgcattccaggaagcgcgtgctggacgtgctccctcctcggtggttatctccaacatcccagctccagtggccagtcttgcggagcttaggggtctaaacccagccaccagggctcaacttcaatccgtgggacttgacaagaacatgctgcagtccgccgtttccaacgctccatattatgatcgcctgttccgctcgctccatgacaagggcatctcgcatgaccaatgccatttgctgcagccaatgaaacaagtgcacgactggctgctcgatgacgatcagttgctggatgagatcgacaaggtctttgccgacatggctaatggctgcaaggatatttcctacccaaaacccagccttggcgagctgcccacatcgcagagcagtgattctggcttccactcaaagccaccgacaccgggttacggcagcgaggatcttaccgctgggcagggcagattcgccagcattccgggcattgaggacatgaacatgtacccaagttgcgccggcatgccggaacagttccaacagctacgacttcacggggatgaggcttctggcaagaattccactcgcactattttgtgcgccgactgcaaccaaccgatcgccatgggcgaagttgccgttaaggcagatcgtgcaggaaaggagatagcctggcatcctggctgcttcaagtgcatcacgtgccgggaactcttggccgacctggtctacttcttccatcaaggacaagttttttgcggtcgcgatttggccatcaggctgaaaatcccgcgctgccgtgcctgcgatgagctgatctttaccaaggagtacacagccgcggaggaagcaacgttccacatcaagcacttctgctgctatcagtgcgatgagccgctggccggtcagcagtatatagcggatgagaagtccaacatgcccctgtgcctgctgtgctatgaccgcttatttgccgtccgctgtcagcgctgcaaagtagcgattggacccgcagatcagggcgtcgcttggggcgatgtccactggcatgccagttgctttgtttgcgctggagtccagtgctccaagccgctaataggaggacgcttttgcgtcaaggagaacatgcccttttgcagtcccacctgcgtgcgcagcttgattaattaa

SEQ ID NO: 14142 - protein, 816 aa, DROSOPHILA
MSAVSPNSCVETPKAPEWLSKLESRREQLKRSKLGHEAGAGAPCAECKDKCPGLDLHFWRKVCRNCKCPKIQHVCPDDDDATGWAQFEILGQIRAKPAYIKIKALASQPVQLEWVPPNAAPDVVTDYMEKLGTAQIPVAGSDAALKRKMQLELQVPPHDLDAALCDGLTETEAIQLQQYVQKLREQCVGQGVVVRLGDRLNHAQVEHVAPALMPTQEAQQTWQSLGLMPVADDTLNELLANPKVAQALASPASAHPKLLVAFSEPLCESTAQFEENGALRAQTREKLLGISKPALLSLVTHGIVYDKVLGILQEKKLNISRDPKLGPIAEFRKEYVNNPQFRAEINTICPQPPMTPIKSPPGTPFNSPLPLKNPVQIRMGAQMRQDTPMRRVKFGGVSTIVYDCGLPANTDYDRDPVFAQILQAEPLKHAFQEARAGRAPSSVVISNIPAPVASLAELRGLNPATRAQLQSVGLDKNMLQSAVSNAPYYDRLFRSLHDKGISHDQCHLLQPMKQVHDWLLDDDQLLDEIDKVFADMANGCKDISYPKPSLGELPTSQSSDSGFHSKPPTPGYGSEDLTAGQGRFASIPGIEDMNMYPSCAGMPEQFQQLRLHGDEASGKNSTRTILCADCNQPIAMGEVAVKADRAGKEIAWHPGCFKCITCRELLADLVYFFHQGQVFCGRDLAIRLKIPRCRACDELIFTKEYTAAEEATFHIKHFCCYQCDEPLAGQQYIADEKSNMPLCLLCYDRLFAVRCQRCKVAIGPADQGVAWGDVHWHASCFVCAGVQCSKPLIGGRFCVKENMPFCSPTCVRSLIN

SEQ ID NO: 14143 - DNA, 11855 bp, DROSOPHILA
aggatcgcatcaatgatttcatccatgctttggtgaacgaaatgggagtggagctgcttggcgacgtctgggattatgaacagggcacagtggtctccaaagtccaagcggtgggttaacatttcaaaggttttcaaaggcaaaaactttttcttattcaatttccatggatgtcttacaggccgttaacaactttttgggtcagtactctctgtcggatataattcaaataataattggtggcgacggagaaggagagagtgcgcccatatttgatggggtggaaccggattgcaagccggatgctaccacgaccccgcaagactgactatctaaattcttttaaactaatataagccactactttaaattaccataataaatatatgtacgtttttaaagattggggacaatgggtggtaaacacttgaaattgtaaaattttagaccgtttgacgttttagccacgtttacttatctatgtgataaggactattgaactatcaaaagcccatttgcatttaaatccgtctgttatcagctcaagtatgttcgatagcgcgctcaacaaagaccttagctacctaaaaatatggaatagtcggtatggggtctcgataagcgttatttttacaaccgcttattgatttatggccagtttgtcggattataaaaaagtagaggccaactaattcctaagacttgctgggggccaataatttagagaccatgtaatgcacagaaaaaaacgggcatagattaaatatatgtaacctgcattttgaaaaacgaatgccataagctttgaaaattttaaatgtcgaaatattggatggaaattcttcacttgccaagataatgtataccacttacgggttttccgctctgatagcaaaagaacacaacaacttcgggtttcgactaaaatgtttgataaaaatcttataaaaactctattggaacaactaacaagtgtagattatgtgatgtacttttagacttaaaggtgtgggtcccagcccggaaaaagcatgcagagattgcttggtagagtggcttcattgatcaatcgctccacttgtgcctcgacattcgagtcacccatggtgccggcctctctgccatccaatttgttttgcacaagaagcaaagctcgctgggctaccaaattcactgattcttcaccttaaaaaaaaaatgcgaaattataagaaaaactgtacatgaagtattagcttaccggattgctgtggtgattgcttctttttaagtacaccccaaatgaaaagtggatcgtacagcaaaacctcgagaattgtggtaaaaactgacttatatcggcgcagaatgtgcatggtagcttcacaggatttggcaaagactccttttgtaccacaaattcccattggtgccacaaagtcgcgtgttaaacgaaagggaacggtctctggtgtcgtctgaattttgccctgctcaaaggcaatacctgaaaaatgaacacaagcactgttacttaatatatgcttatatgttctgaaaattttgcactaaccaaaatcgatatgaatgacctccgctgtctgctggtctactaggatattttgtgtgtgccgatcacccagtccaagaacgtagccaaccattgaggtagtggctacgctgttggtgtacgccagtcgcctttcaaaccagacgcccggaatcgggaacttctccagcaggaaataatggaaaacgggtttaatattctcgcatattttcttgtaaatggcatatcgtgtctccttgggagactttaggtgatcctgaaatgtataaacaagtaagaacaacaaaattctcttatttcgaatgaaacgcacagatgacaacttgcggcacttgttgttattccagtcgtttggtcggtatcgcgcatgcgctcctcccttgccctcaacaaccaaatagtgacccacaggaaccgaattggtgcaccactccaggatgccactacgcatggacagcggggtgaccttataggtgcgcaacttcagcttacgctcgatgaattcggaatcctgattgagcaactcgttgacaattccaaaaacctgctgcatcacggcatcctgtcgaagatcatcctttcccttgaccagttgcgctcgaattttaccatcagagcatacgcacattattttaacaggcgcatttaatcccccacactgtgtagtctcgttggtccacttgacgacacctgagtggattgatatttgattattcaaggcttaattatcagtcttcggtttcgaaacctacttattatactgtactccttgctgggcataacgggcaactcaagggtcgggcaatgtacagcgttgagattccgccagcgcctcaccttgtcaaattgcttattacgcacggaatcggacaccggcctgttatcgttcgtcttcccctcgtttgcaaatgtgatgagggctgtgaaagaattagtaataagccaagcatttgaaaacaatgcaagaccgattcgtttacctggtagcagcgattccagctgcttgctgcattcccccgctgtgccattcttttcgcagatcatagcaataatcttacgtgcgattcctgatcgctctgtattgctgttctcgccatccaggtgtgcaaacaccaggggatacagctggtagaatgtatgatatggatgatctttgccacattgcaccagaaggtccgtcagccccttgagcagactcgtgtttttggagttaaggcgggcggtcaattggttggcggcacagatgaatttgtaactgggcactgtaaggatctcatccttgatacactcctggcactgtttactggtggcattggtgaaccacagcgaaatgatgcgatatatggccgcactggaaaagccactgtccagtcgacagtatgccatataattggtcaatgccaggcgcagatactctgtcagcttctcctcaatctgatttagctgctgctcatccaaactagcgtaacgtttcatctgcacggatatgacgcgccggtcctggttctcgcgctgggtcaccttctccgccgtctggcggttctgctcgatgatatccttgagcgtttgatactcctgcgagtgcctgtagtcgtgtagttgctgatactcccgatcagcatactttgcaatcgttgcataggcagccgttctttgtttactggcgtaggcatcaagctgatgccaatcgaagatgtcccgatacttttcgctcagcgtctggcggtgctgcacaaaatcatcaatcagcttaagcgaattattgaatttgtgagactgaacccaacttaaagtctcagcattgcagtctaagaggaactcgccctgcatccgaagtgcaggaactctttggacgcagtagacaaactcattattgttggtcacatagtccaaaatggccttggcaatttgttggttgcccatcttcagattgatttcggcatcttccagcagaacgctaatctaaaataatatgtagtcactaatatatgcagaatgaaaataaatgtaaatattatatggttaccttgattgactccctaatattagggagctcccgtaaagtagctgtgtacttggctgccagatttaacttgccagcgcttttgcactcctcaattcccttcattaggtacgtgctaatcggatccttttgatagaactcactcattctgcgactagcccttgtacccgctaacttcagcaaagcaatctgatgtgcaatcacgtattccttacaagaaaaatttccgtacttaagctccaattctgtttgccactttctaaaaatcttggtcgttgaagcaggatccagttgagtgccaaattggatctgaaggttgaaaaaaacgtcacggatcagaagagcacatcgcagaattcccaggacaccatcacctggcaaaaatcctctgcttgttgaagggaacacagccatgtcaggtatttgtacacactttgcaggcactccacgctgatctccatcagaatgtcgcgcacacagctatacgcctgttcgatggccgataagctgttctcctcctcccgctggccaatacttctgagggcaacgaagtggtgccgcttgaactcctgctccagatcaagcgatgttctaaccaccgtctgattttgctgatgctttgggtctgttagcgaatcccactgtccaaggcgccaaaatatttcatagtcgggctcaatgttctggtgctgctggagtttggcaaaagaccacaaaccatttcctttcattatgtctatgcagagttgaccactggccctgtccaagtggtcggactccaacagaatggtggatagattgctgccgtggccaaggaaatccaaacgtgagcgcatgggatttacaaagcctggaatggcatctaagcagccaattgattcgtatgcctggaacgaacgcatccttagtttggagtattcaagcatactaaattcttaccttttttgcgccatcttgaaagcattcgttgtccaagaaatcggctttgctcttgggactctctgagcaggcccatagctctagatacattatactcaggaaataggcttgacagtgattgctagccataaccacattgctcagattaatggggatggtcctgtaataaggaaagtacaaatatttaaatacatatataatctatatgaaaacacattaccaattattaaagattcgtatgtattcgcagatatgcagaaacttcttgatggctcttttattgcggaatatctcctgggagttcggtgccgtcgagctagtaaaaccttcgaaaaagtaatccaacatctgagacagactctccacgtgctctagactattttccaatagtaatttaataaaaggcagcaggcaggtcttggcaaaggcaaaagaagtggcggccagtttatcgaatcccaaccagccacacatttgaaacactttcgagacaaaggcgcacatccaaggctcgtagctaaggcttttcgttgctttaagtattgacagccagtcgatgcgacgaatttgtttattagaatgcagaaaagtcgatgcggttgacttgtcagcaaagattcttagatttttatagcgttctatgaattaaacaaacatattggaaaattatctccacatatatattgcaatttaaatctatttacccataatatttgatccaggcttactattaaccacctgaattgctacggacacaagaccctcgtgagttttgggatcgaattggaataaggatgtatccaaactgtgacagacaacacctaagaaagcttccatcggctccccattagactgcattaaaaaaaaacactttaaaaggtgcattcttgatgttaataacctaccttttcaaatgcttcaaaatcagtctgaaaatagtacgaaactgtggatatttttagcggtccaatttgagccaagcacttaagggaatcaatgctagttgtcttattatgcgcatcccgtgtcatctgaatgagcttgttaataaccccaaacaaaagtttttcatgttcttgcactttgtccttgtgctcggcaatctttaaaaaagatacatatttttaagtttttttagaatattaacttattactcacatatgtcctcagatcgcgtaatctttctggcgtcggacttaacagaaatgagcgcaaataattggcgacatccgccctatcaatattgggttgactggacttgcaatcctctcgcagaggtttaagaaactcgcagtccgttgtctcttccaaaaaggaattcaggttaatgtggcccttttttgattccaaaatgtacattactatcgacatggtcttctctctaacttctttcgcttcgcagcatagttgaaaattgctcaatagcttagctatgtctccgaagtgattttggtaatcatccaatcggaagttgtgtttgttaagcaaaagttccaaaaatgtcagagcagccatttggacgcggatgaactttgctgaaatcgggtagcgttaggtaatgcgtaagttactctgtatatttttcacttactatggattagaagtcgcaccacaaaaaaccaaatatcacgaacaaagaaggagcactgggtaactatggtttcattttttctggctgcatcatagacagcatctgcaacttcacagtagaggaaaaagtcatgcaaggcctgactagaaaaagaggccgaataacagttggtctttaagcgtccaaaaatatcgaccagcacacgggaatgtttggtttgaagcgtggtcatggactggatccgactgtccatcgatggcctcatttcagggtcctaaacaaacaagagttaggcgacatatttgtaatgtctttccaaatacgtacaatgtgaaagttcagacacttaaaaagcgattctccactcagactataccaactggctgttctgttgcagatcgcaagggaaccaaacaatctcatcatttcctgcggatcgtgcagcatgcttatcacatagcaaagaatatccaaatcaagatcaacatctgtggcattcagctgagagtaactgagattctccgacaatagctggaggtgttctttaaagttctgaccttcgctttcgctgcacgagctgtttttgatcagtagaaatgaagccagtatcggaagggccagctaaagaataaatcttgcaatttatatattttttaaagaaaacttctaccgtacttacctcctcgctgatggatttactgcaccgttctatatcctctgttttgccatatagaaaggtatatgccataatttcactggcgtgtgttttgcggaattcactcttcgttgaatagcacagaaaatagggaaaccttgatttgtgagatgtgagtgtaactttcttgggattggttagttaatctcacttggaaatgggccagcgcttggagctccaatgatgaagaagaatggccgcaaatggtctgataagatcacgcactgtttgccgatggcaggatgacatactctgcagggaaataaactcccctggaattggatcatggatcttgtaactgaaactgctactacggtgcttactcactttcagttagccttcgcaaggcacaatgatgcagcagctccttcagtgctatctcttggtggaatgagctgcgcaagaatattgcaattaacatttgtacgattaacgcattgctgttttgaatggcatcctcgttgttgtactaaataagaaatagccattaaagtatagctaggcatccagacttccgaatgcttaccgtcagtttcttaaactcaatgctctcgtacagctcctggcagaagtcccagtgcgtccgagaatgaccaatggcatcgctagtgacgcaattcgattccagcaggatggtgaatgtgaagagtgtggcaaagcgcacttctaacgtgggcatggtgatgaatttcgcagtggacttgcatatcacagcaaagttctctagaaggtaaatgtccggacaacgctgagcaatcaatcccacgcagcgtacaattttcgctgttaaattcgatgtgtacgacttcttaatggcaatccttaaaagggaattaagggccataagcatgtcgtccaaatgattttctttgtgccttacgaagtaaaaaatggctgcaatgaaatgaattgattgcactgtgtttattgttctattatatataagctcactgggcatatgttgaaccactttgtccatcaattccgcatcctgatgatgctgctggaaaagcgtcttcaatttgctcactaaccaagagctggatgcttcagaaatcgtttggcagctgcataacatcttaaagagatttcaaaattatttctgttttggttacgatataactcctaccttggtcacaataagcacatcctgtggatgccaacgcatcgttacctttactatgtgctcgaatgcttcatcccggtgcgaattgtacgcacaaagaccagccaaaatattaaggcacagacgcgttattgttccatgatctgcatctacagatcgctccctctgcatggctaaaatattccactcttcaattattaaagcgatacgttaattgaaaactacattacaatgcaacttgagagcagcgccaacaaattccaccaacatttcaatgggttgcctttccaaataatcgagtaagactaaattcgtcctgaatacatcaagtacatagatttccagacgtaaaatctctggtaaatcgctcttatctaaaatctcagctccgttcgccttgagctggaactgaaatgggtattagaaaacgagtttttgaaagattattcatttggcacccacctcaatgtggctgagatatagtccaattctttttataagtggacagccagtataggtatctgcatcgaaaaccttgtaatgcaaaagcctttccattgtgcagatcaactttaatagactattcaggttttttattattgccgccggtttgttctccttcgcgatctcaaagttaaggcctcgcattaggcaatcataattggattgaatcaaacaattctttgtttcgctctgaatgtgagtgattgactcaaaaggagtggcgtagtccttgtcaaagcaaataagctgttcgttgtacttgtaggccaaaagattgcgttcggtggaaggaacaatgtgttctgattgagagatctgtcgcaattgctggacatccaaaaaatttataatgctgattgcaaaagtatccgcctgcaactgggcatcaatactgtctatattgtgtatcatctgagcggcgatgaatctatccgcacttccgtatgcccaagctatgatgggttctaagtcagcggacgccttatcttgaccacatttatcagcatggatgaagatctctcgaatcgtcgctaagcattcgttgcgctttagcatttcattcgagataatattgttaagcagcgtgctggacaacttttgatttagtttattgtgtctgatcagcatctgcagcaccaattgcttctccttgatctcctcactgtttgttgttgtctctgatatgagctggtttgccatttgactccaaagctcacccagaaaatcctcccgaatagatttagagtgcaaaagctcctgttctttagtcaaaagatgagccaggcataaccgaaggttccggagatttttcgcattgccgtacatttgcattatttccgccacggtggttagcgccatttggtagttggccacatttaggatcacgctactcagctgaagtatctcagtgaatatcgcaagccagacgtcgttaaaggtgttttcctttttgtcgatcagactaaatatagtttccattttatctgcaggcttcgggatctttttcggcgcatcgccttccccattttcatcagcctttttcgtctccaagtgccaaagcacctgcaaataataatataattaaaattaaatatattaaatattactagcttatgcgacgtactatatacatagccagggcagacatcttgatgaaggggtcagaaaatttattattgctcagtagtgcgttcttgcagcgagcccaggaattctttcggatctccacattgacaatagttttcagccgcagtaaagtttgcggccacttttcatgaacaggcacaccgagtgtattaaagtcacacatatccattttgagatacattgaatggagcgactttgaaacgcactgaaagaacagatttctggtgtcgtcccggaacgcatcctcgtcatgatactcgcatagtttaggtagaatctcctgcatgtgcacgttcaattggtgattgtagttgacagcaagctgaaagattgttgcaaagtttttaacattatctaaagatataataagagtcctacctctgatgcaaatattaagtagacgcgaacaatctcagtttttctggctccaaaagcggagagcgcaaagctgctgagctccggcagatattccactagatccacgtgcagctgaacccggtccttggccaaactgacggttcttgtgatgcatttcagtattctggttcgcaagacctcgtccatatcgacattcagttcaaaaagataggagagaatccctgtaatacatcatcaaattaaaaaaaagagtctcttttgggccagaaagtaacttactactgtattcgttaattttaaggtcgcgcacatagctgaccgatgagtaaatgcccttttccagcaggctcagaatgcggtcgccaaaatacttgactaccactcgcatcttgatgccatcctcgaatgcactaaatatgcttgttttggccaggaaatgcccatttccggaggtctgcgaccccgctggaaatcacaggttagctttaataacgtgtttaagtgtttaggagttaccttccaagttgaattgtgtgatcttctcgaggacattatcgtacaagtagttttttcccgccagcgttttgaatactttctcgttgacatcctccagatttccagcttgctatcattaggttaacaattaaaatggaactgattgtttaacgataatggctaggaaccttaaagagagcctccttcgacgcttcaaagattgtggtccaggatatatccgaagttttgctaagaaacaacttatccagatcctctcggcaacttgagagcttttcatccagctgttggatgcccttgtttcggctggctgccttccccgactgaaggtccccgagtatccgctggatttcgtttagaagtgcactcatcctggctgcccggcataacctgttgtaatgttgtattaattattaaactaaacataaaatgatctctcaaaatgtacttagagtgacctctgccagagcgccaaaaaataccacgatcaataagaacagcactgttgttaaatggctgggcagccgtgtgcgtcaaataagtgccgatggagaactagaataaccttatataacgaaagatttataaataaaaaaatcccatgttccatattccactgttccttcattaattattcctatattatgaattatattcattaagaaaggaataggaaatgtggtttttaaagtaacaagctacgttcagcgcttctactacatattagccaatttctacgactttacagtttcggtgtgaacgttctgcgtcaacatttctggacttctgtgtgaagcgcttattagggtggccaagaattttgcggttacacccctgggaatttagtactaaaattgttgatggctttggtaacacttttgcttgtatataaaaggcattcgcaaattttgtacgggtgtaattcagaaaaaaacgccagccagtttgatcgaaggtgcggcagattaaaagtgaagtagcaattaaacggttatattttagtactttctaagaaacaacacacaaggtaagcgtttatttacattttagtatttatttcgttgttaaaaaaagtgcgaccacctcgattaagtttgccggaaaataatttgaaatcaaaccacgtgttttttgtagcccctttactatttaatcaatactctcaaagaaggcaaggtttctcgaactttcgaccccagtgagtaacgcttcgatgcacacttacatacataattgcaaaggtgcatcatagagcgcctattaattaggcaaattaagattctagaaactttggaagttctgactaattgcatattgatgcctaatgcttgattgtgattatctggaatattccactggaaaacgtgccgc

SEQ ID NO: 14144 - DNA, 7290 bp, DROSOPHILA
atgagtgcacttctaaacgaaatccagcggatactcggggaccttcagtcggggaaggcagccagccgaaacaagggcatccaacagctggatgaaaagctctcaagttgccgagaggatctggataagttgtttcttagcaaaacttcggatatatcctggaccacaatctttgaagcgtcgaaggaggctctctttaagcaagctggaaatctggaggatgtcaacgagaaagtattcaaaacgctggcgggaaaaaactacttgtacgataatgtcctcgagaagatcacacaattcaacttggaagcggggtcgcagacctccggaaatgggcatttcctggccaaaacaagcatatttagtgcattcgaggatggcatcaagatgcgagtggtagtcaagtattttggcgaccgcattctgagcctgctggaaaagggcatttactcatcggtcagctatgtgcgcgaccttaaaattaacgaatacagtaggattctctcctatctttttgaactgaatgtcgatatggacgaggtcttgcgaaccagaatactgaaatgcatcacaagaaccgtcagtttggccaaggaccgggttcagctgcacgtggatctagtggaatatctgccggagctcagcagctttgcgctctccgcttttggagccagaaaaactgagattgttcgcgtctacttaatatttgcatcagagcttgctgtcaactacaatcaccaattgaacgtgcacatgcaggagattctacctaaactatgcgagtatcatgacgaggatgcgttccgggacgacaccagaaatctgttctttcagtgcgtttcaaagtcgctccattcaatgtatctcaaaatggatatgtgtgactttaatacactcggtgtgcctgttcatgaaaagtggccgcaaactttactgcggctgaaaactattgtcaatgtggagatccgaaagaattcctgggctcgctgcaagaacgcactactgagcaataataaattttctgaccccttcatcaagatgtctgccctggctatgtatatagtgctttggcacttggagacgaaaaaggctgatgaaaatggggaaggcgatgcgccgaaaaagatcccgaagcctgcagataaaatggaaactatatttagtctgatcgacaaaaaggaaaacacctttaacgacgtctggcttgcgatattcactgagatacttcagctgagtagcgtgatcctaaatgtggccaactaccaaatggcgctaaccaccgtggcggaaataatgcaaatgtacggcaatgcgaaaaatctccggaaccttcggttatgcctggctcatcttttgactaaagaacaggagcttttgcactctaaatctattcgggaggattttctgggtgagctttggagtcaaatggcaaaccagctcatatcagagacaacaacaaacagtgaggagatcaaggagaagcaattggtgctgcagatgctgatcagacacaataaactaaatcaaaagttgtccagcacgctgcttaacaatattatctcgaatgaaatgctaaagcgcaacgaatgcttagcgacgattcgagagatcttcatccatgctgataaatgtggtcaagataaggcgtccgctgacttagaacccatcatagcttgggcatacggaagtgcggatagattcatcgccgctcagatgatacacaatatagacagtattgatgcccagttgcaggcggatacttttgcaatcagcattataaattttttggatgtccagcaattgcgacagatctctcaatcagaacacattgttccttccaccgaacgcaatcttttggcctacaagtacaacgaacagcttatttgctttgacaaggactacgccactccttttgagattgccattaagaagtcgtacacatcgaatttaacagcgaaaattgtacgctgcgtgggattgattgctcagcgttgtccggacatttaccttctagagaactttgctgtgatatgcaagtccactgcgaaattcatcaccatgcccacgttagaagtgcgctttgccacactcttcacattcaccatcctgctggaatcgaattgcgtcactagcgatgccattggtcattctcggacgcactgggacttctgccaggagctgtacgagagcattgagtttaagaaactgacgtacaacaacgaggatgccattcaaaacagcaatgcgttaatcgtacaaatgttaattgcaatattcttgcgcagctcattccaccaagagatagcactgaaggagctgctgcatcattgtgccttgcgaaggctaactgaaaaggatatagaacggtgcagtaaatccatcagcgaggagctggcccttccgatactggcttcatttctactgatcaaaaacagctcgtgcagcgaaagcgaaggtcagaactttaaagaacacctccagctattgtcggagaatctcagttactctcagctgaatgccacagatgttgatcttgatttggatattctttgctatgtgataagcatgctgcacgatccgcaggaaatgatgagattgtttggttcccttgcgatctgcaacagaacagccagttggtatagtctgagtggagaatcgctttttaagtgtctgaactttcacattgaccctgaaatgaggccatcgatggacagtcggatccagtccatgaccacgcttcaaaccaaacattcccgtgtgctggtcgatatttttggacgcttaaagaccaactgttattcggcctctttttctagtcaggccttgcatgactttttcctctactgtgaagttgcagatgctgtctatgatgcagccagaaaaaatgaaaccatagttacccagtgctccttctttgttcgtgatatttggttttttgtggtgcgacttctaatccatacaaagttcatccgcgtccaaatggctgctctgacatttttggaacttttgcttaacaaacacaacttccgattggatgattaccaaaatcacttcggagacatagctaagctattgagcaattttcaactatgctgcgaagcgaaagaagttagagagaagaccatgtcgatagtaatgtacattttggaatcaaaaaagggccacattaacctgaattcctttttggaagagacaacggactgcgagtttcttaaacctctgcgagaggattgcaagtccagtcaacccaatattgatagggcggatgtcgccaattatttgcgctcatttctgttaagtccgacgccagaaagattacgcgatctgaggacatatattgccgagcacaaggacaaagtgcaagaacatgaaaaacttttgtttggggttattaacaagctcattcagatgacacgggatgcgcataataagacaactagcattgattcccttaagtgcttggctcaaattggaccgctaaaaatatccacagtttcgtactattttcagactgattttgaagcatttgaaaagtctaatggggagccgatggaagctttcttaggtgttgtctgtcacagtttggatacatccttattccaattcgatcccaaaactcacgagggtcttgtgtccgtagcaattcaggtggttaatagtaagcctggatcaaatattatggaacgctataaaaatctaagaatctttgctgacaagtcaaccgcatcgacttttctgcattctaataaacaaattcgtcgcatcgactggctgtcaatacttaaagcaacgaaaagccttagctacgagccttggatgtgcgcctttgtctcgaaagtgtttcaaatgtgtggctggttgggattcgataaactggccgccacttcttttgcctttgccaagacctgcctgctgccttttattaaattactattggaaaatagtctagagcacgtggagagtctgtctcagatgttggattactttttcgaaggttttactagctcgacggcaccgaactcccaggagatattccgcaataaaagagccatcaagaagtttctgcatatctgcgaatacatacgaatctttaataattggaccatccccattaatctgagcaatgtggttatggctagcaatcactgtcaagcctatttcctgagtataatgtatctagagctatgggcctgctcagagagtcccaagagcaaagccgatttcttggacaacgaatgctttcaagatggcgcaaaaaaggcatacgaatcaattggctgcttagatgccattccaggctttgtaaatcccatgcgctcacgtttggatttccttggccacggcagcaatctatccaccattctgttggagtccgaccacttggacagggccagtggtcaactctgcatagacataatgaaaggaaatggtttgtggtcttttgccaaactccagcagcaccagaacattgagcccgactatgaaatattttggcgccttggacagtgggattcgctaacagacccaaagcatcagcaaaatcagacggtggttagaacatcgcttgatctggagcaggagttcaagcggcaccacttcgttgccctcagaagtattggccagcgggaggaggagaacagcttatcggccatcgaacaggcgtatagctgtgtgcgcgacattctgatggagatcagcgtggagtgcctgcaaagtgtgtacaaatacctgacatggctgtgttcccttcaacaagcagaggatttttgccagatccaatttggcactcaactggatcctgcttcaacgaccaagatttttagaaagtggcaaacagaattggagcttaagtacggaaatttttcttgtaaggaatacgtgattgcacatcagattgctttgctgaagttagcgggtacaagggctagtcgcagaatgagtgagttctatcaaaaggatccgattagcacgtacctaatgaagggaattgaggagtgcaaaagcgctggcaagttaaatctggcagccaagtacacagctactttacgggagctccctaatattagggagtcaatcaagattagcgttctgctggaagatgccgaaatcaatctgaagatgggcaaccaacaaattgccaaggccattttggactatgtgaccaacaataatgagtttgtctactgcgtccaaagagttcctgcacttcggatgcagggcgagttcctcttagactgcaatgctgagactttaagttgggttcagtctcacaaattcaataattcgcttaagctgattgatgattttgtgcagcaccgccagacgctgagcgaaaagtatcgggacatcttcgattggcatcagcttgatgcctacgccagtaaacaaagaacggctgcctatgcaacgattgcaaagtatgctgatcgggagtatcagcaactacacgactacaggcactcgcaggagtatcaaacgctcaaggatatcatcgagcagaaccgccagacggcggagaaggtgacccagcgcgagaaccaggaccggcgcgtcatatccgtgcagatgaaacgttacgctagtttggatgagcagcagctaaatcagattgaggagaagctgacagagtatctgcgcctggcattgaccaattatatggcatactgtcgactggacagtggcttttccagtgcggccatatatcgcatcatttcgctgtggttcaccaatgccaccagtaaacagtgccaggagtgtatcaaggatgagatccttacagtgcccagttacaaattcatctgtgccgccaaccaattgaccgcccgccttaactccaaaaacacgagtctgctcaaggggctgacggaccttctggtgcaatgtggcaaagatcatccatatcatacattctaccagctgtatcccctggtgtttgcacacctggatggcgagaacagcaatacagagcgatcaggaatcgcacgtaagattattgctatgatctgcgaaaagaatggcacagcgggggaatgcagcaagcagctggaatcgctgctaccagccctcatcacatttgcaaacgaggggaagacgaacgataacaggccggtgtccgattccgtgcgtaataagcaatttgacaaggtgaggcgctggcggaatctcaacgctgtacattgcccgacccttgagttgcccgttatgcccagcaaggagtacagtataataagtgtcgtcaagtggaccaacgagactacacagtgtgggggattaaatgcgcctgttaaaataatgtgcgtatgctctgatggtaaaattcgagcgcaactggtcaagggaaaggatgatcttcgacaggatgccgtgatgcagcaggtttttggaattgtcaacgagttgctcaatcaggattccgaattcatcgagcgtaagctgaagttgcgcacctataaggtcaccccgctgtccatgcgtagtggcatcctggagtggtgcaccaattcggttcctgtgggtcactatttggttgttgagggcaagggaggagcgcatgcgcgataccgaccaaacgactggaataacaacaagtgccgcaagttgtcatctgatcacctaaagtctcccaaggagacacgatatgccatttacaagaaaatatgcgagaatattaaacccgttttccattatttcctgctggagaagttcccgattccgggcgtctggtttgaaaggcgactggcgtacaccaacagcgtagccactacctcaatggttggctacgttcttggactgggtgatcggcacacacaaaatatcctagtagaccagcagacagcggaggtcattcatatcgattttggtattgcctttgagcagggcaaaattcagacgacaccagagaccgttccctttcgtttaacacgcgactttgtggcaccaatgggaatttgtggtacaaaaggagtctttgccaaatcctgtgaagctaccatgcacattctgcgccgatataagtcagtttttaccacaattctcgaggttttgctgtacgatccacttttcatttggggtgtacttaaaaagaagcaatcaccacagcaatccggtgaagaatcagtgaatttggtagcccagcgagctttgcttcttgtgcaaaacaaattggatggcagagaggccggcaccatgggtgactcgaatgtcgaggcacaagtggagcgattgatcaatgaagccactctaccaagcaatctctgcatgctttttccgggctgggacccacacctttaa

SEQ ID NO: 14145 - protein, 2429 aa, DROSOPHILA
MSALLNEIQRILGDLQSGKAASRNKGIQQLDEKLSSCREDLDKLFLSKTSDISWTTIFEASKEALFKQAGNLEDVNEKVFKTLAGKNYLYDNVLEKITQFNLEAGSQTSGNGHFLAKTSIFSAFEDGIKMRVVVKYFGDRILSLLEKGIYSSVSYVRDLKINEYSRILSYLFELNVDMDEVLRTRILKCITRTVSLAKDRVQLHVDLVEYLPELSSFALSAFGARKTEIVRVYLIFASELAVNYNHQLNVHMQEILPKLCEYHDEDAFRDDTRNLFFQCVSKSLHSMYLKMDMCDFNTLGVPVHEKWPQTLLRLKTIVNVEIRKNSWARCKNALLSNNKFSDPFIKMSALAMYIVLWHLETKKADENGEGDAPKKIPKPADKMETIFSLIDKKENTFNDVWLAIFTEILQLSSVILNVANYQMALTTVAEIMQMYGNAKNLRNLRLCLAHLLTKEQELLHSKSIREDFLGELWSQMANQLISETTTNSEEIKEKQLVLQMLIRHNKLNQKLSSTLLNNIISNEMLKRNECLATIREIFIHADKCGQDKASADLEPIIAWAYGSADRFIAAQMIHNIDSIDAQLQADTFAISIINFLDVQQLRQISQSEHIVPSTERNLLAYKYNEQLICFDKDYATPFEIAIKKSYTSNLTAKIVRCVGLIAQRCPDIYLLENFAVICKSTAKFITMPTLEVRFATLFTFTILLESNCVTSDAIGHSRTHWDFCQELYESIEFKKLTYNNEDAIQNSNALIVQMLIAIFLRSSFHQEIALKELLHHCALRRLTEKDIERCSKSISEELALPILASFLLIKNSSCSESEGQNFKEHLQLLSENLSYSQLNATDVDLDLDILCYVISMLHDPQEMMRLFGSLAICNRTASWYSLSGESLFKCLNFHIDPEMRPSMDSRIQSMTTLQTKHSRVLVDIFGRLKTNCYSASFSSQALHDFFLYCEVADAVYDAARKNETIVTQCSFFVRDIWFFVVRLLIHTKFIRVQMAALTFLELLLNKHNFRLDDYQNHFGDIAKLLSNFQLCCEAKEVREKTMSIVMYILESKKGHINLNSFLEETTDCEFLKPLREDCKSSQPNIDRADVANYLRSFLLSPTPERLRDLRTYIAEHKDKVQEHEKLLFGVINKLIQMTRDAHNKTTSIDSLKCLAQIGPLKISTVSYYFQTDFEAFEKSNGEPMEAFLGVVCHSLDTSLFQFDPKTHEGLVSVAIQVVNSKPGSNIMERYKNLRIFADKSTASTFLHSNKQIRRIDWLSILKATKSLSYEPWMCAFVSKVFQMCGWLGFDKLAATSFAFAKTCLLPFIKLLLENSLEHVESLSQMLDYFFEGFTSSTAPNSQEIFRNKRAIKKFLHICEYIRIFNNWTIPINLSNVVMASNHCQAYFLSIMYLELWACSESPKSKADFLDNECFQDGAKKAYESIGCLDAIPGFVNPMRSRLDFLGHGSNLSTILLESDHLDRASGQLCIDIMKGNGLWSFAKLQQHQNIEPDYEIFWRLGQWDSLTDPKHQQNQTVVRTSLDLEQEFKRHHFVALRSIGQREEENSLSAIEQAYSCVRDILMEISVECLQSVYKYLTWLCSLQQAEDFCQIQFGTQLDPASTTKIFRKWQTELELKYGNFSCKEYVIAHQIALLKLAGTRASRRMSEFYQKDPISTYLMKGIEECKSAGKLNLAAKYTATLRELPNIRESIKISVLLEDAEINLKMGNQQIAKAILDYVTNNNEFVYCVQRVPALRMQGEFLLDCNAETLSWVQSHKFNNSLKLIDDFVQHRQTLSEKYRDIFDWHQLDAYASKQRTAAYATIAKYADREYQQLHDYRHSQEYQTLKDIIEQNRQTAEKVTQRENQDRRVISVQMKRYASLDEQQLNQIEEKLTEYLRLALTNYMAYCRLDSGFSSAAIYRIISLWFTNATSKQCQECIKDEILTVPSYKFICAANQLTARLNSKNTSLLKGLTDLLVQCGKDHPYHTFYQLYPLVFAHLDGENSNTERSGIARKIIAMICEKNGTAGECSKQLESLLPALITFANEGKTNDNRPVSDSVRNKQFDKVRRWRNLNAVHCPTLELPVMPSKEYSIISVVKWTNETTQCGGLNAPVKIMCVCSDGKIRAQLVKGKDDLRQDAVMQQVFGIVNELLNQDSEFIERKLKLRTYKVTPLSMRSGILEWCTNSVPVGHYLVVEGKGGAHARYRPNDWNNNKCRKLSSDHLKSPKETRYAIYKKICENIKPVFHYFLLEKFPIPGVWFERRLAYTNSVATTSMVGYVLGLGDRHTQNILVDQQTAEVIHIDFGIAFEQGKIQTTPETVPFRLTRDFVAPMGICGTKGVFAKSCEATMHILRRYKSVFTTILEVLLYDPLFIWGVLKKKQSPQQSGEESVNLVAQRALLLVQNKLDGREAGTMGDSNVEAQVERLINEATLPSNLCMLFPGWDPHL

SEQ ID NO: 14146 - DNA, 2611 bp, DROSOPHILA
gtacgaaagtctttggacgtcgggcaaactctagttttaaagctgaacaatgtttttgaaaagtttgtggatcgtaaactcagttctatgaatttatttaaaaatggacaaaaatgtgcatagcaacaaagtggattattacgtcaatattctaagttatgtttcaaatagattggcatttaagttatgcctttttattagaatttcattcttatatttattttaatgtaatattacaatgttgctaaataccaaattttaagctgttttactgaaaaacgtcgtacggttagttagtaataatattaaactttatttatatttcggcttaacacaaaacataaattcacttttacgaaaaattaaaattattcaaacagacaaaacctctacacacatggttttaatttcaacgacaagttttcccaagaattgtgccgcactcgatgccagaattcttgccgtgattcaccgctcgactcgaatgtcaagcgatggccagcaacattgaagctcttggccaagagtttggccccaaacaagtcagcagatgcgattgcttaccagccagaatacagaaaatatgaaaatgagcgcggcaatcggcaaacacggcgaactgtggcgctttctggcctcaagattattgactgactgacacaataaataattgactgtttatggcttgctgagtgatttgcgagcgaaccggagcaagcaaatccggagcacgtttccgccgagccactcaaagacattcccggtggcgactgcaatcaaatgaacaatgctccacccgctctgaacagctgctgcagctgcatttgagctcgaaagacccgaaaatttgttttctcatagatatacaaaaaaatacctaaaagccccgaaaaatatatattccaaatatgattatgattttttcttgttgtttattatgtacacgatcaggctgagatcaagtatccgccaggttggctggggataatcaagtatgcgcttagtagccgctgctgcggggtgcagagtactggctaacgtactggttgccatactggttctctgggacgaaaagcttggccactggagcagcagggcggatgggcaggatcaccttgctgtactccgggggcgagacgtaagccttgtagttgttctggccggggtacaggagggtggcaccggcgggctggacagtccaacggggtccgtagccggcacgacggtagttgccaccgttgtagccacgtcgctcaccgccatatccaccgctgacctggatgggacgcaggatctcgggggcatagctgccgcggtaaccgccggcgatgatctccacggggcgctcataacgctgctgaccctcggctccagcagcagctgctgagctggcggcggaggcggcggagctatcctgaccgtaagatcgctgtccgtagctctgctggccaccgtagttggcgtagcagctgcccacgatgcaggcgcagaagatgactgccagagtctggaaaatcaggaaaactttcagttagcataagtccggaaaatgaaagagcggcagggaatacggaagcggttctcagggacacttacagcgaacttgttcatggctatgatgtatgggttttggcacagttggctgaattaacatattaaatggccaagcacacttctttatataagcaaatttattgttgcactcgaaacgtgatctcgcccagaaatttatcacggctcaagagctggcttcgtcgtctcttctcggccagtttgttggggaactttctgtggatttctagcttttcctagccagatatcggggctccacgttgagctcgtttcggctcgagcaggttgctcaccgcagcgtatcgtatcgcctccattcgccggttgaccttcgttgggggtggcagatgcagatgctcccaactgaggcccaaaatcaatggttgcatttgggtgcgtgcgggaacgcaagcgggttaatgggataacgggccaacgactgaccaatggttattggatatggattttataatattatctataccttcaagtaaacagaacaaaccaaattttaacgataaaacataacttcagagtctatgcctttatgcacattggcaaatatgttattgtaatatatatagccctttgtttgattatacaatttaagatgttcgtctaagaatctattagtgaaactaagggtttcataggtgactaaattcttgagtcactgaagcttaacctgtcgactttgtagcttaaagtgcaatagtacttctatatagtattgtacaatctgccgcagtgaatattctagctgccccactttgaaacccatcttgtgtgtggaataataataatgacccaccgctaaatcttaacccgaatgcgctgaaaagtatgtcacaatgcaaaacacacaatacgtatttcttttcggtattttccattgcgttcaagctgcttttattcactgattctcagagtttcgccatgacagccactcgaggattttagcaaggagtcgatagttcaattcactgccgatgaagcgagaattagtaagcacgttggccgtagccgtgtccgatctcgt

SEQ ID NO: 14147 - DNA, 522 bp, DROSOPHILA
atgaacaagttcgctactctggcagtcatcttctgcgcctgcatcgtgggcagctgctacgccaactacggtggccagcagagctacggacagcgatcttacggtcaggatagctccgccgcctccgccgccagctcagcagctgctgctggagccgagggtcagcagcgttatgagcgccccgtggagatcatcgccggcggttaccgcggcagctatgcccccgagatcctgcgtcccatccaggtcagcggtggatatggcggtgagcgacgtggctacaacggtggcaactaccgtcgtgccggctacggaccccgttggactgtccagcccgccggtgccaccctcctgtaccccggccagaacaactacaaggcttacgtctcgcccccggagtacagcaaggtgatcctgcccatccgccctgctgctccagtggccaagcttttcgtcccagagaaccagtatggcaaccagtacgttagccagtactctgcaccccgcagcagcggctactaa

SEQ ID NO: 14148 - protein, 173 aa, DROSOPHILA
MNKFATLAVIFCACIVGSCYANYGGQQSYGQRSYGQDSSAASAASSAAAAGAEGQQRYERPVEIIAGGYRGSYAPEILRPIQVSGGYGGERRGYNGGNYRRAGYGPRWTVQPAGATLLYPGQNNYKAYVSPPEYSKVILPIRPAAPVAKLFVPENQYGNQYVSQYSAPRSSGY

SEQ ID NO: 14149 - DNA, 3054 bp, DROSOPHILA
acaatttactataaggtcatatcaaaactaacccttcgtagataatcgataacccattttttcagcacataaacatgagcatccaccagtcggctgtatacatccaaccttccgcggttcttgagcagatgtcgctggatgttgagtgtttcctcgcagtcactggcggcggatacgaaagccaatctctgagtggccgcatggatgccaatcaaatccctttccggtttgtgcttgcttttgggaccgggcataacaacgtccgactcaaatccgctgggaaataggagcattgcaagggcggcatcatgttcccgaaacttgttgatcagcggatataggctgacattgctgaccaggtcgcagctgaccaccagaaagtccgacttgatcttatcgtatatgtagcgcagactgtcggcagttccgaaatccccgtcactaggaatcgtggcatagtccagtctcagctttaagggagtgttttccagagcagattggatctctagtttttcttgctccagtaccacaacaatgacctctgaaatatttttcaattaaatccaggtttttaattcagactatccgaattacctgtaaagttgtgttgttgcagcagatttaagggataccaaatcagaggatatggacccaccggcagcaggcatttgggggcatcccccaagacctcgggtagacgagtgccacgcccagcggcaaaaactacggcctggaactcggtcattgtttcacaaaaatataaataatttcggctaaaaagcgtgcaagcacaaaaagagccacgcaaacagctgatccaatgcaagcgaaacacctacgagcgctgtccaacactgcttccaatcagacatatgtttgctgtcatgtgactgtgcaattgtttttgttgcttttgctattgtataaaacaagtcagatgaccctttttgcaatgaaaattccctttttccacttaattattacacagaatgcacatcgtatgatacaacaagactttaatgcatgatttgcgcagcttacactacactacaaaaatggaatacatacttttctgcttattggaatagtctacacacttttgctacataggtacaattaagtttgtggcttgccctttgcgaattacaatatggaaacggatacagaacagaaaatagtttaacaataatattgctggaataaacacatccaaggtaatacttagaacagcacgtcgtcatcgccctcatccaggatattggcctgctggcgcacatcgatgccctgctgcagcaactccgccttcttggcgtcggccttgatgcgtgcctcgcgcttcttgtcctggatcttcttcagtcggtagaactcctcacgctcgagctcgtccagctccgagatgatgtaggccaaagtcctatcgattcgggggatgatcacatgctcaatggcgttcacacgacggttggtgatcttgatcacctcgtccagggtgacgaatgaggtctgcagcgaggccagctccacgagcagtttaacggcgctttggtagttcttcttcagcttggccagctgctgaccaccacgggctagaccggccagttcgtaggtgtcggatccgtcctggtaggactcgaaaacgggcagagtgacaccagccacgttgtccttcttggtgcggatcttgatctgggccttggtcacgttttgcagcaccacttggttgatgtcgccagacgtgaatttggcctccgccagcgagaaggctgcctctttcataacatcacccatcagggtcttggtctcgatgatcttgcccagaatcaaacggaatcgcatctgcagggcatccgccttcttcttgagcagaccgtgacctttctgggctccagccagacgggccttcatcaacatctgggcaccacgggacgggaaaatcggtagcctatcttttccggacattttgctgtttttttcggatggtaattggctggactaaacaattttcaactgcgtatcaagaaaactgcaaccgtcgcagaacactgaaaaactccaactggaaaatgacggatgacagtgttggctactgcccgtagccaatcgataaccagttggtgctgggtagtgcgcttagatacagtactgcaaaatacgcagccacagctgattttgcatttaaaagtaaacaaatctaataaattccatttctttattggatttataatgcttctgcaacgcgtgtggttgacacatttaaacaaccatctacgccaatacgcgaacaagtcgcgagcccacatcaaaccagccatggccgtgagcatgcggatggtccatcaggagatcctgcattatgtaaacccctttgccaggatcaacgtgaagtccgatgttttcctgcgcatccagcccgcggatgtgcatcagtataccagcggggatgtgtttatcgcccaactggttggcggccatgtcaagaactcgaatgtctctctcgatgtgaaggtaaccgatgaggacaaggtggtcaatgtggtggttaaacaactggcggagcagccctcaaagcttgaatgccatctgcaaatacctgtgcgttccgatgtctctgtggacgcaaaaggtagtgtgcgagtggaaggcatacagagtgaactgctgcaagtcaaagcaaaggaaggcatccttaccaaaaatatcaaggccacccatataaacttgtacagtgaaaatggcaacatcaattgccagggcacattgctgggcaagattacccaaatagagtcacaaaatggggtgagaaaaaatttactatcaatctgatcttattattaacctttatatttcttttttagaacattgcgatggataagttgcaaggagacagcttgaattgttccaccaaagctggcagtattgtaaccgattgttgttatgtggaaaagtcaaagtttcagacacaaactgggcgtctggagctcaagaatgtccacaaaagcagcgaagtgcacgtccatcagtcgtcggatctcaatatgagtatgcgaaaca

SEQ ID NO: 14150 - DNA, 1054 bp, DROSOPHILA
gtttttcagtgttctgcgacggttgcagttttcttgatacgcagttgaaaattgtttagtccagccaattaccatccgaaaaaaacagcaaaatgtccggaaaagataggctaccgattttcccgtcccgtggtgcccagatgttgatgaaggcccgtctggctggagcccagaaaggtcacggtctgctcaagaagaaggcggatgccctgcagatgcgattccgtttgattctgggcaagatcatcgagaccaagaccctgatgggtgatgttatgaaagaggcagccttctcgctggcggaggccaaattcacgtctggcgacatcaaccaagtggtgctgcaaaacgtgaccaaggcccagatcaagatccgcaccaagaaggacaacgtggctggtgtcactctgcccgttttcgagtcctaccaggacggatccgacacctacgaactggccggtctagcccgtggtggtcagcagctggccaagctgaagaagaactaccaaagcgccgttaaactgctcgtggagctggcctcgctgcagacctcattcgtcaccctggacgaggtgatcaagatcaccaaccgtcgtgtgaacgccattgagcatgtgatcatcccccgaatcgataggactttggcctacatcatctcggagctggacgagctcgagcgtgaggagttctaccgactgaagaagatccaggacaagaagcgcgaggcacgcatcaaggccgacgccaagaaggcggagttgctgcagcagggcatcgatgtgcgccagcaggccaatatcctggatgagggcgatgacgacgtgctgttctaagtattaccttggatgtgtttattccagcaatattattgttaaactattttctgttctgtatccgtttccatattgtaattcgcaaagggcaagccacaaacttaattgtacctatgtagcaaaagtgtgtagactattccaataagcagaaaagtatgtattccatttttgtagtgtagtgtaagctgcgcaaatcatgcattaaagtcttgttgtatcat

SEQ ID NO: 14151 - protein, 246 aa, DROSOPHILA
MSGKDRLPIFPSRGAQMLMKARLAGAQKGHGLLKKKADALQMRFRLILGKIIETKTLMGDVMKEAAFSLAEAKFTSGDINQVVLQNVTKAQIKIRTKKDNVAGVTLPVFESYQDGSDTYELAGLARGGQQLAKLKKNYQSAVKLLVELASLQTSFVTLDEVIKITNRRVNAIEHVIIPRIDRTLAYIISELDELEREEFYRLKKIQDKKREARIKADAKKAELLQQGIDVRQQANILDEGDDDVLF

SEQ ID NO: 14152 - DNA, 10531 bp, DROSOPHILA
gatgaagtgtgtgcaactaaaataagcattaattttatgcaaattaaacagaccccacccgtcccgctcgttgctgtttcaatttgctcacatgtctgcagctgaataatttagcgacttacatttacagaaattaccgcacaccgacacatgcgcgtccttgcgaaggatgcgtgcatgtgtaggcgtgcggtgcaaacaggatttgggcgactaattgcaaagtacttaagcaaagctttaaacaaatgtaaaagcaaaaattgttaataaattatttaggcgaaaatgaaagaacgcgctggcacggcatgaaaccgaaataattccaaatgcacccgctcaaaaaaaaaaacagagtgagtccggtggtaatagatataaacggattttcccggctccactcgctctgtttgcgtttgtgttccgatgtcagtggcaggcgcagtcaatccgtgcccaaatgaccggtcatgcatggatttctcgatttctgtttcaattatacgcatcttggcccgaacacacgcaaaacactcatacacgcacacaccctgaggcgattataatatcaatgggccggaggtgtgtgcgcgtgaatttattcatttgcttgtcactgttttgacaacctctcgccgcccgacttcaccggaacaggaagatatatccagccagagagcgagacagacggccggcggcggccaggagcattgtgtcacccaaagcggattaagaaatttcgtattcgcatccgtttgccacataattgagtggccgggtgtgagtgtctgggtatctgagtgccgcctgagcccctgatggcaaatgagaagcaaatttaaaattttacacttgacttagcattgttgtcctgccatttcacacgatacaaacacacactcgcacgcacccatactgcagcaccaacattgctattgtgtccttgcatcccccaaaggcgatcatccgatatttgagtaaacatatatgcacatcgttctggttagttttcaaaatgtttatttttcacttgacatttatgcaacttttcgtttgctccttttgattttgcttgccacttaaacgctacaggtaattgtataatttaaatctagatatggcattcgaggttctaagcactagcatagtaagtatattttacaaaaactatatacagcgggtaatcgaaagaatcgaagtaacaaaggaaatctctggtcgaacactaaacacacacttaaagcagtttgacatttacattttatccttgggatccaccgatccacttccggccgcaggacctgcccctcccgccaccgcccggccgcgcttttcgaacagttgcaacaatcgctgttgcatcttgcaattttatgagtgcgagtggctgaggtgatgtgcgcccagggggtggaagtaggggccgtatggcggatagggcaccgcgtgcgagtacaggagtccgctggcatatgcccccggtccgaaggagccgccgccgggcggggggatggtgggggagttgacatccatgccggggttctgcttcttccacttggtgcggcggttctggaaccaaattttaacctgtaaaaggatgatgagaaatgacattggtatttaaatatttcaaaaacagtaatgaacttcttttcaatttagtcactcaaagtaaaatatattttaactcaattacttctattaaaattgaaaagcatagagaatacttataccaactttttgcaaaatatacataacttctctggattttaatctttaacaatagagtatataatcattgctcacctgcgtctctgtcaggctcaagctgagggccaagttcagtcgctcgcagacgctgagatatctggtggtcttgaacttgttctccagggaaactagttgttcgtacgtgaaggcggtgcgggctcgtcgaggctttgaaccacctccgccgccacctccggactttccatccccattacgactgcctccctttttggagtccgtctcgctgctgggatcgtcgatatcgctgccatcgtcacacatatcgtcctgatccatgtcattcaaatcctgggctgcaagacaaaaaaaagaagaggagatttgggcacgataagttccgggtgtctctctttttgcataagtcaacaggctagggccatccatcacagacaaatggcaatgtcctgggggattggaaaacggaaatcaatcaccacggccaccgcatcattgttcgattaattggaatttttcggcacatgttggtgcacatgtgactgcccgatgaccagtccgcaatttttccgagggcggagtgtctggccccgttgattgccatgattcgacaatcaaaattcaattaaggcaactcaccaactggccaaatgtacgtgggtgtgcctttcatcgaaatatcagttaccaattacggcattgccattttgccactctgattgcgtcatattatgcaatagtaagccaaattcggtaagcgaaaatattgtaagccgctaagaactttgcttgttaacaaatttctattgcgggggcgtagggcaattttgcggtgaacccctttcaaagctgcggaatcgattcagtcgggcgaaaaaagggtcggcaaaagtgtcaaccctccgtcaaggatgttcgcgttggccctgctaattggccaacatgattggccgtgtttgcatgaaattagagggcgcagtgtggcgagtgcgcctaagagtgcaccgcagactggccggcaattaaaccgaaaattaacgtgaacgcttcatttaatatttaacgaatttcgagacatccgcagagtgggcacactaccatttaccgccggtaatgggctgtggagtgtgtttgcaggcactttgatatgcattaatggcacattagatgcccgccagccccatcaatatatctaaccgattcgagtcgacgactggccctgaccacaattggtttgagtcaattgaattaacagcccaccattcaactgagagctgcaacgtggcgtatgcgtgatgtctagcagtcaagtgggggaaaatggggaaagcccgtcggacgcagttcaatatttgtgctgacgtttaattaaactgaaaggattatgcatatttgcgtagggtaatctgaatattatgtgaagggaaatagcctttactttctttgagtataaaatcaagcccaaaataagtacaggttgtaaataatgcattggtacatggaattcctgttgcacttaaattctagatacatgttaaactctttatacctttatattcaattcctttcaaaaataatccacatcatttaaaagagcatttctcgataatatccattcaactgccttaaatatttaacgcataatttaagctgccgcaaaggcatgaatcattacaaattcttatctgtctggtgtctgccattaacaaaatggcttccgttaattataattatgacgaaagcacttcataagcaatgttgatgatattgcggagacaagatgactgaaaacgagaaccccacatgatggggagtgaaatttccaaaaggaaagaagaacacagggggtagctgaaattacaacatacaatttaaacttaattatgaaatccgagtgttaattaccacaaactgtcgcataatttagcccacacacacacaggggcttgctggaaatggcttataaatttgaagttctttgtgccggggcaatcattgtaatcgcatccgcctggccaatgcgaccccggggagcatttgtcgtctcattttgccattttcataaaataataaatgagtggctgatggacggatatactcgtaaaaccgggccgacctctcttgctctggaaattgtcgcttaacttgactttacggcaactgcaagaaggcgaaatggagctcggcattacacacacacacacacacataggcaaacagacacggatacaaacacaagaatcccacgagtcctgtcgcccataaaagcacacgcgagagaagagagcgaacgagagagagagagacagaaaaagagagcgccaaattgagtgctgaaaaagaataaaagtttttcgcagccattttacatttttgtttcggggttggttgctcggcctgtgtatttgtgctccatcctccatccctgtaccgcccacatttaaatgacggccacccccggattttgccgcccctttccccacctcagaccggttatcgcttgttttttcatatgacttttggggcgcatttcagttgcttttctggctatctggattatgcagacaatatgtggctttattgttgcaaatgtgcctagctcgtgttgttagttttacgttttgcaatttaaatgaaatgcaaattgctgcgactgaaacgcaatgaatggctccttcgagaattgcagttagccccggcgtatgcgtaatatttgtgaattattaaccagctgcagatgcgccaagttaaggagcgagaggagcgctaggagcgagtgtcctggtgacataaaatctaattagtcgcaatgacaaagggccgcataattacgctaatctaaaccgaagcgaaggcattaacacctcctcccacaagcagggggttgaagtggggctttgaatctctcgctgtctgagtgtgtgtgtgtgcgtgtgtgagtgcgacagctccattgaagcgcctaatgaatgtgcggtaattaagtaccttgctaattaatgactacagcaacaccaagcaacaatcgttgaatgccagccggcaaacagtgcgtatgcgtgatgcacacacatgcccgcacttgactgtctgtctataggtctcctgtctgtgtgtgtgtgtgtgtgtgtgtgtgtatcctgccttggggttgctgtaaactggcagcaacataatcatttccaacatcattatcgtggcaaagttgcctcggctgactgtcgactgtctgcctccatttcagtgctctccaccactccactgcacatccaagcccacctacacgcacacatccacatccacatcccaacccccattcatggggtcgttggcgcggccattgagtcggttttattagcagttatgttcacagccctcgcccgccattgatgaagttaattgtgttttattaacacaaacacaaatgcgcaaacagcaaagccgactgtcggaaatggccgataatgtgtcgttgataatgatgtggatgttgatgtgaatgtgaatgtgcctgtgagtgttgatgtgaatggtcattccaccgtgaccagcgaaacgccattttccgtgtttataattttctacataagcgcttaacgaattgcccattaagagcagtcgtagtgcggcggcttaaaacaggttaattaattggcaatataaattgaacattgcttcttggataaacacaaatacgagagcttcaaagagaccaaagagaatgggttattgcagccgatggaaatacagtacaacctcgagtgtttaaaatatttttaccgacgtaaaaaaaaatactttaaggtaaattgctagaaagggtaaaattgctcttactacaagtttgcaaaaaagtcttcaaagccaattcgtgatacattacgtgaataaagtttgaataaataattatctcagtgaagcatactgaataatgtatagtcacaatatgtagtttcttctcagtcccaaaacacgatcatattattgggtaatgaatacccatttgccaattagatctactcgtttcattatcagaccatgagcagcgttcaaataaaccacgcagaacttaaacttaagctccatcagccaaaaccccataagcatttaccttcttctttttcttttttttcgagctttggccagcggcttagcgatggtatcgcaatgccccccgcccacaacaacttcaatcaaatttgcaaatttttatttgagcaatttctttgcaacgagccaagcatgaaaatcaattaattttcagcaaaattttagccagccatcgaaggaaaaaaggcagcaaaggcatcgaaaaaatcattgggaacccgaaacctgatccgcagcaagacaaacagttggtggggggaaaacagagagtgaaaaaaggaaatttagcttcccagctggcaatggtttttccccaattaaaacatcaatcaatcaattaaaagcaattctattgaaaatccttattggatatgagtgcagctttttcggtctaaacaagtttgcgttggaaaaacgaagagtgccagcctcccaaatcggagatttttgtatttttttttgattgctctggcatttgcgcatttgtttgccattgaatacacgcaaaatataaatgctttcattgctaacataaacacaccacaacacacaagcatcaacacacatccgcacctacatatgtacgtgacttgcgccggaaagcaggcaacacgaaaaatcccagggccttcgaaatggcagagtcccagatttcgagggtgctgctggcaaaacggaaagccaaattcaaaatcaaaacatacccaaaaacgatacaagcagcagtataaatataacatgtgccttcaaccacccacaggaatcccgggcacagaaaaaacagaagatgcggatgggaagtcgagctgtttgcaggtgtcctgcccatcccctttcattgcccgtgtactcgagcacggagtgttgcacagagacactcgggggaacgtgcctggttggtgtgtcctgaatttcccccgatttcaatcaaatcagacagctaaccatcaaagtgattgcggactcattgggtgtggggccggggtctaagtcagttgagtaataaatatccccactcaccagacatatcctcgctctgatcgtcatccaatcgctcctgcatttcctcgtccctctcgtagctccactgcctgggatggccgaaaggaccacttggcagcttgttgcccgtgaacttgttcggatccagtatgttctctacggagaaggccagccgctttgtggccgcatctcgatcactggaggcactcgtggaggccgaactcggattcgccgcagcactgctgttcaccgatcgcgtcagatccactgggcagacctacaaggatataggggaaagtagggatatagaattaagtaatgaattcattgacagcaattattgctctttatttgctagcaatattcaccactttgcattgaataaatcctacgtttaattgccaaactgatcttaaaaactaattgttttgaataattttctaccttgtaaagatggtttgttgcaaaaatgagtcaaataattatttcgataacagctttaattaagaaccagttgccttttcttggtaagtttttaaattgagtgttgaaaggaataccttaatcaccgactggtaaactacttaaaatttgtgtaccttagttgtcctaggtgatataatttagttaaactaaaatataaaaaatatatttggaaaagtataccaattataaataaaaatctatagatataaatcaaattcctcaacataccacacgcttaaaaacaaaatgaaaatctcaaaatcgagctataaacatacaaaaaggttaattttggcatattttctcgaccaagtgttaattgggttaattactcgaacgcaaaatctaataaaaaagctaattgagcagaacataaaatcaatttgtattagccaacgctaataaaagctaccaattgtgtgggcaataaatatcaacattaataataaatttgctatttaagttttcaaattttcactaacagccttcattttagaaccagtattttaataaatccattttgtataattggcacaccttaatattaaaatcacaaaacatttaatctaaactttttctatatgattttacgaaatccttgcacttagtgcactgaaatctagttatcttaccgacggcgtgctgtgcgatccatcgttgctgtcctcgtcgttgccatcgacgttgagctcctcgctggtgtcgctcctcgcgtatgtggctgctgcaatttgacgcgaggtggccgccgcagcagctgccgccgccgccaggccacccagctgtattcggaatccgtagtcgctcaagtcgcgtccactgggcgatccggagctggagttggagatggagatgctggcattggacacggagttcgaggcggacgccaaggcggaggtgctggaagcttgagtggtgcgggctgccaccgcagccaccagcttaatccgctcgagatccatgtccgatggtgcggcaacctgctgctgttgtggtggctgcgaggaatgtggcggattttgggggggagcgatgggtggactcatctgctggtcggaatgcatggccggggatgtgggcggcgacaggggcgaggtggccggcgagggtggggcagtgctgctgctgctgggagccctcaaatgaaagaccgccgacggatgcggatggggatgcggatgagggtgtggatgcggatgctgatgcgaatgcggatgtgcgggatgctggtgatgctgatgctgatgatggtgcatgtgctgctgggcggcggccaggaactgcggattctgcagcaagtggggatgctgctgcagcagggccgcatgaggatgctgcagtggctccggccttgccaagtggcgcacagcattcagttccaggagctttcgctgctgggctggcgaggagaagcttacggatcccaccgatgctggaggggattgcgagcgacgtgtattgctgtttgcattgtgattagttagactgttattgttgttgtgattgggcttctccttatcctgggagtcctcctgcaaggggctcaagcggctgagcaagctgcccgattcactgctcatctgcttgagccgttcgagggagtacctcagctcctgctcctgttttcccgccaccgctgcgccattggcgctgatgatgaacttgggtatcttggccgctggcggagtgctgccaccgcctgtgccggacaccacactgtccgcactcgccacatccggcgaggtgttggacttgggcgagtccgggttcgagttgggactcatcaggccaccgacggctgtgttttgggctgacgcactatcgctggccttttgcgccggcgattgcaacatgaccatttttgggtctttggatatattgtcttggattcactgggcgttcactgagagttcgagttcactgagtgttcactgcgcgttgcgtgtcttgtcaccttgagggcagccaatcgactgaatccggagatgccaatatccgacgtggacgctgcctatgctgccgctgctgccgtcgtcgtccgacgtccgattatcctggtcgtaatccgcgcgcgacgactcacacgctcaagagccagaagcgtaatgatgagggttgtttccgatttctccgagttcttaatccaacagatgtgccgtgttgtgtgcctgtggcaagtcaatagctaaatgctgatgctgctgctgctgctgcttctgcttctggtggtagtgctggttatggtggtggtggtggtggtggtggaggcagttatcgtggtatggtggtggtttttgctttgagtgactctctgtgcggcgctctacacgcccaccgctgagtggttctttgagtggattggctcctccccgccgtggctctaatctctactagcatctaatgatttaatttgccttccactcgttagcaaatgtaatggtctgtcgcaagtctaagccacagagcggcaggatgcgagcgcgtgagaagaggagaggagaggagaggagaggattccggagtgctgttttacatagttcttcactcaactgtaatagccacccgatggaaacaaaggccagccatacagccacgcagctagccagccagctgtccagccatccgtgcagccttcgcctcccgaggatgtgagtaattgtcaaattatttagcgcaaaatttgtttgtttatgcggttgggtgcttgcgaaatggatctcaactttttgcacatttctctcagttcttgtttttatttatttgtactatatgtttttctgtttcatattttcgccagttgtgtgttgagtttgctttgcttttggcatgcctggtttgttcttagtcatttatgcatgaatgctttgtgctttcttcagcttaattgaatttttgaatattttcgtggccgtaattatgttgctaattagttggtttatttacttttcgcttttgatttctttctcttttattattcgaacgaaaaaaaaacacatccttgtggtttttctccttgacacttcctatgtaaaactcaaagcgttcgagggggacagccacactatagccgtgctcttctgctcgcactctctctctctctctttcgtcgggcttctttctctcttactcctgcgcctgctcgctctcggaaaattctttaaaattgaacaaaaatttatatgcg

SEQ ID NO: 14153 - DNA, 2679 bp, DROSOPHILA
tattgacttgccacaggcacacaacacggcacatctgttggattaagaactcggagaaatcggaaacaaccctcatcattacgcttctggctcttgagcgtgtgagtcgtcgcgcgcggattacgaccaggataatcggacgtcggacgacgacggcagcagcggcagcataggcagcgtccacgtcggatattggcatctccggattcagtcgattggctgccctcaaggtgacaagacacgcaacgcgcagtgaacactcagtgaactcgaactctcagtgaacgcccagtgaatccaagacaatatatccaaagacccaaaaatggtcatgttgcaatcgccggcgcaaaaggccagcgatagtgcgtcagcccaaaacacagccgtcggtggcctgatgagtcccaactcgaacccggactcgcccaagtccaacacctcgccggatgtggcgagtgcggacagtgtggtgtccggcacaggcggtggcagcactccgccagcggccaagatacccaagttcatcatcagcgccaatggcgcagcggtggcgggaaaacaggagcaggagctgaggtactccctcgaacggctcaagcagatgagcagtgaatcgggcagcttgctcagccgcttgagccccttgcaggaggactcccaggataaggagaagcccaatcacaacaacaataacagtctaactaatcacaatgcaaacagcaatacacgtcgctcgcaatcccctccagcatcggtgggatccgtaagcttctcctcgccagcccagcagcgaaagctcctggaactgaatgctgtgcgccacttggcaaggccggagccactgcagcatcctcatgcggccctgctgcagcagcatccccacttgctgcagaatccgcagttcctggccgccgcccagcagcacatgcaccatcatcagcatcagcatcaccagcatcccgcacatccgcattcgcatcagcatccgcatccacaccctcatccgcatccccatccgcatccgtcggcggtctttcatttgagggctcccagcagcagcagcactgccccaccctcgccggccacctcgcccctgtcgccgcccacatccccggccatgcattccgaccagcagatgagtccacccatcgctcccccccaaaatccgccacattcctcgcagccaccacaacagcagcaggttgccgcaccatcggacatggatctcgagcggattaagctggtggctgcggtggcagcccgcaccactcaagcttccagcacctccgccttggcgtccgcctcgaactccgtgtccaatgccagcatctccatctccaactccagctccggatcgcccagtggacgcgacttgagcgactacggattccgaatacagctgggtggcctggcggcggcggcagctgctgcggcggccacctcgcgtcaaattgcagcagccacatacgcgaggagcgacaccagcgaggagctcaacgtcgatggcaacgacgaggacagcaacgatggatcgcacagcacgccgtcggtctgcccagtggatctgacgcgatcggtgaacagcagtgctgcggcgaatccgagttcggcctccacgagtgcctccagtgatcgagatgcggccacaaagcggctggccttctccgtagagaacatactggatccgaacaagttcacgggcaacaagctgccaagtggtcctttcggccatcccaggcagtggagctacgagagggacgaggaaatgcaggagcgattggatgacgatcagagcgaggatatgtctgcccaggatttgaatgacatggatcaggacgatatgtgtgacgatggcagcgatatcgacgatcccagcagcgagacggactccaaaaagggaggcagtcgtaatggggatggaaagtccggaggtggcggcggaggtggttcaaagcctcgacgagcccgcaccgccttcacgtacgaacaactagtttccctggagaacaagttcaagaccaccagatatctcagcgtctgcgagcgactgaacttggccctcagcttgagcctgacagagacgcaggttaaaatttggttccagaaccgccgcaccaagtggaagaagcagaaccccggcatggatgtcaactcccccaccatccccccgcccggcggcggctccttcggaccgggggcatatgccagcggactcctgtactcgcacgcggtgccctatccgccatacggcccctacttccaccccctgggcgcacatcacctcagccactcgcactcataaaattgcaagatgcaacagcgattgttgcaactgttcgaaaagcgcggccgggcggtggcgggaggggcaggtcctgcggccggaagtggatcggtggatcccaaggataaaatgtaaatgtcaaactgctttaagtgtgtgtttagtgttcgaccagagatttcctttgttacttcgattctttcgattacccgctgtatatagtttttgtaaaatatacttactatgctagtgcttagaacctcgaatgccatatctagatttaaattatacaattacctgtagcgtttaagtggcaagcaaaatcaaaaggagcaaacgaaaagttgcataaatgtcaagtgaaaaataaacattttgaaaactaaccagaa

SEQ ID NO: 14154 - protein, 657 aa, DROSOPHILA
MLQSPAQKASDSASAQNTAVGGLMSPNSNPDSPKSNTSPDVASADSVVSGTGGGSTPPAAKIPKFIISANGAAVAGKQEQELRYSLERLKQMSSESGSLLSRLSPLQEDSQDKEKPNHNNNNSLTNHNANSNTRRSQSPPASVGSVSFSSPAQQRKLLELNAVRHLARPEPLQHPHAALLQQHPHLLQNPQFLAAAQQHMHHHQHQHHQHPAHPHSHQHPHPHPHPHPHPHPSAVFHLRAPSSSSTAPPSPATSPLSPPTSPAMHSDQQMSPPIAPPQNPPHSSQPPQQQQVAAPSDMDLERIKLVAAVAARTTQASSTSALASASNSVSNASISISNSSSGSPSGRDLSDYGFRIQLGGLAAAAAAAAATSRQIAAATYARSDTSEELNVDGNDEDSNDGSHSTPSVCPVDLTRSVNSSAAANPSSASTSASSDRDAATKRLAFSVENILDPNKFTGNKLPSGPFGHPRQWSYERDEEMQERLDDDQSEDMSAQDLNDMDQDDMCDDGSDIDDPSSETDSKKGGSRNGDGKSGGGGGGGSKPRRARTAFTYEQLVSLENKFKTTRYLSVCERLNLALSLSLTETQVKIWFQNRRTKWKKQNPGMDVNSPTIPPPGGGSFGPGAYASGLLYSHAVPYPPYGPYFHPLGAHHLSHSHS

SEQ ID NO: 14155 - DNA, 3919 bp, DROSOPHILA
attctattgtcgtaggcgtggcaaaaggttttttggtaaatcgatagaaatgtacaagagaatgtaattaatatgaaaaggtaacaaaaaattttgcaaaagtgtgggcatggcagttttggtcggtttgttggcgtaagggcattatcggtattttcctattttcagctatatgatgcagtcgcctaattttgatcaaactataactaaaattgtatattgtcagaaacaacgagcatgaatttatagtcaatttatctttttattatttcttatctaaagttatatgcatatagaataaaaacagatacgagcttccttagaagcggacggaaataatgtctcgagatctggaccttcattaagacagacgaacattaggacaaggccaggtctactcagctagggatcctgatcaatgtatatgtatttactttaaaggggcgtaaacttgtattttacatgttacatactttcaagcgaatctagtaaacccttttaatttacaagtaacgaatataaaaagttgaatggtagcgggagaaaattaattgtataatataatattatctttgttaatccagagtcttggcaacttgtgcacacaattttttttttttttttggaaactgaatcagttaattgtgccaaaatttagagtgtagatttcttggaaatctcaatgaattttatggtcaagttccaagaagtgaaatgcttaacaaacaacaaaaacaaaacacacaaaagcaaacaaattatgcagaattatcggatgtattttatatgtatgtatgtacatacatatacaaagaataataaatgggtgggtctgttggcttctatggaatttccaatttaagctgcaatacatgtacattttaacgtctttctgtacgctctcaaataaaaaaacacaattttaggattaataaaaaaacagatatgtacgtcttctattcccatatgaagaaaaatattcatatgattttttgtttggcaggaaatgcgaatagttattggatcgttcaccgcatttcttttgctgttattgcaaaactcaaatgccgaaattcccggttgcgacttcttcgacaccgtagatatttcaaaagcgccaagattctcgaacggatcgtacctctacgaaggcttgctgatccccgcccatttgacagctgaatatgactacaagctcctggccgacgattcgaaggagaaggtggcgagccacgtacgaggatgtgcctgccacctcaggccatgcattcggttttgttgcccccagtaccaaaagatgcaaaagagcaagtgctacggcgacatgtcggaggacgagctgaacaagcacgatcccttcgtgaacgtgacgctcagcgacgggtcggtggtcaggagacacttcaaggaggatctgatcgtgcagtcggatctggccaagcccggatgtccccggatgtactttctgaatcacgaactgccgggcaatgaattcactctgtttgaggttactttcctgtgtttctgtcacttctgaagatcgtaaccttttttgaatctctgtagaacggctctcttctgcgtcactgggacaaagtggaactgagcaagccgggagtactgcgtccagcatctttcatttaaggatgatagtatccgaattgcaccccacttctgtccactttcgtctgagcactccagaacgtggaagaccgttggtaagctgaattccctgcttgactttaaggtttttagttaatgtccattttcacagcgatagtgatatccttgatatgcataatcctaacgatcagcgtgtacctctatgttgagaagcttcgcaacctgcacggaaagtgtttcatctgctacttggcctccttgttcctgggatatttcttcctggtcctcaacgtgtggaaatactcctccggcttctgcgttacagcaggtttgcttgtggcgattacaagataaaggacgaccaatttcacatttcgatatcatgatcagggttcctgggctacttctccgtcatcgccgcgttcttttggctttctgtcatcagtcttaccctctggaattcatttagcggcaactccagctggttgaaccgtttcttgccacagaatcggttcctttcttacaatttatacgcctggggcatggcgctgctcctgactgcaatcacctatatagctgaccaggtggttaagaacgagaagttgagaccccgcgtgggcgtcggcaaaaattgttggatctacagtaagttactattcctataataacaattgcggtgtaactcgttttttttttaaccaacagctggggatatgactgtcatgatctacttctatggcccgatgctactgataattgttttcaacataacaatgtttgtcctgacggcttttcgtataatgaaagtgaagaaggaagcacaaaactttactcaacagcaaaaaacaaccaataggctcaattcggacaagcagacgtaataattttaccatattttatacagttctaaatccaaaagtttaaattttaaattattttctatggcttttaaagttacgccctattcctgcgactctttatcatcatgggcttgtcctggagcttggaaataatctcgtttttgttgagcaaaaatcaggcttgggccaaggcttttatggtggctgattacttcaattggtcacagggcaccgtcatatttctgctatttgttctgaggcccagcacactgaagctactgaaggaacggtaagttatcggttcttccataggaggtccaattaacctggttctatcatctggctgagcaggattaagggtgggagggatgaagccggcgccagcgatgaacatatctcacttcagaatacgaaaattgaccccagtgttttttaatatatgggtaatgtgaaaatacagtttattagttcatttggtgttggaaaccttctattttgaatcactaacaggcagcctaatgatcgtgaccaaaggctgctttgcttgctcattattgctcacatatcgtatgctcatatgggctacgaatatttgctacttatcacttttcaagtatcttgatttctgcacggtgtctaagcatatctaagttttaattaaatgttgaatgtaattgtcctttaagttataactttttgcaataataatctattccaatccatcctagacgtgccatcaaagcgagatcaaagcaactactacatggggatatgtacgaatcttataggcatgaatactcggcatttatataccctggtctattattatggatggaggataaaaactcaggaaaatacttttcgcatcagcacttatgtatgctcactcgtgataataatttcgtaataattcgtactgtttttactgcctcaacttaattcaaagaactacaaatgattatattatgactttttatgacaatgactaactaaaaataaaaatttctgaatatttataaacaactttaaaatgttattaacttaggataataataataacacagttttaatttatcaagcacatcgttaaaaaacaataaattacttgaatataaatttaaaaaaaaaatggaatattggtttacattaacggtatgcaaaaaatcataaaaagtcatagaactgaacgatagagaaaattacaaaaaaacgatctagtcgagttcctcgactataagatactcatttctcagctagttctttcatttaaaaatttctctttcgtttcgatagtaattggcaagaaaaaataataaaatacaacaaattaatgcatttttgaaaattatgggcgtgactgatttggtcggttagtggacgtgtcaatattatgaagcaaacgtggacactacaaactgaaatatatatatatatat

SEQ ID NO: 14156 - DNA, 1547 bp, DROSOPHILA
caggaaatgcgaatagttattggatcgttcaccgcatttcttttgctgttattgcaaaactcaaatgccgaaattcccggttgcgacttcttcgacaccgtagatatttcaaaagcgccaagattctcgaacggatcgtacctctacgaaggcttgctgatccccgcccatttgacagctgaatatgactacaagctcctggccgacgattcgaaggagaaggtggcgagccacgtacgaggatgtgcctgccacctcaggccatgcattcggttttgttgcccccagtaccaaaagatgcaaaagagcaagtgctacggcgacatgtcggaggacgagctgaacaagcacgatcccttcgtgaacgtgacgctcagcgacgggtcggtggtcaggagacacttcaaggaggatctgatcgtgcagtcggatctggccaagcccggatgtccccggatgtactttctgaatcacgaactgccgggcaatgaattcactctgtttgagaacggctctcttctgcgtcactgggacaaagtggaactgagcaagccgggagtactgcgtccagcatctttcatttaaggatgatagtatccgaattgcaccccacttctgtccactttcgtctgagcactccagaattaatgtccattttcacagcgatagtgatatccttgatatgcataatcctaacgatcagcgtgtacctctatgttgagaagcttcgcaacctgcacggaaagtgtttcatctgctacttggcctccttgttcctgggatatttcttcctggtcctcaacgtgtggaaatactcctccggcttctgcgttacagcagggttcctgggctacttctccgtcatcgccgcgttcttttggctttctgtcatcagtcttaccctctggaattcatttagcggcaactccagctggttgaaccgtttcttgccacagaatcggttcctttcttacaatttatacgcctggggcatggcgctgctcctgactgcaatcacctatatagctgaccaggtggttaagaacgagaagttgagaccccgcgtgggcgtcggcaaaaattgttggatctacactggggatatgactgtcatgatctacttctatggcccgatgctactgataattgttttcaacataacaatgtttgtcctgacggcttttcgtataatgaaagtgaagaaggaagcacaaaactttactcaacagcaaaaaacaaccaataggctcaattcggacaagcagacttacgccctattcctgcgactctttatcatcatgggcttgtcctggagcttggaaataatctcgtttttgttgagcaaaaatcaggcttgggccaaggcttttatggtggctgattacttcaattggtcacagggcaccgtcatatttctgctatttgttctgaggcccagcacactgaagctactgaaggaacggattaagggtgggagggatgaagccggcgccagcgatgaacatatctcacttcagaatacgaaaattgaccccagtgttttttaa

SEQ ID NO: 14157 - protein, 192 aa, DROSOPHILA
MRIVIGSFTAFLLLLLQNSNAEIPGCDFFDTVDISKAPRFSNGSYLYEGLLIPAHLTAEYDYKLLADDSKEKVASHVRGCACHLRPCIRFCCPQYQKMQKSKCYGDMSEDELNKHDPFVNVTLSDGSVVRRHFKEDLIVQSDLAKPGCPRMYFLNHELPGNEFTLFENGSLLRHWDKVELSKPGVLRPASFI

SEQ ID NO: 14158 - DNA, 3653 bp, DROSOPHILA
gtggatctgtcctgagggtttcaccttccaccagatccatctcatctgcatgccgccctcccacgacaacatctgcaagcagtcctcaaagtaccatattgtaaacgactacctgtataagcccatcaatcttcaggagcaccagagcaagccaaatgtgacgcttcgctactcggagcgttacttcccggagaactactacgaacatgagcgttacgatgacgaggaggagcagttgcccgccgccccaaggccacgcatccagcaacagcatcaccagcagcaacaccaacagccccagcagcaacatcgccaagtgctagcctaccagcagccgcagcagcagccccaagtgagggtacagtaccaacagccacagcagcaccagcaccaccaacagcaggctcagccgcaagcacaagtggtgacgcagatccgccatcagccgcaacctcagccgactaccctggcctaccggaagccacagccagtgaccacagtccagccccagttgcagttgcatcagctgcaccagccccaattgcagctgcaccagcaaaggccacagacgttggcgccgaccgtgacgcccgcgccgtaccgattcttcaccgccgctccccagctgcagcacttacagcagcagcaacagcaggtcttccgcacgcccgaggagatcaacatatcgctgcagcagcgtcggccgcaggtgttcattgccacaacgccgaggtattacgaggatgagtacctctacgagcggaggaagtgaggaggattgcagtggagtgagcagtaaacagtcttgtcgttccctcggatccacctctcgtgtatattccccgtctaagtagctttaagctctcgccccagctctctgtcaggcccgaaaatccttgcgcgagttttgtgtacctatttgtaatatttaatgtcctgctagaagaatccgccttctaactcaattcgttaataaaggaagccacattaagttagccgctcactgtatatctatctccatgaactgatccgcgttggacagatgcactgcctggctgtgagtgccctcctcaactacgtagttgggtccaattatgcagttcttcaggacggatccgctcttcacctgtgctcgatggccaattatgcagttgtcgatgttgcagccctcctccacaatcgcattggacataattaacgaattggccacaatgtttttgggactgatgatgcagttgggtccgaaaacgctgaagttcagtgaagtcttttcggacaacttggcattgtcagccgctatgatctccttcgtttgggttgattttaccacggctccaggagagatcagtggatgcttttcgccacacagattgttccagatgctggctaacttgcgattgatggccaagaagctcaaagtgttgtttacccgcacacctatggcatctctgggcgcctgaatgccatagcaacgcacaatatcgccatgatagggggattgggatagagattggttaaacagtgaagtctgcgtgatcttctggtccagaatggtgtggcctacatactgaaagttaaagacataataggattttatatgatattcaatacgggtatacgggtactaaaggtaacctgttaataccaagtagtaactcacatgcaaaacatgatcctcattcttggtgaccacgcccacttcggatgtggtgtcctgcaccgttttaggaggtcgttttgagtgctgcttctttatcaaatgcggcagaaattcgcccttaaaggttgatatattttccttctgcaaagattgaatattagaaaacaatttactataaggtcatatcaaaactaacccttcgtagataatcgataacccattttttcagcacataaacatgagcatccaccagtcggctgtatacatccaaccttccgcggttcttgagcagatgtcgctggatgttgagtgtttcctcgcagtcactggcggcggatacgaaagccaatctctgagtggccgcatggatgccaatcaaatccctttccggtttgtgcttgcttttgggaccgggcataacaacgtccgactcaaatccgctgggaaataggagcattgcaagggcggcatcatgttcccgaaacttgttgatcagcggatataggctgacattgctgaccaggtcgcagctgaccaccagaaagtccgacttgatcttatcgtatatgtagcgcagactgtcggcagttccgaaatccccgtcactaggaatcgtggcatagtccagtctcagctttaagggagtgttttccagagcagattggatctctagtttttcttgctccagtaccacaacaatgacctctgaaatatttttcaattaaatccaggtttttaattcagactatccgaattacctgtaaagttgtgttgttgcagcagatttaagggataccaaatcagaggatatggacccaccggcagcaggcatttgggggcatcccccaagacctcgggtagacgagtgccacgcccagcggcaaaaactacggcctggaactcggtcattgtttcacaaaaatataaataatttcggctaaaaagcgtgcaagcacaaaaagagccacgcaaacagctgatccaatgcaagcgaaacacctacgagcgctgtccaacactgcttccaatcagacatatgtttgctgtcatgtgactgtgcaattgtttttgttgcttttgctattgtataaaacaagtcagatgaccctttttgcaatgaaaattccctttttccacttaattattacacagaatgcacatcgtatgatacaacaagactttaatgcatgatttgcgcagcttacactacactacaaaaatggaatacatacttttctgcttattggaatagtctacacacttttgctacataggtacaattaagtttgtggcttgccctttgcgaattacaatatggaaacggatacagaacagaaaatagtttaacaataatattgctggaataaacacatccaaggtaatacttagaacagcacgtcgtcatcgccctcatccaggatattggcctgctggcgcacatcgatgccctgctgcagcaactccgccttcttggcgtcggccttgatgcgtgcctcgcgcttcttgtcctggatcttcttcagtcggtagaactcctcacgctcgagctcgtccagctccgagatgatgtaggccaaagtcctatcgattcgggggatgatcacatgctcaatggcgttcacacgacggttggtgatcttgatcacctcgtccagggtgacgaatgaggtctgcagcgaggccagctccacgagcagtttaacggcgctttggtagttcttcttcagcttggccagctgctgaccaccacgggctagaccggccagttcgtaggtgtcggatccgtcctggtaggactcgaaaacgggcagagtgacaccagccacgttgtccttcttggtgcggatcttgatctgggccttggtcacgttttgcagcaccacttggttgatgtcgccagacgtgaatttggcctccgccagcgagaaggctgcctctttcataacatcacccatcagggtcttggtctcgatgatcttgcccagaatcaaac

SEQ ID NO: 14159 - DNA, 1452 bp, DROSOPHILA
cgcttgcattggatcagctgtttgcgtggctctttttgtgcttgcacgctttttagccgaaattatttatatttttgtgaaacaatgaccgagttccaggccgtagtttttgccgctgggcgtggcactcgtctacccgaggtcttgggggatgcccccaaatgcctgctgccggtgggtccatatcctctgatttggtatcccttaaatctgctgcaacaacacaactttacagaggtcattgttgtggtactggagcaagaaaaactagagatccaatctgctctggaaaacactcccttaaagctgagactggactatgccacgattcctagtgacggggatttcggaactgccgacagtctgcgctacatatacgataagatcaagtcggactttctggtggtcagctgcgacctggtcagcaatgtcagcctatatccgctgatcaacaagtttcgggaacatgatgccgcccttgcaatgctcctatttcccagcggatttgagtcggacgttgttatgcccggtcccaaaagcaagcacaaaccggaaagggatttgattggcatccatgcggccactcagagattggctttcgtatccgccgccagtgactgcgaggaaacactcaacatccagcgacatctgctcaagaaccgcggaaggttggatgtatacagccgactggtggatgctcatgtttatgtgctgaaaaaatgggttatcgattatctacgaaggaaggaaaatatatcaacctttaagggcgaatttctgccgcatttgataaagaagcagcactcaaaacgacctcctaaaacggtgcaggacaccacatccgaagtgggcgtggtcaccaagaatgaggatcatgttttgcattatgtaggccacaccattctggaccagaagatcacgcagacttcactgtttaaccaatctctatcccaatccccctatcatggcgatattgtgcgttgctatggcattcaggcgcccagagatgccataggtgtgcgggtaaacaacactttgagcttcttggccatcaatcgcaagttagccagcatctggaacaatctgtgtggcgaaaagcatccactgatctctcctggagccgtggtaaaatcaacccaaacgaaggagatcatagcggctgacaatgccaagttgtccgaaaagacttcactgaacttcagcgttttcggacccaactgcatcatcagtcccaaaaacattgtggccaattcgttaattatgtccaatgcgattgtggaggagggctgcaacatcgacaactgcataattggccatcgagcacaggtgaagagcggatccgtcctgaagaactgcataattggacccaactacgtagttgaggagggcactcacagccaggcagtgcatctgtccaacgcggatcagttcatggagatagatatacagtga

SEQ ID NO: 14160 - protein, 455 aa, DROSOPHILA
MTEFQAVVFAAGRGTRLPEVLGDAPKCLLPVGPYPLIWYPLNLLQQHNFTEVIVVVLEQEKLEIQSALENTPLKLRLDYATIPSDGDFGTADSLRYIYDKIKSDFLVVSCDLVSNVSLYPLINKFREHDAALAMLLFPSGFESDVVMPGPKSKHKPERDLIGIHAATQRLAFVSAASDCEETLNIQRHLLKNRGRLDVYSRLVDAHVYVLKKWVIDYLRRKENISTFKGEFLPHLIKKQHSKRPPKTVQDTTSEVGVVTKNEDHVLHYVGHTILDQKITQTSLFNQSLSQSPYHGDIVRCYGIQAPRDAIGVRVNNTLSFLAINRKLASIWNNLCGEKHPLISPGAVVKSTQTKEIIAADNAKLSEKTSLNFSVFGPNCIISPKNIVANSLIMSNAIVEEGCNIDNCIIGHRAQVKSGSVLKNCIIGPNYVVEEGTHSQAVHLSNADQFMEIDIQ

SEQ ID NO: 14161 - DNA, 2551 bp, DROSOPHILA
gtgcaggacgagaacgagaattgcgtgagaaagtttttataatttaaatttttttgtcaaacccccaaaacgccgcggcagcgattagaacccagtggacttcggcgggggctcgtataggctacacactataaatacataacactacacatcctatctatataataataatactattttgaagttcatgtaatttaattaaaataatgaacctgaaaaacctaaaaacaaaataaaaacaaaccaacgaaaacttggcagagttttgctagcgctagagatatgatatataccatataccatataccacatacgatatataatacttgtacgtagagagatgagagagatcaaccgagttggctgaacaataacgtttaatggaaatggagcccatttgaacgaaaagcactaaaacttaataacttgaaatggaaatgataatcgtcaccgaaatatcccactaagcacgccaccgcagcatcgagttaaccgagttacaaccgcttctactatttgtttttagttcactttatgtttagtaggtaaatttctgtgtgctcgtaacgaatttgaattttacattaaatcagcatcaacaaaactgagcaattttcacattttttactttgtatcttgcaataaaaacgaaattctattcataataataacaataagaaattgtaagtgaaattcggttttactaatgggggggtcttcaagatttcaagaaatggtgtagctgcgaaccttagtggacttcaagtaatgaagtttggcatagccaactcaaagtttttgaagttttttttttagccatctaaagtttcatggcattcaaaaataggcagaagttgtcggagtaaacaaacattctcatttgcaaataaagattcgctcaagtttggtttcccagcccaataaatgaatttccattgatttatattgctttaagctatcactatttattaacacttttggagctatacaatccaagctcttagatggccacaacacccagtttggcgtcggtcttcaggtacgcattctcgccgtaagatccgccgtattggctcttcttgaagactgaaaggtagagaagatacaaaagaaggtaagtctgggtggcaaagcggtgctatgaagtcaatccaaaatcataggataaacaatattatccagttaagaactccatgttgtagcttagtttaggaacccacctggatcgacctcagccacgaaggagcgtggtggcagagcagcagcgtatagcgggtccagagggccgtagggcttggccaaaagtgggcgaccctgctcccatccataacggttgagggaattccagtcagcaccgtccagcttggcggcggaggcagctgctccggcagcgttggtcagggcagaagcctgagcctcggcggtctcagcggccttaaccacatcgccgtagctggctccgtatccggatccgccgtagttggggcgattggccacagccagggcgacgcagcaggccatcaggcagagaagacgtagggtggcggacatttttttttggtggtggtgcgaggaacggactgtttcgaaaactaattaaccagagcgtgtgtccaaattgcttttatagcaacaccatttgagctgctccgcgatttgtgagctcaccagacgtgaccaaaccacctcgatgaccagtcactttcggggggccgccactggcagcatctccagccccctccgtcccctccggcccagggcgataaggccacgggatcgtctccaatttctatgctcattgaaattgcgcgccaaattgcggcactgccacaaccccgggaaccccgagaagctgctccattgatagcgacttccccctgctcggcacgctctgttcgcttctggtgtgtgcggtatcggggctttggccgtactccacggcgatccggcccatgcacgcatcggaaatcgggccaactggggttaagccaccgatcaatgaacactaaccggaaccagcgacgtacgaaagtctttggacgtcgggcaaactctagttttaaagctgaacaatgtttttgaaaagtttgtggatcgtaaactcagttctatgaatttatttaaaaatggacaaaaatgtgcatagcaacaaagtggattattacgtcaatattctaagttatgtttcaaatagattggcatttaagttatgcctttttattagaatttcattcttatatttattttaatgtaatattacaatgttgctaaataccaaattttaagctgttttactgaaaaacgtcgtacggttagttagtaataatattaaactttatttatatttcggcttaacacaaaacataaattcacttttacgaaaaattaaaattattcaaacagacaaaacctctacacacatggttttaatttcaacgacaagttttcccaagaattgtgccgcactcgatgccagaattcttgccgtgattcaccgctcgactcgaatgtcaagcgatggccagcaacattgaagctcttggccaagagt

SEQ ID NO: 14162 - DNA, 417 bp, DROSOPHILA
atgtccgccaccctacgtcttctctgcctgatggcctgctgcgtcgccctggctgtggccaatcgccccaactacggcggatccggatacggagccagctacggcgatgtggttaaggccgctgagaccgccgaggctcaggcttctgccctgaccaacgctgccggagcagctgcctccgccgccaagctggacggtgctgactggaattccctcaaccgttatggatgggagcagggtcgcccacttttggccaagccctacggccctctggacccgctatacgctgctgctctgccaccacgctccttcgtggctgaggtcgatccagtcttcaagaagagccaatacggcggatcttacggcgagaatgcgtacctgaagaccgacgccaaactgggtgttgtggccatctaa

SEQ ID NO: 14163 - protein, 138 aa, DROSOPHILA
MSATLRLLCLMACCVALAVANRPNYGGSGYGASYGDVVKAAETAEAQASALTNAAGAAASAAKLDGADWNSLNRYGWEQGRPLLAKPYGPLDPLYAAALPPRSFVAEVDPVFKKSQYGGSYGENAYLKTDAKLGVVAI

SEQ ID NO: 14164 - DNA, 4436 bp, DROSOPHILA
tttacggcacagttcttctggagattttccgaaccttgacgaccaggagtagtaattaagtaatggttttccatctgaaaaagccagcagttaatttaaattcaaacgaaaaacgtatatattgccttaaataagctgcattctaatccgaaaacttttcgattgtagcgcctatgctttctattgtgtttcatagagttgaaacggttaacaaaattcaaatcaaggtataacctataacgtattgtaaatttttctcaaattaggaccgattgggaaatataaaacaggggaacatgggaaactttgagaaattttaaaaaattctatttaaaaacgcagatctctatagtcttcatgaagactataatcttgcatatatattaactcgagtttcttaaaaaaaaattgagttatataagaaattattataaattctatgtttctcattatgcacatgtttattctatgttcctttatgtaaacacagcacgctgggctgcattatcgataaaagcccgcaccgttagactttatctgccatctctaattcgcatctcctttcctttttgttcgtattgtgcggtttctgcattttttaatgtgttaattgtgttttaaactaaaagcgaagataaaatgttttgggttttatagacataaaaaagtgcgtgtgatttaagcattgtgtgtgatcgttttgatcgtaaatgtgttgttttttttaatacgccgattgcgaaacctgcaagtcccgttgatcgccattttgttttcctttcgtacacattgtccaccgttttcttattgttattgtgtcgagtaaacgttttatttaactaaaccaacattagttactaatggattcggtctaccgctttgagtttggttgcattcatgacgacgatttttccgacttcttattgcttaactttaatcagttgcgactggagctctgggactaccacaggtaaataaattagttaaaagagtccactttagtttgatttactttattttgatcaatattatagttaacatttacatttctcctttgtacaggtatgtttttcacacttatttaatgcatttctggaccggatttggtgcggcatcacaggctcaagttgagggcgaggatcgccaggagagccgttgcactgaccgccacaaagcggcctgctccggatgcgttgcacaggtcacccttgcaggtgtagcagctctccacctgccggctgtgggtcaccgtgcattcgttgtccttctgcccgatggactcgaagtggcagtcgcgggacacaatcgttccagcgcggtctgtggatcacaagtaattaataacacattaatagtcatccacaatggatatcctcatattaacagaatcatgaatacatagaaataaggtttgtcatctactaattgcgctgattaaaaataagtcatattaatggttttagactaaatcatagcggaaaattatatatcttaaactttattatctaaaacatcgaacattccctcacgatgtaaatgtgaattgttttcaaaggaaaataacgtaattttcttaaaggcatagaaattattagaaattatatatgctaaattaagtataaaacatgaattttagttggttgcattaatatttctatacaagaaagctatgtaacataacagtactgctatcaataatacatgtgacttatgtgcaaagtataccatttactaccattgtgaaaaagccggtaatcaactacagatgaacaaacaaaaatgtttaaattggcaatttttacaagtcgccgccttgggtatattttacactattcctaacaattaaacttcagttataacgctgtaaaaattgttagatacacaacattgtttacttctaaatgagtcacaggctctatctaaaattagttcacagtggcttgctaatttgtttaccactttaattttgatgaattttattttctgactaattctgtctttatcttgaatatttttatgtttagtttttaagtatgaacaacttagtttgactatatttttctggaattactttctacttagtgagtcattatgctttcttgtacagtatttaagccctatgatcttacgactgcgaaacgcactgtatctactttgcatacgatttcagagattgtatattactttgttttttgtttgccatatgttaattggaactcgtaccctccagatcttgactcctctgtttgggtgacatcatgacttattaatttatttgattgcgttcaaggtgcgtgcgcctctggtagtaaaattggtatgcaaaaggggaactccgtgggatttcactcaccgctggtgaccaccttgttgcacctggtcactggctgcagttgctccatggtgttgggcttgggcacactgtcgcaatccacggcgcggatgttagaggcagaatcgatcttgtccttggcgcagttgggatccgtgagggatttgcactgataacacttgatggccgatgctgaagtaggcagataagacatattaattaatatcaattaatattcaatggcttggtcaaggtcgaccatttgaatgtgtttgttttggcttgtaaccagtttgagatctccatttcgctcgtaatctcactcgatcgccttatgtaacgccctcagccggaataaacaataactttaagcgcgttttctttctcaagacctctgtcatttaacgactatgaagccatttctatatacgattccaaaacgtacggaaaaatacgtgaatatttctgtttttttatttatttatttatttacctaacattttcgtgtgtttcggtatttcaaatatttgtggttggcattcaaacgtgatgacttaatgcgtatcattttgttccagttttttatgtctattttaatttcagaaatgcgtatataaatttacctatatgtaaattgtagagcaatcttattataattgtaattggttttctaaacaccctacgtttgcactcaaaactggttatactcatttttaaaattactttccggtgaaaaatcattcaaaagaaaagtcacttaccactgtgcattgtgcacacggcgatgaggagcacgaaaatcacttgtttcagcatatttggtgggttttgaacaaactttaatatttggaaaatgtattcaaatcgttttcggtttgaaccgtttggcagacgctgaacaactgaaattagtttcgggtttgttttcagcacgctccacattcgcaacttgttttcgagtggcgatcagcgtgaaaagctctgctcattcactcaagaaactggcattagttgagtgaaactcggaacgagttatgtgtttgttatgtcaatttggcgatccacgcattggggtcactaaaaaaaaaactattttgttttgatcagcagcttcgtaggcggtcatataagaagtatcttaaactactactgttatgagtgcaatttgttgttagcggtgtgaattgactgcggttgaactgtgggacttttcttcaattaaacttactgcggataatggaattaaattgcaaagtgacacagttctctgatttgggctatcgaactttaattggaaaggtgatcggcggaatgagttcaaatttaaagccagaaatctctggttttgatgcggcaatatttgtactagtttctctgagtttagtattgttattttaaaactatgttattaaatctatagcttgactagatctttggataagaagcagctactataaacacaattgcatgtaaaaagtttaagaaaagataattttttttgagttcaatgaacttaagcagctcttttaatcttttacgtataattttcaagcagctcaagaagaaaaggaccttgcaattttgcgtgtagcttgttcctttccttttttttttttttttggcactgattgctcattttgttgcatgttatttgagcaatcggctcattgaatctgcctcctttgtctgttaccatggcaattttggactaaaaggaaaattctgtgataagaccagccgtctggggagcaacaaatcctcttcgagaagaaaaagcaggagtatgtgtatggaagtcactaaattgcaattccaaaatacgtacaaacatatctgtaaatcttttcagcttcattttacttcgaaagctggttttcccttagaaaattgtcgcattaaagaagctcttcatggaaaattaacttttcacgtcttgcaagctttttgagcaaatttttagttgagtgcaaaattagttgttgtcggcgaaacttgtttcaattgcgccgcaaaaacaaaacaaaattttaaactcaatgagtatgtaaattagcgaggaatatcaaatatttacatagatccactcacagagcttcactcaaca

SEQ ID NO: 14165 - DNA, 834 bp, DROSOPHILA
atcaaaacaaaatagttttttttttagtgaccccaatgcgtggatcgccaaattgacataacaaacacataactcgttccgagtttcactcaactaatgccagtttcttgagtgaatgagcagagcttttcacgctgatcgccactcgaaaacaagttgcgaatgtggagcgtgctgaaaacaaacccgaaactaatttcagttgttcagcgtctgccaaacggttcaaaccgaaaacgatttgaatacattttccaaatattaaagtttgttcaaaacccaccaaatatgctgaaacaagtgattttcgtgctcctcatcgccgtgtgcacaatgcacagtgcatcggccatcaagtgttatcagtgcaaatccctcacggatcccaactgcgccaaggacaagatcgattctgcctctaacatccgcgccgtggattgcgacagtgtgcccaagcccaacaccatggagcaactgcagccagtgaccaggtgcaacaaggtggtcaccagcgaccgcgctggaacgattgtgtcccgcgactgccacttcgagtccatcgggcagaaggacaacgaatgcacggtgacccacagccggcaggtggagagctgctacacctgcaagggtgacctgtgcaacgcatccggagcaggccgctttgtggcggtcagtgcaacggctctcctggcgatcctcgccctcaacttgagcctgtgatgccgcaccaaatccggtccagaaatgcattaaataagtgtgaaaaacatacctgtacaaaggagaaatgtaaatgttaactataatattgatcaaaataaagtaaatcaaact

SEQ ID NO: 14166 - protein, 143 aa, DROSOPHILA
MLKQVIFVLLIAVCTMHSASAIKCYQCKSLTDPNCAKDKIDSASNIRAVDCDSVPKPNTMEQLQPVTRCNKVVTSDRAGTIVSRDCHFESIGQKDNECTVTHSRQVESCYTCKGDLCNASGAGRFVAVSATALLAILALNLSL

SEQ ID NO: 14167 - DNA, 3327 bp, DROSOPHILA
ttaatcccgaggacgacgtgggcaacataaatgctgcccagagcaaatcgacgccgagaagtaaacagctaaatgattcagctcacaagccacgaacaagcacgacggcatctgcaccaacaaaacgaaagtctgcggaaaattctttatccgaggtgtttgctaaaactgtgcgattgatacagcccatcccaaagatgtggcctactccttctgatgccgactcggggatatcttcgatgggctcatcattggcatcgacagcccgcctgaagtagtagccgtgtttcgtcttaaatgtgcttagtagttctttgtagataagattccttgcgtcctgacccagtagtagagtctagtttgtgtgcccccttattcgaattcaatttttatgtatattattttcaggccgagagatcaatgcgctttcccatgcggtacaacaagatcaagaggctgcattagatatatgttcttgccagattatttacccgcaatcgtgtacaaatgtaagttttagttacgtattattaggaagcttgcaatagaaagaatgctttagcttaagcttatcgatgtatgaatcaatatttctttagagtagtaaaccagtattatctaagctcgattttcctaagcatgaagccgttttttagtttttctttcacttcacttttttaactttttacgacgcttttagttgcttatgaaattttcacatttttattaatttctatttcttttgaacatttttgatttattttactttacctacgaatagatttatttcgtattcttattatttctatgatttcctaaaaatttaacactatacctcctttgatttagaacaaaaatagacaaatgactttttgattgacgaagcgcgtgttttggaaatcctcatgagctgatagtactaaattcaagtacctgatctcgtctgtacaaaagtataaacataagaactcttcggacataagacaaagttcaagataaattaaggataaagtgtatatatacgtatgtatttaccagagtgcaagctagtgtctatttacaatcattttaagatataatgtttttttcgtaagtataacgtgtagttcttaaggaataaaacggaaccatgcaattacttaatgtgttttaatgaaagtaagtcggcgattctcccaatgctactccgagtcgctgctgcctgacttgtgctcctcctctttcttctcttcagtcttgtagtggcgatattctttcttgagctcccacatgttcttgtgcgggttcttcatattgtaatcgcagacatccttgagaatctccttcaggtagctaatcggctggttggtgatcttgaccagatccttgatgttatagtattgatgcttctcgaatgcgtggaagagcatatccatcacggcattcttgtcgtcgcgcgccttcttgccctcggccttctttcgctcccgatattcaatctgcaggaatggaggagttatatatacatatatattaccaaaacagagtgtattattgttctcacgttgtgtgcgtggtcttttacaggcttaaagttctgcacgattttgtcgataggctgcacacgtcgctgtggttccgatgccttgcgtatggactccagctttagtttcatgtagcagttgtcggcgatgggtcggcactctagcttttgcacaatcctgccctccatatacaacttttcgttatccggctgtgccgccgaggtagtcgagttctccttgccatcggacggtgccatgtgcgagaatacgccgagcgtctgcttggtgacctgcgacacgtccaggatgtgctcggtgggtattttctcctcgggatctagagccaaaacggcgggcgtgagggaaagcgagacctgggccttttggccaggtgtcttgtttatccggagcttgcccacgtccatgttcgtcggcgccttctcccatttctgggcaatgtacttgggcaccttcaccagccatacgcctcgcccagcattggacaggtccaggtccttgtcgatgatctgtgtcttttccttatcctccttcgacattctgtttgctttaaattattaaaaacgaatttgcaaagccacttgtaccgttttcggctttgcttgttgttgttgttttgccgtaaatttagtgcggtcgaataaacagtttcgaaaaaatgctagtttagtatatcacggtatttttctttcggtatttattcgttatgttattattaggcgccaagtttgaaaaagtccgaagtgcagataacgaaatagaactatttacatatctgaattttatatagttagcaagaactttagaacataagaaataacttttataatgaaatgtcttagaaagaatatgatatcttaattttgatttattcagcaaattttatgactaaatttagaacacaacattgtattgatttaagatgaatttatgaattgatgtgacaccttatccagcattatccaccccattgccctattaaattgtttttctaatatttttattgttttttcattctttttaaattaggttgacagcatggtgattgtgtagaatctattcctcctcctcttcctcgtcctcctcctcctccgcatcgagatcctcctcgtagctattaccaccagtgggggtaacattagagccgagctcgatgatcggttcctgttcctcaacgggcgtgacgggctcttcgaccacaggctcgctggtctcgttctcgttcttctggatggcctgcagttcctgggcggcaagctcggattcctggcgggcgatctcggccagctcggcggcctggcgagcaagttctccctcactctccttctcgatctccgccaggcgctccagctcctgctcacggacacgctgctcctcctccaggcgagcctcttcagcgacacgagcctcttcggcggccttttgggcagcttcttcggcggcacgagcctcctctacagccttcagtgcggcttcttcggcggccttttgggcagcttcttcagccagacgagcctcttcggctgcctttaaagcggcttcttcggcagccttttgggcagcttcctcggcggccttttgggcggctgcctcctctgctaggcgagcttcctcagcagctttttgggcagcttcctcggcgaccttttgggcggcagcctcctccgctagacgcgcttcttcggcagctttctgggcagcatcttcagcggcttttagggctttagcttcttcggctgctttttgggcggcagcttcagccaggagagcctcttcggcagcgatt

SEQ ID NO: 14168 - DNA, 1262 bp, DROSOPHILA
ataaaattcagatatgtaaatagttctatttcgttatctgcacttcggactttttcaaacttggcgcctaataataacataacgaataaataccgaaagaaaaataccgtgatatactaaactagcattttttcgaaactgtttattcgaccgcactaaatttacggcaaaacaacaacaacaagcaaagccgaaaacggtacaagtggctttgcaaattcgtttttaataatttaaagcaaacagaatgtcgaaggaggataaggaaaagacacagatcatcgacaaggacctggacctgtccaatgctgggcgaggcgtatggctggtgaaggtgcccaagtacattgcccagaaatgggagaaggcgccgacgaacatggacgtgggcaagctccggataaacaagacacctggccaaaaggcccaggtctcgctttccctcacgcccgccgttttggctctagatcccgaggagaaaatacccaccgagcacatcctggacgtgtcgcaggtcaccaagcagacgctcggcgtattctcgcacatggcaccgtccgatggcaaggagaactcgactacctcggcggcacagccggataacgaaaagttgtatatggagggcaggattgtgcaaaagctagagtgccgacccatcgccgacaactgctacatgaaactaaagctggagtccatacgcaaggcatcggaaccacagcgacgtgtgcagcctatcgacaaaatcgtgcagaactttaagcctgtaaaagaccacgcacacaacattgaatatcgggagcgaaagaaggccgagggcaagaaggcgcgcgacgacaagaatgccgtgatggatatgctcttccacgcattcgagaagcatcaatactataacatcaaggatctggtcaagatcaccaaccagccgattagctacctgaaggagattctcaaggatgtctgcgattacaatatgaagaacccgcacaagaacatgtgggagctcaagaaagaatatcgccactacaagactgaagagaagaaagaggaggagcacaagtcaggcagcagcgactcggagtagcattgggagaatcgccgacttactttcattaaaacacattaagtaattgcatggttccgttttattccttaagaactacacgttatacttacgaaaaaaacattatatcttaaaatgattgtaaatagacactagcttgcactctggtaaatacatacgtatatatacactttatccttaa

SEQ ID NO: 14169 - protein, 277 aa, DROSOPHILA
MSKEDKEKTQIIDKDLDLSNAGRGVWLVKVPKYIAQKWEKAPTNMDVGKLRINKTPGQKAQVSLSLTPAVLALDPEEKIPTEHILDVSQVTKQTLGVFSHMAPSDGKENSTTSAAQPDNEKLYMEGRIVQKLECRPIADNCYMKLKLESIRKASEPQRRVQPIDKIVQNFKPVKDHAHNIEYRERKKAEGKKARDDKNAVMDMLFHAFEKHQYYNIKDLVKITNQPISYLKEILKDVCDYNMKNPHKNMWELKKEYRHYKTEEKKEEEHKSGSSDSE

SEQ ID NO: 14170 - DNA, 3640 bp, DROSOPHILA
aattaatgcatttttgaaaattatgggcgtgactgatttggtcggttagtggacgtgtcaatattatgaagcaaacgtggacactacaaactgaaatatatatatatatatcatttcattgcccttaagtctgaaaaacggctttaaaattgagaagttactttaagagatattcgaggtattcggtgacagcagcgcacattatcgactggccaatgggaatattagatttgtagaatagggtaatatgtaaacgtaaacctttcgattgtataaagcattcaattcctaatatggatatgtccgttcaccagcctgtattaactttgcgtgttattacttaaatttatctttctatgtacatgccagaaactgatagaatggcacggttaccgccgatagtcgctgagtatggggtatcttatagtcgagcacattctcgttctcccttgacatcgcatatatcggttgagttgttcgcattttgggatcagtcatcttaaaactctggtcgcataaacatgttttttgtgttagtcgttccatttgacccttgcgtaagtatttatattcaaagtttttacgattttggatcgttaagcataagaaggaccactcgagtacgatttgaccgtttttatacaatttcgtcctcttagacgaataaatattgtgcctgccttgtttctaaaaatgaacttgcttcagcttcgtagagaatgcttagtcataacagatggatttgttgaatttatttttaacagttgataagttatacttttataaaaaaaaaaaaacaacttactcagaatgctatagcacatgactcaattttttgtttttcataagtatttagatcagttttcagttttgcggaggttattttgctactttatttctaattgtgaacacgtaacttggtttaaaaccgtatatacttacagaatagcatacatcatttgaattcagttgcctatcatattaatttcctttgcagaaaatgcggatattgttaattgcagttctttttctgttgatgccaaaatcaaatgccgaaattcccggttgcgacttcttcgacaccgtagatatttcaaaagcgccaagattctcgaacggatcgtacctctacgaaggcttgctgatccccgcccatttgacagctgaatatgactacaagctcctggccgacgattcgaaggagaaggtggcgagccacgtacgaggatgtgcctgccacctcaggccatgcatccggttttgttgcccccagtaccaaaagatgcaaaagagcaagtgctatggcgacatgtcggaggacgagctgaacaagcacgatcccttcgtgaacgtgacgctcagcgacgggtcggtggtcaggagacacttcaaggaggatctgatcgtgcagtcggatctggccaagcccggatgtccccggatgtactttttgaatcacgaactgccgggcaatgaattcactctgtttgaggttactttcctgtgtttctgtcacttctgaagatcgtaaccttttttgaatctctgtagaacggctctcttctgcgtcactgggacaaagtggaactgagcaagcgggagtactgcgtccagcatctttcatttaaggatgatagtatccgaattgcaccccacttctgtccactttcgtctgagcactccagaacgtggaagaccgttggtaagctgaattccctgcttgactttaaggtttttagttaatgtcctttctcacagcgatagtgatatccttgatatgcataatcctaacgatcagcgtgtacctctatgtcgagaagcttcgcaacctgcacggaaagtgtttcatctgctacttggcctctttgttcttgggctatttcttcctggtcctcaacgtgtggaaatactcctccggcttctgcgttacagcaggtttgcttgtggcgattacaagataaaggacgactaatttcacatttcgatatcatgatcagggttcctgggctacttctccgtcatggccgcgttcttttggctttctgtgattggaatccacttgcggattaagtttagtctagcctctaactgtttgcaccgattgctgccagaaaatccgttccgtgcatacaacttatacgcctggggtataccgctaatcatgactgcaatcacctatacagctgaccaggtggttaagaacgagaagttgagaccccgcgtgggcgtcggcaaaaattgttggatctacagtaagttactattcctataattacaattacggtgtaactcgttttgttaaccaacagctggcgatatgactgtcatgatctacttctatggcccgatgctgttgctaatcgctttcaacataataatgtttgtcctttcggcgatttacatatataacataaagaaaaatgtgaaaggccttgtccacaagcaacaaacaaaccaacagataaatgaccaacaaatgtaattatattatattataagataataactataatgtcaaatggcactttttgtaatcttttataggtttgctatattcctgcgacttttcatcttaatgggtttgtcgtggagctttgagatattatcctttttgttaaccaaacagcaagcttgggctagggctttaatggtggctgactactttaattggtcccagggtaccatcatattcgtgctttttattttaaagcctagcattctaaaacttataatagcagggtaagtaaagtattacaaataaccttgaaatttgaccgtctcatacgtatgaacaatcttttgatttaggggacgtcaaaacctcccaggaagtcaccataattcgagatcaaaagcagctcgatataattcaactcatacggcttgtgaaggatcaattgcggatccaaacgcttactgctaaaaaaatggaattcaataagatgcaacgtctctgttattgatcacattattttaattttctatggagcaaaagtttaaaaaaaatatttgttatcaagacaataaataatgtcttggaacatataaagcaaaatatattaaagggtacaaaaaacaggaaaagtatggggcaatacagcaaaatatttttcggatcatcaacttttttgtaagacaaaatgtagaaatatttctggcaccgttgtttcaaaccagggtttgagtcaacaatgctggcccaccactggcaagtaccaaacgattacagaaaactttttctaatcgattaagcatcgggggtcatcgatgtttctccaccactacaatttcatgttgtttttttagtcgcggctgtttgacgtttgtcgctttcctccgttgcgaatataatatattacgtagctcatttttatacaaacggaattacgagcgcaacgacgacagcaacactagtagcactaatcgtaagcgcaggggccaaaaattaaattgcgtttgcggccgcaaagatttgatgacgtcgcatacgccgtcttctagggcgtaaaaagcaaagcaaagcaaacaaacgcgaaagcgaaacgtgtaaacggcgtagaagcgataaacgcgactcaaatacgcagcagataaaatacaatacgcgagaagagaaaagtcacgggaaatattgttcata

SEQ ID NO: 14171 - DNA, 1089 bp, DROSOPHILA
atgcggatattgttaattgcagttctttttctgttgatgccaaaatcaaatgccgaaattcccggttgcgacttcttcgacaccgtagatatttcaaaagcgccaagattctcgaacggatcgtacctctacgaaggcttgctgatccccgcccatttgacagctgaatatgactacaagctcctggccgacgattcgaaggagaaggtggcgagccacgtacgaggatgtgcctgccacctcaggccatgcatccggttttgttgcccccagtaccaaaagatgcaaaagagcaagtgctatggcgacatgtcggaggacgagctgaacaagcacgatcccttcgtgaacgtgacgctcagcgacgggtcggtggtcaggagacacttcaaggaggatctgatcgtgcagtcggatctggccaagcccggatgtccccggatgtactttttgaatcacgaactgccgggcaatgaattcactctgtttgagaacggctctcttctgcgtcactgggacaaagtggaactgagcaagcgggagtactgcgtccagcatctttcatttaaggatgatagtatccgaattgcaccccacttctgtccactttcgtctgagcactccagaacgtggaagaccgttgcgatagtgatatccttgatatgcataatcctaacgatcagcgtgtacctctatgtcgagaagcttcgcaacctgcacggaaagtgtttcatctgctacttggcctctttgttcttgggctatttcttcctggtcctcaacgtgtggaaatactcctccggcttctgcgttacagcagggttcctgggctacttctccgtcatggccgcgttcttttggctttctgtgattggaatccacttgcggattaagtttagtctagcctctaactgtttgcaccgattgctgccagaaaatccgttccgtgcatacaacttatacgcctggggtataccgctaatcatgactgcaatcacctatacagctgaccaggtggttaagaacgagaagttgagaccccgcgtgggcgtcggcaaaaattgttggatctacacaagcttgggctag

SEQ ID NO: 14172 - protein, 362 aa, DROSOPHILA
MRILLIAVLFLLMPKSNAEIPGCDFFDTVDISKAPRFSNGSYLYEGLLIPAHLTAEYDYKLLADDSKEKVASHVRGCACHLRPCIRFCCPQYQKMQKSKCYGDMSEDELNKHDPFVNVTLSDGSVVRRHFKEDLIVQSDLAKPGCPRMYFLNHELPGNEFTLFENGSLLRHWDKVELSKREYCVQHLSFKDDSIRIAPHFCPLSSEHSRTWKTVAIVISLICIILTISVYLYVEKLRNLHGKCFICYLASLFLGYFFLVLNVWKYSSGFCVTAGFLGYFSVMAAFFWLSVIGIHLRIKFSLASNCLHRLLPENPFRAYNLYAWGIPLIMTAITYTADQVVKNEKLRPRVGVGKNCWIYTSLG

SEQ ID NO: 14173 - DNA, 3135 bp, DROSOPHILA
atgtgtaatttaccctataactgtcaattaaaatgcagtctatatccaatgcatgaatatgaatatgcaaagaattttatggattaatgtcctacgtatatattcacctgaaaatcactatactctattttaaacatgaaatcttaaaaattcatctggcttaaatcggattcagttttataagatagaattagaattgtaaaaatggtataagctgcatgcatcccagcgagttctatagcgagtgcctactgtagcaactaagtgatcggcggcttttgttgccggttacaaaccgctgaagccggctgcgcagtcgacgtcgccgcttacacattcatgctggccaaatgcgttgaagcccgtaaatagcagcggcatcttcttcccgttcccgttccaattcgaataccgctcgacccgcacccccaccacgtcccccgtctaacaatcctttgcagcggttgctcggcgaccgttggcgctgttgttgttgctgtcggaatttgttagagcgttgagcgaattttgttttcagtagttgtgcagcgacgagccagtgatgttgtgtttggtggttgaagttgatccaattctcaagttatccgacttttcctgagttgaccaccagaagacaccgtcttgggcggccagagcagattgccgaatcggggggatacagatacggatatagtggtcggagatcgcaccgcctcctggctgttattctcgcgttaattatacgatggtaggttgtctcccggttccgtaacagctaattaagtgccttgttgttccgtaattgcacgatttgttttcattttgcgatcgtcgccatggaaacccgcctcaaaaactatacaacacttttttgttagagcagaacttttttcagcactacttcgaaagttttaggcgcgtaattatcggtattcgaaaaaaaaaaccaaattggtggttcggaaaacaaagaaacataataagctttttgtagcacacaatggaaaaaagagttcttaatttttaagtgaacatggcaaatttttttaccaataaacatttttatttcattcaaccttgttgtcgtttcttttggcgagcccttatctcaattccaacaatatgtttgtaaagttcacctgttgataagctttttgcattctatcactaagagaacgttttaattgcaagttttttttttacaactttacatcgtctttattgataacaacattgataataacaaaacatgtgtgtttacaagcatatgttgcatttataaaaacacatatatttattaacaattttacaagtttataaactaccaaatgtagattgttattcaaaatttcaaagatagaccagaggatactaccgagtctagactaatactggtaatcaggtgctagaataacacaccttcaaaaaactaagtagaaaaaacaacaacttaatagcttacaaattttagggtctgctatcgctgttgcgtaaactgagacccaatccggaaaaggaggctcgcatcctgctcctaggattggataatgctggcaagaccacgatactgaagcagctggcatcggaggacataaccacggtgcgtataaaggcggcgaacttcttccgttttccccataaaatacggagtgaaatcccgcaggtaacgcccacggcaggatttaacatcaagtccgtggcagccgatggtttcaaactgaatgtatgggatattggtggtcaatggaagatacgtccatattggaagaactattttgcgaatactgatgtgctggtaggattgttatagatctaaactcaattctgttagctaatagtttcgattatttcagatctatgtaattgactgtacagatcggactcgcctgcccgaggcgggtagtgaactattcgaaatgctcatggacaatcggttgaagcaagttcccgtgctgattttcgctaacaaacaggatatgccggatgccatgagtgccgccgaggtggccgagaagatgagcttggtgcaactgcagggacgaacctgggagatcaaggcctgtaccgctgtggatggcactggactaaaggagggaatggactgggtctgcaagaatatgaagaagtaatctaaattatagtaatcgtcgcctgttaagttgtccctaagaactaaatatacgtacctacatttcaactcaccaaaagtatcacaatctctaattgttggatgaatcttccttttttcacgtgtatctttaagtataaactgaatatatagttgagaaggctatgctagttaaatcattcatttttacctgacatctaaactgaaatcaaatttcgatccccatgtgtttttacggacctgtttcgttcataaaaaagatcctgcccgcaggctctcagaaatcatgtctgctcattttaggattagacaatgcgggaaaatccacgttgacagaccgcctggcggaaattttcaatggagaagtaaggccatatatgtgatggtcctatctccatttgataatgttagcataaactatttgcagtccaaggaatctaacaatcaagttagtgaatggagcttcaccataaataatttcagagtccagttgtgggatattaacggagaactgaagaatcgccagatctggccaaagtattataagaaagtgaatgttttggtgagaggagaacttatatagaacttatatagactcgactacaatccctgaaccgtagatttttgtactggatagcacggatgcactgcggctaagcgaggcgcgatgtgttttatgcgatgttttgatgcaccaggaactggataatgctccgctgctgatcgtgtccaacaagaaggacgcctcgggatccctgtccatgtccacggttatcgatttgatgggcctatatcgcctaactggtcgagattggacttttgaggaatgttccatgcggacagggtctggtgttcaggtatatgttgtgttctatattcgaaatctgataatttaacttatactatctgggtaggagatcgtaaattggattaacgaaaagatcaacaataacaggaagtgatttatcacatttttatattttcaaaaatttggcaacctattaact

SEQ ID NO: 14174 - DNA, 618 bp, DROSOPHILA
atggaaaaaagaggtctgctatcgctgttgcgtaaactgagacccaatccggaaaaggaggctcgcatcctgctcctaggattggataatgctggcaagaccacgatactgaagcagctggcatcggaggacataaccacggtgcgtataaaggcggcgaacttcttccgttttccccataaaatacggagtgaaatcccgcaggtaacgcccacggcaggatttaacatcaagtccgtggcagccgatggtttcaaactgaatgtatgggatattggtggtcaatggaagatacgtccatattggaagaactattttgcgaatactgatgtgctgatctatgtaattgactgtacagatcggactcgcctgcccgaggcgggtagtgaactattcgaaatgctcatggacaatcggttgaagcaagttcccgtgctgattttcgctaacaaacaggatatgccggatgccatgagtgccgccgaggtggccgagaagatgagcttggtgcaactgcagggacgaacctgggagatcaaggcctgtaccgctgtggatggcactggactaaaggagggaatggactgggtctgcaagaatatgaagaagtaatctaaa

SEQ ID NO: 14175 - protein, 203 aa, DROSOPHILA
MEKRGLLSLLRKLRPNPEKEARILLLGLDNAGKTTILKQLASEDITTVRIKAANFFRFPHKIRSEIPQVTPTAGFNIKSVAADGFKLNVWDIGGQWKIRPYWKNYFANTDVLIYVIDCTDRTRLPEAGSELFEMLMDNRLKQVPVLIFANKQDMPDAMSAAEVAEKMSLVQLQGRTWEIKACTAVDGTGLKEGMDWVCKNMKK

SEQ ID NO: 14176 - DNA, 5467 bp, DROSOPHILA
accagcatccagtgattgtatttatagcccaattgaagcgttagattacgattcacggagggatagaccgtttttagattggcattcgcctcgatgaccggctgaagatttgagcccaagtgcagggatgtcagcagcgcaaagtaaccaatgtctcgtattttgggtatgaacatggttctcgaatttggagttcaaaatgaaaaaattttaagtcgttttttaaattttgtatctaattttgtgtgacctcaatgtgctctgacattcccagtctgattgcttaaaaaacgttatattataaacattttttgatttttattttaaattatacgtaattaaaattacgtaattaaacaattaggtaaataataaaagattttatcgttgtttgttataaattaatttattaaattgaaaggcagcgtgctgaaactacttaactgcatcaacttattttagcgacataaattatttgaaattcccgccagctggtacagtttgagagcaactattagctgtgctaaaacccctgcatttaagtgcttgacaatcttgccttattccaacctattggaaatataaatttcatattaaaacaatcaacggtacgatgtacatatttttttattgtaaaacaatatattgttaagatttcaaaaggaattaattttttatttttagttcaattggttggagtgcttggtaaatagttagcacagatagcaaccttggtgtgagccttcgctaatatttcgacataagatttaaatacagaaaataatatttaattctaacaattataccttatttctgtgtgaaattatgaaaaatgtaaacatttctctgaatacaaatgacatttcgttactgtaggttttgttctgtgtaaataggtttaatattcacggataattcgtttgtagtatattttagtatataattattcgcgtatgatggattttttggccggcaataaaaaagtgtaaattgtagcaaggcaaccgaatcgtttcaaaattttgtccaaaaagtggaaatttacgcgaaatggagcgcgaaatagcgcacagtttagctggcggcgaggaacgaagtagcgatgtggcacctggacaggttaagaccttcgaggaactgcgtctataccgaaatctgttgaacggattgaagcgcaacaatttcgtgacgccaacgaagattcaggcagctgccatacccatggcactggccaaaatgggtaaatatcttgcatgcaacagaagattatcaataatagttgctatattaatctgcagatctaataatacaatcgaagagtggaactggcaaaactctaatctatgttatagccgtcgttcagagctttaatcccaacataaaccaaccgcatgccatgatcgtggtcccaactcgagagctggccattcaggtgcaggacacatttttccatctctgcaaatcgtttcgggactttaaatgctctgctttcatcggtggcaccgatgtggccaaggatcgcaagcgaatgaatgaaagtcgagtcattatcggtacaccgggacgtttgctgcatctgtatgagaatagagtattcgatgtgtccaaactgcgactgctggtgctcgacgaggccgatcaactttatcagacaaagagcctgcagcatacggtcagtaaactcattgaggcaatgcccaagaatcggcaaataattgcctgcagtgccacatacgatcagaatttggatgagcgtctggccaaggtcatggacaaacccatgcttatatcgaattccgaaagggctaccgttctactgggcattcggcagtttgtctacgaattgccacagcagaataacagtgtggaggagatgcgtcttaaactgcagattcttggccagatctttaatcagctgccttacgaacaggccatcatctttgctagctcacaaatgcgagcggattcttacaagaactatcttacagccagtggtatcgattgtcatttaatttcgggagccatggaacaatcggagcgtttgcatgttttcgagggctatagaaactttactatgcgcatcctggtggccactgatttgatggcacgcggagtggactccccgcatgccaacctggttatcaacattgatccaccacaggatcatgtcacctatttgcaccgcattggacgagctggtcggtttggctccaaaggcatagccatcacgtttattgcctccaagaaggagagccagagatttagggaaatgtcaaaaaaaatcgctacggcttggtcggttctggagtttcccaaggagccaatgcccaatgaattcaatttttgggatttcgaaaagtacaactttgattattacattaaggaagagaatccgctacaggaaatgcctatgcctattaaagaaaatagaagtaaagaaaatgttgatgcttcttcagttgacttggaaaatcttcaaaaggatcaggatggcaaaaggagagatccagacaaactaccagtggccttagaaaatgttgaaacccaaaaagagttggagctcgaaaacttaccagaaagttcacataataataagaatcttagggtcaaagagaaagaaattgtaaggcaaggaaagcttaaagaaactaattccaaagctggaggttctaaaacgaacaagacggagagaaggaaaaaatctaacactccatcaaagttacagaaacaaataactgaagtgcagcaaacaccagagatcaccgtaaataaatactatatgcaagaagacatacaacgaacagcagacggcaaagagtatcatcctgttaatggagcgggaaaccaccaggttccgtcaaaatctaatcaaaaaccggtggagtttatatctcccgaattgacaccaaccctaacaccattggaactgacccaggagccgtctccaaccacagtgacaccacctgcaccgccagccaactcgattaacaacaaaacctattgcctagctgctccaacgcaaaccagttcgatgaccatacagaacatggtaatatcgaacacggtggacgatgccagtagcatcagttcggatagcatggtggtatgtggctatcatagcgataggtcctacgacacatactatgcaaccagtgatgaggaggagatctggaatagattaatgtcgaaacaaaggcgtcagctgaagagcaagagaggccatggaaaacggcgtgtgatactatacaagaaagtatttcctaaactaaaggcgaatgttaaacgcaagcttaaaaaacggatgagctcgtcatgcagatccaaaaaagcacaccatttgcgaaaacgtcatgtatacaaaaatatatcacttttgccacacatgaatttgtgtcatctgcttcaaaaatttacaaatcaagagagatttttgaaacggctccacaaatatgcaaagaatcaattcattgacaatgcgagggttggctttttgctggataagctctataaatccatcctggaaatgtactataacagtgctaaggagaggaagaagcattttaaggaagctatgaaggagtccctaaaatccattgataactacgagagccaagagtcttcggaatcagaggaggaggaggaggaggagaaggatctaaagaacaagttaagtgttcatgtgacgaatcagatggacataccaccaatgccacaggccgctgttgaaattggttcaggaagtgaatcggatacggaggactcgcaggaatacggcgaaggcgaagagatcattgtggacgatgaggacgatggcagcgatggcgggccaaattcatcgagtggttttgtagagagtcaggagagtgtttcgtctggaatagacacttccgtttacgaaacggaatctacgggcgcatctggaaataattcaagtgcattctttatttcggatgatgaatcagatactgaatccttaacagattcggaagctggaagcaatgtcagcgcgacaggatcaagctcacagcgatcttcagtagcgagcagcacctatgaatcttcggatgatgattctgtaactgtaaccaatgtcagttcaatgcagaacgctcaatcattgtggttgcagactttcaacatgcagtaccaattcattgcatcccatgtggccaagaatctacagaactattactaagtggttatgaatgaaaaactagtgaaaactcaggcattaaaattaaactcaactaatcacttcattcggaaacaaaacggatcagttccaagagaggctgtatcagtctctttccttacaattgtatatcgtagccagttaaaccgttttcttaattagaatactcaatgtcgaaatagttgatagcatgttggataccatgaatgtttttttatgcaagcaataaattgcagaatttgttaccaaaaaaataaatgaattaaagcaggaaactaactattttgaatttattaaacaataagttcattgctcaacttctttgatttcaaaattgattgtttttcatgtttattcgctacataatcgcatcaaacaaattaatccacaatgtgaaagttaaatccctttaatcactcgcaatgatttatctaagagatgggaaaacaaacatttttcttggtttcggcaagccggatggatgaaggtaaagaagcggcgccaaccgactgccgggacataaatcatatagtcagtgggatcgggatcggcatcgaccatcgaccatcgggcaacgggcatcagctgtgtggcagacaacattgttgcacgggcgccgctcactttgcaactgactgcagaggtgttaacccattaattagctgttgtcaaaagtcgttcactcgattttgaaagccactcgaaaatcagaatggattgtacaaaaatatgacatatatttatgttttatttatttatttaatgcattttgtgaattatttgtgcaacgaatgccatgtttgtcagcaaataaatgagttctactattttctttttatactccactgctgtatttaatttttaaaatacttcgattcataaataatttatttttaaattgattaaatgcagttaaaatttttaagtttccttttacgagttttgtgtccccatttgcgagtgcttcgcaatgggttaagcgaatgagacggtccacaggcggcatgccgcgtcggtggcatagtcaaaacattcgccctgcggtcgagcacgcaaaaagccggcatctggatggtactgctcattggtcgtcgatctgcagtgccccaagtgcccctcttttggagtgcaacacccctcccccccctgcgttgcaagtccaataaggagcgtgagaaaacgcaaattcaaagcgagctggaagcgacaacattttatagatcctagagacatggatagcgttgcattttgtcgctgccgcagtggcagcaaact

SEQ ID NO: 14177 - DNA, 3409 bp, DROSOPHILA
gcaaccgaatcgtttcaaaattttgtccaaaaagtggaaatttacgcgaaatggagcgcgaaatagcgcacagtttagctggcggcgaggaacgaagtagcgatgtggcacctggacaggttaagaccttcgaggaactgcgtctataccgaaatctgttgaacggattgaagcgcaacaatttcgtgacgccaacgaagattcaggcagctgccatacccatggcactggccaaaatggatctaataatacaatcgaagagtggaactggcaaaactctaatctatgttatagccgtcgttcagagctttaatcccaacataaaccaaccgcatgccatgatcgtggtcccaactcgagagctggccattcaggtgcaggacacatttttccatctctgcaaatcgtttcgggactttaaatgctctgctttcatcggtggcaccgatgtggccaaggatcgcaagcgaatgaatgaaagtcgagtcattatcggtacaccgggacgtttgctgcatctgtatgagaatagagtattcgatgtgtccaaactgcgactgctggtgctcgacgaggccgatcaactttatcagacaaagagcctgcagcatacggtcagtaaactcattgaggcaatgcccaagaatcggcaaataattgcctgcagtgccacatacgatcagaatttggatgagcgtctggccaaggtcatggacaaacccatgcttatatcgaattccgaaagggctaccgttctactgggcattcggcagtttgtctacgaattgccacagcagaataacagtgtggaggagatgcgtcttaaactgcagattcttggccagatctttaatcagctgccttacgaacaggccatcatctttgctagctcacaaatgcgagcggattcttacaagaactatcttacagccagtggtatcgattgtcatttaatttcgggagccatggaacaatcggagcgtttgcatgttttcgagggctatagaaactttactatgcgcatcctggtggccactgatttgatggcacgcggagtggactccccgcatgccaacctggttatcaacattgatccaccacaggatcatgtcacctatttgcaccgcattggacgagctggtcggtttggctccaaaggcatagccatcacgtttattgcctccaagaaggagagccagagatttagggaaatgtcaaaaaaaatcgctacggcttggtcggttctggagtttcccaaggagccaatgcccaatgaattcaatttttgggatttcgaaaagtacaactttgattattacattaaggaagagaatccgctacaggaaatgcctatgcctattaaagaaaatagaagtaaagaaaatgttgatgcttcttcagttgacttggaaaatcttcaaaaggatcaggatggcaaaaggagagatccagacaaactaccagtggccttagaaaatgttgaaacccaaaaagagttggagctcgaaaacttaccagaaagttcacataataataagaatcttagggtcaaagagaaagaaattgtaaggcaaggaaagcttaaagaaactaattccaaagctggaggttctaaaacgaacaagacggagagaaggaaaaaatctaacactccatcaaagttacagaaacaaataactgaagtgcagcaaacaccagagatcaccgtaaataaatactatatgcaagaagacatacaacgaacagcagacggcaaagagtatcatcctgttaatggagcgggaaaccaccaggttccgtcaaaatctaatcaaaaaccggtggagtttatatctcccgaattgacaccaaccctaacaccattggaactgacccaggagccgtctccaaccacagtgacaccacctgcaccgccagccaactcgattaacaacaaaacctattgcctagctgctccaacgcaaaccagttcgatgaccatacagaacatggtaatatcgaacacggtggacgatgccagtagcatcagttcggatagcatggtggtatgtggctatcatagcgataggtcctacgacacatactatgcaaccagtgatgaggaggagatctggaatagattaatgtcgaaacaaaggcgtcagctgaagagcaagagaggccatggaaaacggcgtgtgatactatacaagaaagtatttcctaaactaaaggcgaatgttaaacgcaagcttaaaaaacggatgagctcgtcatgcagatccaaaaaagcacaccatttgcgaaaacgtcatgtatacaaaaatatatcacttttgccacacatgaatttgtgtcatctgcttcaaaaatttacaaatcaagagagatttttgaaacggctccacaaatatgcaaagaatcaattcattgacaatgcgagggttggctttttgctggataagctctataaatccatcctggaaatgtactataacagtgctaaggagaggaagaagcattttaaggaagctatgaaggagtccctaaaatccattgataactacgagagccaagagtcttcggaatcagaggaggaggaggaggaggagaaggatctaaagaacaagttaagtgttcatgtgacgaatcagatggacataccaccaatgccacaggccgctgttgaaattggttcaggaagtgaatcggatacggaggactcgcaggaatacggcgaaggcgaagagatcattgtggacgatgaggacgatggcagcgatggcgggccaaattcatcgagtggttttgtagagagtcaggagagtgtttcgtctggaatagacacttccgtttacgaaacggaatctacgggcgcatctggaaataattcaagtgcattctttatttcggatgatgaatcagatactgaatccttaacagattcggaagctggaagcaatgtcagcgcgacaggatcaagctcacagcgatcttcagtagcgagcagcacctatgaatcttcggatgatgattctgtaactgtaaccaatgtcagttcaatgcagaacgctcaatcattgtggttgcagactttcaacatgcagtaccaattcattgcatcccatgtggccaagaatctacagaactattactaagtggttatgaatgaaaaactagtgaaaactcaggcattaaaattaaactcaactaatcacttcattcggaaacaaaacggatcagttccaagagaggctgtatcagtctctttccttacaattgtatatcgtagccagttaaaccgttttcttaattagaatactcaatgtcgaaatagttgatagcatgttggataccatgaatgtttttttatgcaagcaataaattgcagaatttgttaccaaaaaaataaatgaattaaagcaggaaa

SEQ ID NO: 14178 - protein, 1028 aa, DROSOPHILA
MEREIAHSLAGGEERSSDVAPGQVKTFEELRLYRNLLNGLKRNNFVTPTKIQAAAIPMALAKMDLIIQSKSGTGKTLIYVIAVVQSFNPNINQPHAMIVVPTRELAIQVQDTFFHLCKSFRDFKCSAFIGGTDVAKDRKRMNESRVIIGTPGRLLHLYENRVFDVSKLRLLVLDEADQLYQTKSLQHTVSKLIEAMPKNRQIIACSATYDQNLDERLAKVMDKPMLISNSERATVLLGIRQFVYELPQQNNSVEEMRLKLQILGQIFNQLPYEQAIIFASSQMRADSYKNYLTASGIDCHLISGAMEQSERLHVFEGYRNFTMRILVATDLMARGVDSPHANLVINIDPPQDHVTYLHRIGRAGRFGSKGIAITFIASKKESQRFREMSKKIATAWSVLEFPKEPMPNEFNFWDFEKYNFDYYIKEENPLQEMPMPIKENRSKENVDASSVDLENLQKDQDGKRRDPDKLPVALENVETQKELELENLPESSHNNKNLRVKEKEIVRQGKLKETNSKAGGSKTNKTERRKKSNTPSKLQKQITEVQQTPEITVNKYYMQEDIQRTADGKEYHPVNGAGNHQVPSKSNQKPVEFISPELTPTLTPLELTQEPSPTTVTPPAPPANSINNKTYCLAAPTQTSSMTIQNMVISNTVDDASSISSDSMVVCGYHSDRSYDTYYATSDEEEIWNRLMSKQRRQLKSKRGHGKRRVILYKKVFPKLKANVKRKLKKRMSSSCRSKKAHHLRKRHVYKNISLLPHMNLCHLLQKFTNQERFLKRLHKYAKNQFIDNARVGFLLDKLYKSILEMYYNSAKERKKHFKEAMKESLKSIDNYESQESSESEEEEEEEKDLKNKLSVHVTNQMDIPPMPQAAVEIGSGSESDTEDSQEYGEGEEIIVDDEDDGSDGGPNSSSGFVESQESVSSGIDTSVYETESTGASGNNSSAFFISDDESDTESLTDSEAGSNVSATGSSSQRSSVASSTYESSDDDSVTVTNVSSMQNAQSLWLQTFNMQYQFIASHVAKNLQNYY

SEQ ID NO: 14179 - DNA, 3150 bp, DROSOPHILA
aaagcgggaagacgattaggtaaacagaattcgacgcaaatcggttggaaaaacggcctcaagattggcaagatacgcaagagcaagaaaatgagctacaacgagaaatcggaggccatcatcaaggaggagtggctgcagcgcctggagcagtttcccttcaagcaggcggacatgaatcgcctgatcatgaactacttggtcacaggtgagtccgggtcaccagcccgcagccacagcaagcagctaatcaagggctaatccacagagggcttcaaggaggccgccgagaagttccagcacgaggcggatctggagcccagcgtggagctgagcagcctcgatgggcgcatactcatccgcgaagccgtgcaggcgggccgcatcgaggaggccacccagctggtgaaccagctgcatcctgagctgctcggcagcgatcgctatctgttcttccacctgcagcagctgcagctcatcgagctgatacgcgccggcaaggtggaggaggccctgtcctttgcccaaagcaagctgtccgagtccggcgaggaggccatgtttgagctggagcgcaccctggccctgctcgccttcgagaagccgcaggagagccccttcgccgacctgctggagcagtcgtaccgccagaagatcgctagcgagctcaactcggccatcctgcgctgcgagcagagcgaggactccacgcccaaaatgatgttcctgctcaagctgatcttgtgggcccagtccaagctggacagccgctccattagctatcccaagatgaagaacctagagacggcgcacctggagcccaagtagaagggcagcgccacccccttcgacttcttttgctaatgctattgctaatatatctccatttaataagtatgtatatgtatgtatgctggatgtaggcagtgaattattaaataagtagccggaaactccatcactccatctatccatccatccgacttgccatcagcccttcttaccagccgaatatcaggtccatggccttgtccatcagaccggagctcttttgcggcacatccttctgcggcgatatgatgttatctttgcgggccagcttgtacgactgctgggaaaacggtcgaatcgcactggggctggtggggggatctcctatctctgcattgggcacagagccgatgttctccttatcgatcaccgacctatccgtgcagcgcgacacgcccaccatcacattgccggcgatgattttttcgttgtagttcagcgccttgtcgctctcgatgcgcgaggagtagcgcacatacatccagttgccgttctgcggggcatgcaccacgtccacaatggtgccgcagacggtgaagtgctgcagcaccatggagccggcccccggcgggaacccgaagatggtaacccaaaagtcggataggcgcgagttgccgcccgtcgtcacggatgtgcccaggcctccagctggcgaggcagtggctccaagtggcgagcacagtgctcgcatcgaggcattgatggcattgggcgccccgggtgcgaacgagtcattcgtgtgatagctgctctggtagctctggttcggtgactgcaactgcagcatgccaagatggttcttcttcttcggggtgacggactgttcgcgcagcgagtcgaagagtccctgggtgggcggtcccgtctggtggtggctgtgcgtctggccgtgcgcggtcgttgagctgttggcgcccacagccgtgtgggcgcctccttgggcggcgaacagagtgcgtgtgctcagagcggagcggttgagctcgtgcggactgctgccgccgggcgaggtggctgcggggcatgtgttcatatagccaatgcgtacgagctgcttgatgccggctacttaccgaaacttatattagagcgcccggttttcggggacagcgtgttcttgtgcggcgttataccttgcggatcgccgagcagaaaaggtggcagatactgggtctggttggagccaggactgttgaccgggctgcccagattcattggctccatatcgaatgcgaatattaattataataattataacggcgaaaaacgaaaaagcgttgcattaacaaggacgccacagctgtaatcggttagtgcgaccaggctgggctggggtcgaaatgctagaggtggatgccaacatcgatgtcatcgatgttttcgaaaaatcacaaacatcgatgtttttcaaagaatcatcgatgtttttccatctttactgcgcatcgtaggttaaaagtgtttaaattgtgagtataaattaaatttccaaattttccaatttccatttattaatagcatattgcaaattttcagtgacttgctggtggtcttggctggcgtcgtggaagacgacacgtatatttatgcatgtatgcatgcgtgcacctgctcgtatgcatactggcttacttttctattgaattacttttctattgaattgcattaattagtatatttgatttataggagcaattattggaccaggggcggataaaaacgtagacggcaataagcttgtcatgtttagttatagtactgcctttttatttaagcaattataaaaaaataataatctttaagttaagcagttaatttttttgtttttattgaaaacatcgatgtccgccaacatcgatttctccacctctactaaatacgccgttcttcgcagtcgcgccgcgcaacttgcacttttgcagctccccgactggcagtgggcacatttcgtttcccccaaacggtcactctagcggccacctttcaaacaacaacatcacgcgtcgcgtctccgtctttttcctttttttttttacattagactacactacgttctcctggcgtttcgttcgtgtcgcgcgtgattaaattggcaactgagaacaataagaagaaatcacagtgtgcgagcagcaacaaacacaacgattagtgtaaacaaaacacatcgacaacaacaatccaaattacaatataggcaaagaagaagaaacgaaaggcaggaccttcgcagcaagagcgagacagcaaaggatcgggatcgggagagagcgtgagagtgcgacttgatcaacgggatacagggtgacatgtggagtc

SEQ ID NO: 14180 - DNA, 1091 bp, DROSOPHILA
tcgcactaaccgattacagctgtggcgtccttgttaatgcaacgctttttcgtttttcgccgttataattattataattaatattcgcattcgatatggagccaatgaatctgggcagcccggtcaacagtcctggctccaaccagacccagtatctgccaccttttctgctcggcgatccgcaaggtataacgccgcacaagaacacgctgtccccgaaaaccgggcgctctaatataagtttcgccacctcgcccggcggcagcagtccgcacgagctcaaccgctccgctctgagcacacgcactctgttcgccgcccaaggaggcgcccacacggctgtgggcgccaacagctcaacgaccgcgcacggccagacgcacagccaccaccagacgggaccgcccacccagggactcttcgactcgctgcgcgaacagtccgtcaccccgaagaagaagaaccatcttggcatgctgcagttgcagtcaccgaaccagagctaccagagcagctatcacacgaatgactcgttcgcacccggggcgcccaatgccatcaatgcctcgatgcgagcactgtgctcgccacttggagccactgcctcgccagctggaggcctgggcacatccgtgacgacgggcggcaactcgcgcctatccgacttttgggttaccatcttcgggttcccgccgggggccggctccatggtgctgcagcacttcaccgtctgcggcaccattgtggacgtggtgcatgccccgcagaacggcaactggatgtatgtgcgctactcctcgcgcatcgagagcgacaaggcgctgaactacaacgaaaaaatcatcgccggcaatgtgatggtgggcgtgtcgcgctgcacggataggtcggtgatcgataaggagaacatcggctctgtgcccaatgcagagataggagatccccccaccagccccagtgcgattcgaccgttttcccagcagtcgtacaagctggcccgcaaagataacatcatatcgccgcagaaggatgtgccgcaaaagagctccggtctgatggacaaggccatggacctgatattcggctggtaa

SEQ ID NO: 14181 - protein, 331 aa, DROSOPHILA
MEPMNLGSPVNSPGSNQTQYLPPFLLGDPQGITPHKNTLSPKTGRSNISFATSPGGSSPHELNRSALSTRTLFAAQGGAHTAVGANSSTTAHGQTHSHHQTGPPTQGLFDSLREQSVTPKKKNHLGMLQLQSPNQSYQSSYHTNDSFAPGAPNAINASMRALCSPLGATASPAGGLGTSVTTGGNSRLSDFWVTIFGFPPGAGSMVLQHFTVCGTIVDVVHAPQNGNWMYVRYSSRIESDKALNYNEKIIAGNVMVGVSRCTDRSVIDKENIGSVPNAEIGDPPTSPSAIRPFSQQSYKLARKDNIISPQKDVPQKSSGLMDKAMDLIFGW

SEQ ID NO: 14182 - DNA, 3723 bp, DROSOPHILA
gcctctgatgatcacaccatctgcttgtgggacatcaatgccacacccaaggagcatagggttattgatgccaagaacatcttcaccggccacaccgccgttgttgaggacgtggcttggcatctgctacatgagtctctgttcggatcggtggctgacgaccagaagctgatgatctgggacacgcgcaacaacaacacctcgaagccctcgcatacagtggacgctcacacagcggaagtcaattgcttgagctttaatccctactcggagttcattctggccacgggctccgctgacaagactgtagctctatgggatctgcgcaacctcaagctaaaactacattccttcgagtcgcacaaggacgagatcttccaagtgcagtggtcgccgcataacgagactattctcgcctcctccggcactgaccgccgcctacacgtctgggatttgtccaaaatcggcgaggagcagagtacggaggatgctgaggacggaccacccgagctgctcttcatccatggcggtcacactgccaagattagcgatttctcgtggaaccccaatgagccatggatcatttgctccgtgtccgaggacaatattatgcaggtctggcagatggccgagaatgtttacaacgacgaggagccagagattcccgcctccgagttagaaaccaataccgcttaaagcatctgttccgcctcctataatacacaccaaactacaactgaatccgataatgttttggccgtgccccgtgtccagctatccagcctaaatggcaatgggtactcattttaatttatatatatttacatatttttaaaaacaaaatttaattaagctctcatttgtcagcagattgtacaatctatgaatttttaattaaaaatgattaaaaagtcaagaaatgaggttaatttttttgaaattaaataccaacttagatcttcaagcgtattttatttaattctattcaaaaagaagcacattaaaccacattgtatttgtgtttcttgccaaagacttctatgtccacactaagtcctctgacatcctctttatgtcttcttgacgtgattttcccacaaatgacgtctccttccttcacaacctgcgggttctcgatgaagaaaaccgtttgcttccaatgggtgggcgtcgcagatggtgatgtgctgaacatgacgggggagggtagttcaaacaatgtttcaaagtaaccgacaaaggcggataatcgtcccggcttcgtgacctttaagctaaactggtgagtaaagtttggatagttcatatcgacggtcattatgtcgaagttagctatctgttcgggttccgtcagcatgaactctgcatccaccacctgcatgagtggctcctctattgattgctttcgcagatcgctcatgtcgacctcgtaaacgttagaccagaattccacttcatcggcataaagcgtgtcgtctccatagcccaagagactgagtgtacagcgactgggcagtattatgccattggggttgaggtgattctcgcgggcgtagataatgctgtccagcattgattcgtacaaaagaaaatagcccatccattcggatattataatgtcgtatttagtctctgggagatctgtgtcctccagccgtcccttgatcagttcaacattctcaaccttgttcttcctgatgatatccatggcggtgtacacaatgtccgagttatctatgccgacaacgcgagctgcacccgctttggaggcgaagatggataggattcccgtgccgcatcccacatccaacactgtcttgccccgaacaacggcctcgttttggagcaaagacgcgcgataggtgctggtccgcaccttgtcgctgagcatttcatggtgaatgccaaagtgggcgtagcttttgaagtattcgttgtcgagacaaacgttgttacgcggtacgctctggtcggaacctttgggctcgccgtcagcatgtaccttttgcagcagcgccttgtagtcgttgcgcatgcgttccatgtcctcgttggcctgctgcagcaattgcgactgctcagcaatccgctgttgtagctccagaaccgagggctgcgtcggagcgccgtctgttttaaggacttcgtagtcatagcagagccagggctcatactccccgggctggaggtacttctcatcctgccaaagcggatgttccgcagacaataactgctcggcactgatctttttggctcttatgtagtttatcagtttgataaaggaatactggtccatttcgaatttacgctgaagctgggacagattcactttatgccgggcgtcaagatggtcaatggccaccgagatgtttgcagatgtttcggtgcaaaacagacaagtggttagctcatcgccttcgtccattggctcatcatcgtcatctatgtcatcgtactcatcttcgtcggagctggaattggccggcacctcaggtgcctccttcacgggctcctcctctgtggtgttgtctacattgggatgggattaataagtaatcatctccaggaaataaaagcttttacgggctcgaaccgttgacctcggtgtctttcatgctatctttgtttgcaagtcctattggcctgctttcagagaaaagaattcaaatcgcacgacgaagatcacaaatttataaatgccaactaaatggggttttgagcggcgcgaacacgtgcggaaatttggaaacgaaaatagcttaacgcgttttggtatacttgaaatgttgctttagagggtatcgcaggggatatatgttatagaataactttcgacgacattgtaaaagtgaaattatgtttacgctgatattttaacaaattaattttctgcttggaagaagtaggcttaaagaaaaaaatttacatttcatttttattacagggtaggtaagtaactatagactcacagaaacatttacactacgtatgtagtatttttcagtattttcgaaaaggcgttataagcagtattgcggctgccgcacttgcataattctaggtgtaaatacagtttttaatatgttacaggtatttagatcccatatatcaatgaaaatgcatatgaaacatctagatttatattcccaggctataaagacgctccgctggacacagccaatgcgggctctgtccacggtaaacaccagttccggcgtacaaggcaatctttcacctgcggcacctgctccggaaccggataaactctacagcaagctggagattgagctgcggggtattgatccggcagttctgaagagctacacctggtttgctactactgctgccgagcatttgggcattgaaaagggaaaatggtaagaggtaaaaatcctccggtaaaggaaatctctaacatacatatgtgttcgttaatcctcatgcagttggtcacctcgcaaggcgcaccacgagcggatgacgctcctgaagtcggtgcatatctacaagaaacatcgcgtacagtacgaggtgcgaacccacttccgctatatgaacttccacaagttgacgggctccacgctagatacatttctagagtatattgaacgtaatctgcccgagggcgtagcgctgcaggcttccaggactgagctgcaggagatcccagagcacttgcgccagccgccggagcaagtttagccgaagccaatactacagtag

SEQ ID NO: 14183 - DNA, 1659 bp, DROSOPHILA
ccgctcaaaaccccatttagttggcatttataaatttgtgatcttcgtcgtgcgatttgaattcttttctctgaaagcaggccaataggacttgcaaacaaagatagcatgaaagacaccgaggtcaacgacaacaccacagaggaggagcccgtgaaggaggcacctgaggtgccggccaattccagctccgacgaagatgagtacgatgacatagatgacgatgatgagccaatggacgaaggcgatgagctaaccacttgtctgttttgcaccgaaacatctgcaaacatctcggtggccattgaccatcttgacgcccggcataaagtgaatctgtcccagcttcagcgtaaattcgaaatggaccagtattcctttatcaaactgataaactacataagagccaaaaagatcagtgccgagcagttattgtctgcggaacatccgctttggcaggatgagaagtacctccagcccggggagtatgagccctggctctgctatgactacgaagtccttaaaacagacggcgctccgacgcagccctcggttctggagctacaacagcggattgctgagcagtcgcaattgctgcagcaggccaacgaggacatggaacgcatgcgcaacgactacaaggcgctgctgcaaaaggtacatgctgacggcgagcccaaaggttccgaccagagcgtaccgcgtaacaacgtttgtctcgacaacgaatacttcaaaagctacgcccactttggcattcaccatgaaatgctcagcgacaaggtgcggaccagcacctatcgcgcgtctttgctccaaaacgaggccgttgttcggggcaagacagtgttggatgtgggatgcggcacgggaatcctatccatcttcgcctccaaagcgggtgcagctcgcgttgtcggcatagataactcggacattgtgtacaccgccatggatatcatcaggaagaacaaggttgagaatgttgaactgatcaagggacggctggaggacacagatctcccagagactaaatacgacattataatatccgaatggatgggctattttcttttgtacgaatcaatgctggacagcattatctacgcccgcgagaatcacctcaaccccaatggcataatactgcccagtcgctgtacactcagtctcttgggctatggagacgacacgctttatgccgatgaagtggaattctggtctaacgtttacgaggtcgacatgagcgatctgcgaaagcaatcaatagaggagccactcatgcaggtggtggatgcagagttcatgctgacggaacccgaacagatagctaacttcgacataatgaccgtcgatatgaactatccaaactttactcaccagtttagcttaaaggtcacgaagccgggacgattatccgcctttgtcggttactttgaaacattgtttgaactaccctcccccgtcatgttcagcacatcaccatctgcgacgcccacccattggaagcaaacggttttcttcatcgagaacccgcaggttgtgaaggaaggagacgtcatttgtgggaaaatcacgtcaagaagacataaagaggatgtcagaggacttagtgtggacatagaagtctttggcaagaaacacaaatacaatgtggtttaa

SEQ ID NO: 14184 - protein, 516 aa, DROSOPHILA
MKDTEVNDNTTEEEPVKEAPEVPANSSSDEDEYDDIDDDDEPMDEGDELTTCLFCTETSANISVAIDHLDARHKVNLSQLQRKFEMDQYSFIKLINYIRAKKISAEQLLSAEHPLWQDEKYLQPGEYEPWLCYDYEVLKTDGAPTQPSVLELQQRIAEQSQLLQQANEDMERMRNDYKALLQKVHADGEPKGSDQSVPRNNVCLDNEYFKSYAHFGIHHEMLSDKVRTSTYRASLLQNEAVVRGKTVLDVGCGTGILSIFASKAGAARVVGIDNSDIVYTAMDIIRKNKVENVELIKGRLEDTDLPETKYDIIISEWMGYFLLYESMLDSIIYARENHLNPNGIILPSRCTLSLLGYGDDTLYADEVEFWSNVYEVDMSDLRKQSIEEPLMQVVDAEFMLTEPEQIANFDIMTVDMNYPNFTHQFSLKVTKPGRLSAFVGYFETLFELPSPVMFSTSPSATPTHWKQTVFFIENPQVVKEGDVICGKITSRRHKEDVRGLSVDIEVFGKKHKYNVV

SEQ ID NO: 14185 - DNA, 14744 bp, DROSOPHILA
gcgatatgactgtcatgatctacttctatggcccgatgctgttgctaatcgctttcaacataataatgtttgtcctttcggcgatttacatatataacataaagaaaaatgtgaaaggccttgtccacaagcaacaaacaaaccaacagataaatgaccaacaaatgtaattatattatattataagataataactataatgtcaaatggcactttttgtaatcttttataggtttgctatattcctgcgacttttcatcttaatgggtttgtcgtggagctttgagatattatcctttttgttaaccaaacagcaagcttgggctagggctttaatggtggctgactactttaattggtcccagggtaccatcatattcgtgctttttattttaaagcctagcattctaaaacttataatagcagggtaagtaaagtattacaaataaccttgaaatttgaccgtctcatacgtatgaacaatcttttgatttaggggacgtcaaaacctcccaggaagtcaccataattcgagatcaaaagcagctcgatataattcaactcatacggcttgtgaaggatcaattgcggatccaaacgcttactgctaaaaaaatggaattcaataagatgcaacgtctctgttattgatcacattattttaattttctatggagcaaaagtttaaaaaaaatatttgttatcaagacaataaataatgtcttggaacatataaagcaaaatatattaaagggtacaaaaaacaggaaaagtatggggcaatacagcaaaatatttttcggatcatcaacttttttgtaagacaaaatgtagaaatatttctggcaccgttgtttcaaaccagggtttgagtcaacaatgctggcccaccactggcaagtaccaaacgattacagaaaactttttctaatcgattaagcatcgggggtcatcgatgtttctccaccactacaatttcatgttgtttttttagtcgcggctgtttgacgtttgtcgctttcctccgttgcgaatataatatattacgtagctcatttttatacaaacggaattacgagcgcaacgacgacagcaacactagtagcactaatcgtaagcgcaggggccaaaaattaaattgcgtttgcggccgcaaagatttgatgacgtcgcatacgccgtcttctagggcgtaaaaagcaaagcaaagcaaacaaacgcgaaagcgaaacgtgtaaacggcgtagaagcgataaacgcgactcaaatacgcagcagataaaatacaatacgcgagaagagaaaagtcacgggaaatattgttcatattcggcgtctttctgcgagcgtaaacgtgtgtgcgtgggcttgtgcttttgccagtgtcgtgtgtgttaagtgcctgtgtgtgtgtgtgattaagaagatataaaggaatataacggtaaatgcagcgccgcaaaaatgtgcagcctgacgccaaaccacatggtaaacgtaacgcagcagcacctacacgatctattggaaactttcgaaaaaaagtccttcgaggcggcggcctttgaggaagggacggcggtaagttaacggtaccagtgtgtgcttgtgtctgtgactgtgtgtgtgacatacatttaggcgcacgtgcacgtgctgccgccgcaaaaacacgcagacacacacacacccatgcatgatatgcctgttgtgctagtgtgcgtggcgcttacaccgaggacacgtcataatgtcctgtcctcctattgctcttattctcttccctttcttgcgctcctctccctcgccgtcttccttctgccgcgccccgaaaatactgagccactcaaaatggctgccattaagcttcctgcgaggaaaatcgcattttcatggcaatcaataggcggtaaaacatgtcgtttgaaggacttaatggttcgttttctcaaagagcagaattaatcacgggatagcttttccaatttggtagtcaatcaaggttgttacctataagagcactaatcactaattaaaatatcttttttaaataagatgagcaataaacggtatttttgtataatttctattaacatacattttatggtcctaatattatttaatttaattgatttttctattccgtttcttagcaaatttttaattaattgataagaattaaatattaagtttcagctttcagagttccttatcgagttgcattcattttgattattaaatcaatttcaactaggaaatcccgagtaagcaggttttccgaaaccggaaacttcctaatggcttttgttctcgaattgccattgaaactcaatatcccactaagctgtgctaagcgataattaaaagcctaacaacggcctttttaggcccgcccctgacccacgcataaatgtgcattttctttccacgacacgcactcgaattcaacttttgtcttttgccttcagctcatccccttgcacccgttcatccattttacccccctcgaatgtcacgcacgccttttaaatagtccagtgtgtaatgccatcttatcgcccgcttaaccggcaataacacagaataacaattgtaatggcaacttggcaacagccgctgctcatttgcatgccagtgctggtgaatatatttaagccaaatccccgagccaggctgcctggaaacagagcgaggaaagccaagtgggaacttggcacgtaactcacgtttccgcgacgatcttacatcggtttgttcagctgcaatcggcacataaatatgtacatacatacatacatatgtgcatacttacttgtgaatgtttaaccgctaccgcaaactttgttgcaaacgtatgtttttatcaaacaatggctaggtcttatcaccaaccagggcgccaaccttcgatttgattttccacaagtattttcctattccttatctatctgccagctattcgaaggcacaaacaaaacgctgctactgccccttgatacaaagcattgcatttttgatggggtgcaaagggtgaattatgtgtgcgcttctctctcacttgtttatttcccagtctcctcggggttcagggttaagtttagccacaccgattagattaggcgttcgcccagccaaagtcacaatacctaagcaaatgacgtaggcaggcgatgaggtttatagcttacagagaacgtatgtaagaaccattaaatgggttaaatatacgagctaataaggtcaaaatggcatttaaattgcagctaaagataatattgctacctgaaatatatttggaaatctttaaattgaaattgaagagctttccaaattcataagttttactcctcgtcttatcgcagcaaccaaaaacaagcaatcctcttaaaaggactcagaaaaaaatcgagtgaataataagattgagtttgctccaatttacatcaagacatggaaatatttaatattcaacatccatcaaaaaaaattacacttatttatgttggttcaccacaaaaaaaaatacatttatatatgtagatttgctaaaaaaaaaaaatcaacgtacatttaaaaagtttcgcagtagacgccgaccgacaatcgttggacaattattgtatgcttatggacttagaaaccctggaaactccggcggaactcttcctcgaaatccgcgtggccaagatcaagcttgtggtagtcggtgaatccctcgcgatccagcttggcctgggcccaaaggattagcttgatgaggaacatcattcttggctccatgggctcctctttgctcttactctcatcctcgtggcagcgtaacatggctgcattcatttcaccggccaccttttggcgatatgagtagtacatcagctccccgtagggactgtattccggccgatcgaaggccagcagacccatggtccgctccacttcgtggtagtgacttggatcgaccttggaaaagcccgctgccttgctctgggcaaacttcaaggccttctccatcttctgatccctgatcatctcgatcaggcgcaactgttgcatgtgaaaaaatacatagttgtcggtctcgaagagccgtggatagatccgtgtggccaggtccatggcgtacttgacctgacccacacgcacggcatcctgaatccttaaacgatccccgatggtgtccatgtgtggacccggcttcacagacgcctcggtcatgaaacgcttggcggcctcttgatatccctctaaatttgaagttatgtacttcagttaggggggaagcatactagtgaggctcacctgtaaccagatagttcatcaccaggcgattcaggtccgcctgccggcactggaagctcatcatccgatggggccacgaagtggatggtctatactcggccattctcaatttttatagtttgatttaggtactgaaaattgaaacataggtaaacatgcaaattgacattagtcctgctttacttccttagttctttaattatttctcgtttttatctatctactaattgtaaacatgttctttccatttatgtgaagacattagaaagctgtcgagttttgtcttctttgttttattgattcccacacattttgttgccatataggaaagttccgctgatgatcatctattaacaatgtgctgatcattatatcacttttgttttcagcgagtgagttacacatcatttttgcgcattggttgtacgtactatcgccaactgatttatttttatggcctggcattgaaaactgttgcagttgcgagtgtgtattgggatttgcatttgtattaagtatctgcgcgggtggggtggaccatctgtctgctcgtgtgggcgccaaaaagtcaatccctggccaagcagagaaatgccagaaatagcagggaaggctttttcttcataaatatctcactttcgtaaacattttttgtccgcgcgtcttgccgtgtgtttgccgttttttgttgtttttatttttatatattttatttgtttatttgcacagtgttaaaacccacctgttgttgtttttgttgctgctttcgttgtcaatcaaagattgttgcaaaaatttcacctgctgaaaacgaagaaaaggctgaaatgattttgcaatacaatggaatatggaaaacgtactctgttgtatgtattgttttggatggctagcgatggctagctgcagtttttcttctattttctttttggcaacaatcggcttaatccaaaccaattggaccaaaaatggccgcgttgcgagcgctgcctttggcgcctgctggaacactactctggtcccaggagctgcaggacctggactgcagctactcctccgcattaatgtgtatcccgcctggagccttccagtctgcagctcgcttccagttcggagattgcactcgttttgggggttgcaaccagttccaggaacagtggagacaccgtatgacaaacgccggtgtacggagcattgagtgttggacccttctggtcggtcctgctcgcctgctgttgttggcagcagtctgtgccgtggccacgcccccgtcaaacggcagcttcccaccaccgcccccggaaacggatgcagctgcgctgcaagccgtgcggcgtcatttgtgtgggcgctttggaaaatgcggcacaggcgcgcaggaatcgccggaagagcggaagtgcgacgccttccagcgcaacaattgcaaccaaagttgggtactgtgggataagttcgaacaaaatgggtcaaatatgaggaatctatgagcaatagagtttatgttgcgccttatcagtcgaagatttcaggatcaataagcttttaaaagctatttattgtttcctaaaattattattatatctaaacgttgaaaaatatataaaaagtacattgaaattgacaaggctaacgcgtttttggtgattgatttttaatgtatacattatggtagctcgtcaagcatgccaaaaataattatttgatgacctcagtgtgtagagttgggaaatgagaactgccatgaattgtgggtcaatgattgtttatttatatcaattataaagaaatatagaaatataaaattgttcaaactttttgttccatttgttccacttttctaaagagcgcctgttaagatactcccactgtgcgacttggcacgacttggcaccctgcacccttttatgacagcctgttgcacgttgaactttgctcccacgcgtttggatgctcctccccgcgccgccccctttgtaggcagtgtgtgtgtgtgtgtgtgcaaagtgtgttcgatgatggccagctgtttgctgcaaggtgcgtgggtcgcaccacagacacttgtgccaggaacgcaggagtggaagtaatcgcccccttgaagggaatggccagacgggaggagtgtctagcggagtggaggggaagatgcatctccgcatacccgcatctgtagcagtgcgagcagctgcgtttccaacatttatcggggatgcagcagcagcttttcgggcgcatgtccacaatgaagagagccggcgagttcgatttgattaagggccactccgataaaggggttccaatgcttccagttacatgctcatatatatgaacatatgtgtgaatggatatggctccgccagtcgaagtgcagtaagtcgaatcaccctggtgcggaactccttgcgcattccggactaactgcctagcatccggacccaccatgcaagcatgattagaagaagggcacaactcggcatcgccgtgttcgctactactccttcgattttccagctacgcgtggtttcggatgctgccgatttttagccaccaacttgacattcatgctcgcctgttcgctaacagataaaatcgataatgtgcgaaatggcaatgccgctttactcaaatatttggtgagagttcggattcagattcggattcgttacgttggttgggggatcggacttcgtttggttatgacctaagcataaaatataggggatgttggctgaaggcaaaacgaattatttagttgtgtgcttgatttacaaagcgccaacaggagcgcagaaattttattctacttattgattttaatttgtggtagtgctggattaaagcactgggaaaaatgtaacccacattaaacccaagtgttgccttatttgtatgagttaatatatgattagtgtaatattttcggatgtaatagaacttcatatcgtttctgctagcccatgctggcattgccaaactgaatcgattattcagatgaccttcttttcgcatcacagtgaattgtctgatgggaagccagaaagcgtgaaaagcgatcggcgcctggcggaactcagttctgtttgtggcaactagtgtgggcggggaaaatctcttcctggctggctggcgaataaattaagcaaatgataaatagatttctgaaacaaccctgcctcgtactcattattcgtaacgcccacttactgcgctcaattattgtcattgcgaagtgtttgaagtgctttcaggcgtttgtttggcaagcaaaaatcatttagctcttcagggcggcaaaaaactcctccattggatacatcttcttcgcatattatccacaaagcggtttcaatgcctttcgaaagttgccccacacactgtcaagtgtttttctatacccgtggtgataattatgtacatcttaaagaaataaatgcaagttaactgcaccggcaatttgcatactaaaagttcattaatatccacaatcgatgtggatgatgttgcataaattaaaagaaatgctagtcgttaacgtaaagattagttgaaattataaaagttgtggttaaaagttttagcatattattttcaattcagtcatttacatacatatgcgtcgtaataaaccttaaaatatttattttacaatgcacaatgtaaacaatgccttgtttttggttgctttatgttggaaaagaaaggcattgtttatacttatatagataaatatgtttatttatttaacttataataaacccaaccgaactgtactgcttatggcagttccttgatttggaacctgatcccaacgccaactcagagtttgaaacgtgggcgcaacttgttttcatatcgggggggtctttgaacgccgacgaaaacaacacgctgcacattttaaagcgcaagcataaatcatgtaaacaagaacaacgagaatcaaaggcggaactcccctctctgtcgcagtcattttgggtgtggtcagtggccccagtttaatgccactgaataattcattcaagaaaagccatttccctgtcgccggcggattgatgaatatgcatcgtgtggccagcaccgaggcctccttcagtttttcaggttatttggcaaaaaaaaaaccacacaagacaagagtcagagcaggagctcaagagtcagcttatacagtaaacataacttaaggcggaatatgacatgaaaatacgtattaaaaataagtggtagcttggttgaagtagttgttggtctgaatagttttattcatttatacaatgttgcaactcaatggtgtttacttgactactttccattacgttcccctgaggaaagtgcagctccgttaatgtcacagttaaagaagtcgtactgtacttaatgggcgacctctccacccttttcttttgctgattccctgtgcttggtcgagttggttcggttcggttggtggttttctcggttcgattgcacacgagtgcgactacgattattttcagctgtgcggtttcttaccgctgttgttcagttttttctttctttcttctctcttttttttaatttttgtaagcttttctgctttattttctgttcggttccatttttcaagagagagcgaagaaaagtgtgtcgcactctgcagcttctgctgcatttctggtggcccagcatcggcagagtctttaaaatccgggtttgtgaggcgagcttgggttccgagccagcctttcggtttgagtttcactatttgggtcagcgatgatgaaagcgccagcgccgttcgtgatgttgatgatgacgatggggcttaatgatcaccacgctcgcaaactattttccgcgctgtaactaaacgagcgcgcgtctgtttgttgtttttaagttttacagcgcctttggaacaggcgctcagtttttcaagcagcgctgctgcacttacagttgcacttgctcgcttacaatgaaaaaacgacagcggcagcaaaagcaacgaaacaacggcaacagaagcagtgggcaagcagttcaatgcacacaacaacagtagccacccgtacatgtgtgcatgtgtgacttgactgctttgtaacggcagcttctccgacttggagcgcactcacactcaaacactcactcgcgcatcggccatcgatggggcttatattttctttccgacagtcccatctctctcacactcatcacctcgcctgctcccgctcgcatcatctgtcaaacagtgctgccgaaagtagctgcatggaacctcaaaagtagctaaactcttttaagactagctttggcatttcgagctttgatatttgctatttttatttattattattattattttgatccgtagatccatttttcaccttcgtattaatagttcaaccgctaaaacagtgaacgcatttatcattaaattaatttccaacactgtaagccaaatactcgattaaattgtaatcaataagtatttaataaatagtaaagcaatagtagttttgtactgatgtgttttatcttaaacctatcgttatgcaattcaaaaatgctaaaaatacaataaaagcaccataaaaagcgattggcttttgcgtgtttccgtcggcgtttttcttggtaattgtaattgcgttttagttgttttgctcgttcgcttcgcactgcgcacttgtgtgcagtagttttgagtccccacacacagacacacatgcgccccactaagttttcatcgggtttgttttgctcgctgcttcgcttttgttgttgccaatttttgcgcagctacggcggtcttcgtctttttatagtttttgtttttctctcctccatttgttttgcacatttctctctgtgagctagaaacctgttttcccaaggtgtttgtttttgcacgagtcgttttattttgaggctatattattattgtgcttttatctagtcgcagttgtttgtctgggacagctggctgggggccacgcccccattcgccgccaccgcccccttgctcgcctttccttctatttttagccagtcgcctaaacaacctttagaattctttttgattagcacacaaaatacgtattattttgtttcttatgaattggttatacttgttgtgaatttattactgtatctcgatggttaattggcgttgtaacttggccattaccccccttagcttatctgttttaacccttgagcggcagatagcaaccagtcgaagccgaacgatccagattccagttctcctaccctggtagcgtccaagttccattgaactcgggttaggaatgtctatatagtatatgtatacacacattgcgaatgcatgaaaaccagttgcactccgcgttctaatctcgctgtccattaagaagcgtctccggcatcgctgatttatgcaaaccattgactttacacactgcccgtcaaatacttaatgtttacccgaagtgaatgggtactaaggtcattcgtaaatggatcccatttgtggcaagaaaagttgcacaactttattcaaacgattattttaccacataatccttacctattacatctacttttagcatatatgtattatattaactccctattcatggtatcctgatctttttcctttccttttaggagtacgacatctccaaaaaatgcgaatacctgtttaagctcgactacagcctaattgagctggataatacgaacggattgctcagtccgcgatatcctggccgaatactcatcccggaatatgagcacgggcacatggccaagacgctggtaccgggaaatggactcttcgggcaagttggtgggggagtgggaggtggaggctcctcgggaacaaccgccactgccacgcctctgaacagcagtgcaggaagcaccggaagtgagggtgtgggcatccaagcctttgtgacctttgccaatcccctgcagacgcaacaacagcatccgctccagcaacaatatccctcgcagcagatgcatcccctccacgcgcaatatccctcccagcagccacatccactccagcagcagcagcagcagccatcgcaacagcaaccacaaaatacgatatacgaggatcagtatgatatccagcgaatgcgggaattggtaacgatggccaaatatgcgagatgccgtcaaagattcgccgtgcctgtgattatgtatcgcggaaagtacatatgccgctctgccacgctatccgtcatgccagaaacctacggccgaaaagtggtggactatgcctacgactgcctgagtggcggcaattacaccgcgccaaacggagaagagaacgatgctgactccacggacgagtcgctgatcacccacatgcacgaccaggcgcagtcgcagttcagctacgacgaagtcatcaagagtgacatccagctgctgcatacgctcaatgtctcaaccattgtggacctcatggtcgaaaaccgcaaaatcaaatacttcatggcgtgagtacactttaagataccgagtacaaaacaaaaactgaccacctgttttttttgttcttttagcgtttcctcgtcagagaaagcggatcccaacaagcactataagagctttaaccttctatccctgccgtatccgggctgtgagttcttcaaaaagttccgggacaataattacatggctcgcaacctgcactacaactggaagcaaacgttcaacgatgcgaatatcaacattcccaacatgggacccgctgcggatatcgatgtggcgtggtcggagtaccgggattgggatctggtggcaatcacccaaaactatttgagagctacactgaaatacgtgcaagaggaaaactccggcctgctgattcactgcatcagcggttgggatcgcacgccactgtttgtctccttggtcaggctgtctctgtgggcagatggactcatccatcagtcgctgaacgccatgcaaatggcctatttcacactggcctacgactggtacctgtttggccatcaacttcccgatcgcctgaaacgaggcgaagacatcatgttcttctgcttccacgtgctgaagtttatcacggacgaggagttcagcattgtggagcaccgcaagcgcaccaagacatccagcagcagcggcagtagtgtaatagtaatcaaatccgattgctgcgacgatgaaccgctcaaggagtgagtatagccaaagacactagaattatagccaagtattgtaaatgaacagtaccattatcagtccatttactttgaattgcagagactacatcctttcgttcgatcaagatagcaacgacagctactcaaactgttccaactgtgatatgtccataacagataacttctatgccacgacgccggcgcaagtcaatccgttgaccagcaggtcgccaaatccgaagaggttgaacagctgaatactaaaattagaaacctgactaactgtgaactcaacttgttttagatctagaaccagccccatttcagtgcccggatcaaatgcgcggcaaagacaggagtctacatcgtccaatggtagctggcaggtggttaccgacacgggttcaattgactccatgatgaacggcagctacatgatgcgctttgtggcgcaacaggcagccgatggtggcggctcctcaaacattcctttatgcaatggcggcaatggttaccactgcagcatcaatgcagcatcgagtggcagtgggagcggaagtggtagcagtatcagtaacggcagctcgacgcacggtttcgcaaacggttcctccaaagacgtaggcggcagcactatggccagcaagcaatgcatcaacttgtaagttgtagtctgattattcgacagcaaatacataatgacataattttgttttacaattggagacgaaagcaacgcctgaatgcagtgcgcgccatttttatacaagcctacggcaagacgattggactgaaattcaaggagggctcatccatgaacctggccacgttcattgggaacctggcggaccaactgttttgagaaaggattagcagctatgaccgtttgttagatttcatcaacattgtttgtttcttgttaagtgctacgctttcaaccaacgactgtatttatagacctgttaaattgcgttctttagtatctgttgacgattgtgtagtgtaacggattactgattaccgataagcatcgaaagaaccaggcgatcgtaggcaacgagcaaacaaaatcctgtcgtccttctgccccggctaaaccgctctcctgttctctaggttctcccgctccttgtttgtttagttattagttcttcgagaatgcaaagcaagtgaaatataaaatgctatttggattatacaatagttttaagttgtaatttatagtaatgtattttttaataaacttatgtgcattttatacgaaagaaagtcatgttctcagcgtaggccgccttgagcgccgtattctagctaagggtaaataatcatcaatttccactcgcttcagccggatgcgacaccttttaatgtagtatttcgcgcttttaagaggaacgaagcgtggtgtttctatcggtcgttcgtcacattttgttgtatctttaattttaggttcaatagctgtttctattttgattttgacatcatttgatcctttgcaagcattattatatctgattcttttattggcacttgcgacattgggtcttattttgtgtgggctaatgccgaatctgtccatggccggactgagtaaattgtctgctgggagctctttcacccgtatcgctttaagaaattcgtcgtattcgctctgaaccgtctccaggtccttaggacccagctttcgagtagctttctcttggcgctcttgctccaggatgagggcgaggacctccacttctaaatgccggcgttccgcttgcgccatagatttcacgaaaggcaactgactgagaagaaactcctgacacttggttttcggcacatccgccggattcggggcttgcatgcgaatgtgcacatcgtgcatcacccgccacagaggttcagggatttgccctttggaaccggccaaggctctgaccagcgggcgcagcttcacccaacgcagcttcagttcacttacggagaacggagtactcagctcaacgtgctcgtagctttggttaaaggacttggccagctgatcccaaccccaggagtcgtagtcaacgtccattttgggctccacctgcgggatgataaggaagggataccgggcgagcatctccatgagcagcaagtcgtttaaaacaatctggccgctgatgttggtgtttgatatgttaatctccaaatggggaacagtggaatggatcaccgtttcctcggcgctgtcggtactcattttaatatttttcgcactgtgtttctccaacg

SEQ ID NO: 14186 - DNA, 3108 bp, DROSOPHILA
ctgtttgacgtttgtcgctttcctccgttgcgaatataatatattacgtagctcatttttatacaaacggaattacgagcgcaacgacgacagcaacactagtagcactaatcgtaagcgcaggggccaaaaattaaattgcgtttgcggccgcaaagatttgatgacgtcgcatacgccgtcttctagggcgtaaaaagcaaagcaaagcaaacaaacgcgaaagcgaaacgtgtaaacggcgtagaagcgataaacgcgactcaaatacgcagcagataaaatacaatacgcgagaagagaaaagtcacgggaaatattgttcatattcggcgtctttctgcgagcgtaaacgtgtgtgcgtgggcttgtgcttttgccagtgtcgtgtgtgttaagtgcctgtgtgtgtgtgtgattaagaagatataaaggaatataacggtaaatgcagcgccgcaaaaatgtgcagcctgacgccaaaccacatggtaaacgtaacgcagcagcacctacacgatctattggaaactttcgaaaaaaagtccttcgaggcggcggcctttgaggaagggacggcggagtacgacatctccaaaaaatgcgaatacctgtttaagctcgactacagcctaattgagctggataatacgaacggattgctcagtccgcgatatcctggccgaatactcatcccggaatatgagcacgggcacatggccaagacgctggtaccgggaaatggactcttcgggcaagttggtgggggagtgggaggtggaggctcctcgggaacaaccgccactgccacgcctctgaacagcagtgcaggaagcaccggaagtgagggtgtgggcatccaagcctttgtgacctttgccaatcccctgcagacgcaacaacagcatccgctccagcaacaatatccctcgcagcagatgcatcccctccacgcgcaatatccctcccagcagccacatccactccagcagcagcagcagcagccatcgcaacagcaaccacaaaatacgatatacgaggatcagtatgatatccagcgaatgcgggaattggtaacgatggccaaatatgcgagatgccgtcaaagattcgccgtgcctgtgattatgtatcgcggaaagtacatatgccgctctgccacgctatccgtcatgccagaaacctacggccgaaaagtggtggactatgcctacgactgcctgagtggcggcaattacaccgcgccaaacggagaagagaacgatgctgactccacggacgagtcgctgatcacccacatgcacgaccaggcgcagtcgcagttcagctacgacgaagtcatcaagagtgacatccagctgctgcatacgctcaatgtctcaaccattgtggacctcatggtcgaaaaccgcaaaatcaaatacttcatggccgtttcctcgtcagagaaagcggatcccaacaagcactataagagctttaaccttctatccctgccgtatccgggctgtgagttcttcaaaaagttccgggacaataattacatggctcgcaacctgcactacaactggaagcaaacgttcaacgatgcgaatatcaacattcccaacatgggacccgctgcggatatcgatgtggcgtggtcggagtaccgggattgggatctggtggcaatcacccaaaactatttgagagctacactgaaatacgtgcaagaggaaaactccggcctgctgattcactgcatcagcggttgggatcgcacgccactgtttgtctccttggtcaggctgtctctgtgggcagatggactcatccatcagtcgctgaacgccatgcaaatggcctatttcacactggcctacgactggtacctgtttggccatcaacttcccgatcgcctgaaacgaggcgaagacatcatgttcttctgcttccacgtgctgaagtttatcacggacgaggagttcagcattgtggagcaccgcaagcgcaccaagacatccagcagcagcggcagtagtgtaatagtaatcaaatccgattgctgcgacgatgaaccgctcaaggaagactacatcctttcgttcgatcaagatagcaacgacagctactcaaactgttccaactgtgatatgtccataacagataacttctatgccacgacgccggcgcaagtcaatccgttgaccagcaggtcgccaaatccgaagagatctagaaccagccccatttcagtgcccggatcaaatgcgcggcaaagacaggagtctacatcgtccaatggtagctggcaggtggttaccgacacgggttcaattgactccatgatgaacggcagctacatgatgcgctttgtggcgcaacaggcagccgatggtggcggctcctcaaacattcctttatgcaatggcggcaatggttaccactgcagcatcaatgcagcatcgagtggcagtgggagcggaagtggtagcagtatcagtaacggcagctcgacgcacggtttcgcaaacggttcctccaaagacgtaggcggcagcactatggccagcaagcaatgcatcaacttacgaaagcaacgcctgaatgcagtgcgcgccatttttatacaagcctacggcaagacgattggactgaaattcaaggagggctcatccatgaacctggccacgttcattgggaacctggcggaccaactgttttgagaaaggattagcagctatgaccgtttgttagatttcatcaacattgtttgtttcttgttaagtgctacgctttcaaccaacgactgtatttatagacctgttaaattgcgttctttagtatctgttgacgattgtgtagtgtaacggattactgattaccgataagcatcgaaagaaccaggcgatcgtaggcaacgagcaaacaaaatcctgtcgtccttctgccccggctaaaccgctctcctgttctctaggttctcccgctccttgtttgtttagttattagttcttcgagaatgcaaagcaagtgaaatataaaatgctatttggattatacaatagttttaagttgtaatttatagtaatgtattttttaataaacttatgtgcattttatacg

SEQ ID NO: 14187 - protein, 747 aa, DROSOPHILA
MCSLTPNHMVNVTQQHLHDLLETFEKKSFEAAAFEEGTAEYDISKKCEYLFKLDYSLIELDNTNGLLSPRYPGRILIPEYEHGHMAKTLVPGNGLFGQVGGGVGGGGSSGTTATATPLNSSAGSTGSEGVGIQAFVTFANPLQTQQQHPLQQQYPSQQMHPLHAQYPSQQPHPLQQQQQQPSQQQPQNTIYEDQYDIQRMRELVTMAKYARCRQRFAVPVIMYRGKYICRSATLSVMPETYGRKVVDYAYDCLSGGNYTAPNGEENDADSTDESLITHMHDQAQSQFSYDEVIKSDIQLLHTLNVSTIVDLMVENRKIKYFMAVSSSEKADPNKHYKSFNLLSLPYPGCEFFKKFRDNNYMARNLHYNWKQTFNDANINIPNMGPAADIDVAWSEYRDWDLVAITQNYLRATLKYVQEENSGLLIHCISGWDRTPLFVSLVRLSLWADGLIHQSLNAMQMAYFTLAYDWYLFGHQLPDRLKRGEDIMFFCFHVLKFITDEEFSIVEHRKRTKTSSSSGSSVIVIKSDCCDDEPLKEDYILSFDQDSNDSYSNCSNCDMSITDNFYATTPAQVNPLTSRSPNPKRSRTSPISVPGSNARQRQESTSSNGSWQVVTDTGSIDSMMNGSYMMRFVAQQAADGGGSSNIPLCNGGNGYHCSINAASSGSGSGSGSSISNGSSTHGFANGSSKDVGGSTMASKQCINLRKQRLNAVRAIFIQAYGKTIGLKFKEGSSMNLATFIGNLADQLF

SEQ ID NO: 14188 - DNA, 3308 bp, DROSOPHILA
tgtgcatctataaactccactgcacgctgacttcctggcccaatatgcccaacacgatagctttcaccatccgctgggcggaaggtagggggggagtgtaaattattcagtaaattgttaagtaaataacacgaagggcgcacgttaaaaagcaaccgaaagacaacaataacagcagccagaacacaacaacgtgcacagacatcaacaccgtccaactccgacccaaccttgtccttgcgtctagggccgccgtggaaatttacctctcatatatggatatggcggtggtgataatgttggtgattccgggtctgatgataatgatgatgatgatgttcagcaactgaagccaaggcgaatgatgacacgccgaacagttcacggctcagcggaattgccggcagcaaatgtacaataaaataaacaccaaatgtggaaagctagccccgggctcttcgaacgaaacggaacgaaaacaaagccggaaacggaagcagctatgagagttcagggggctggaacgactctgaacgcactctgaaccgagtaaacaatggcgagaaatttgttagcccaggagcaggaaccaatgcaggaaagtcgagtgtagacaaaggccccatcgactcatctcggtgtccgtccagtccacccacaaatcggcgatgattgtggcgggttgagaggagatggcagtggcagagctacaagttgcacaaacagatgaataattccgtatagggagaattaaaacttcaacccgtttcgactgacttaagaaatacatttaggacaaatgccacaccaagcttagtgaaattcgtgaaaaaaactgaatcaaaatcaatttaagggatttcacgatttgcggttttgtaaaccgtaataaaaataactttcgaatttccttcgcctttgaccttggtgtttaattgcgtgcttacaatgctttttatagttatgcaaatgttttgtacaatatttgtaaaagaaatagttatttaaatatactcttgactgttccaagtgctttagcaatgtatccaaatttgaaccaggagccgtttgcctcctctagggaatttgtacttccattccaaacttctagctggccatctcgctgaatattgaaattagtttccgaaaaatcactttctgaaatctgggtgaactgtgaggttttacgcttcttttcgcgcttgggagcgtcaactctggatactttggtgttctggcgccttggtctgctcacattccgatagagatccctttcggcaggagtcattttacgccataatgaggccttttccacaatcatcagaccgggattggcttgaccggtttttcgcagaaagtttttgtaagccgaaccactataaattatattctttttgccagcatttttggctgattttctgggagtcaccagaactcgtggttttggttttaaacgcttaattgtcttacgtatttttggggacgagatcttcttcgcatacttttcagatttcatggacgtactggcttcattaaatgcattctgtattttggttgtaattggatataccggatgcagtgtagctgcatttaaaatttcgtcacgattatgcacttgatcacataattttagaacgtagttttcaggagtatattcttgtttttgctcagctgtcagtttatcccactcgacgatggcctgctgaatactttctcggggtacggaaccatgagctatggagaaatcctggagaaagttcacaaacggtttatttctcaccgacactgatgcaatagacatatcgctgatttcagaattaagctctaccttgccatgtgcgttgctattacttgccacaatatttatttccggtgtggaatggccctcggctaacgcactgtaaagcgatgaatttgaataccgcaccattcggggtttttcaataacatgaatatttgtattatttcccgagtccaacaactgttcagttccttgcattataattttcgaaagtgtgctcgttacttttacatttgtattcgattttttcggtaaacggcgttttgaaacgggcgccattttgaggttgcctgaaggaggttgcctatagaatgaaaaatgaaaaaaaaaaacaaatagaagtcgacaaataagggtacatactcttgattatctatgcatttagtttactaggtcctatgttaaatatgctatccaagtgttatattttccttgcaacagctgtgtttaaaaagtaaaaaatttcgaaatacttatttacgtgagcctagaaagtgtgtgctgtgttctatactgatagactaatggagaaacgtaaacgcaggggcaactgtgatctcagcctgcttcttacaaattttaaaccgaatgaaaatacatctttttgtggtaagtttgctgctataaatattaaagatttatttgccgcacatcgaatagaagcacacagaaccgtttggatccattctgcacccgcagagctcctccagatctgggccaaaatctgcgccgcagagtgctcagacgcaaatgacatgcaaaataagcaggaccagaaccagtggaaccattgaaaccattggaaccatgagcaggagcaggagcaggagcagccgggccacttactgagccccagacatccagcagatagggtttattagggcaccgagacggcatccgtaatttatgcgggtttcgagtaaaaatgtttgcataaactttatgcaaaaatatgctctggccaacgcatgctggatttccatgggttgagtgagtggttcgcttggtggctgggtagttggctatatgggtggcaaggtctctgggcaaaaaaactcttggcccaggcacattaacagaaattgattttcgatttttcccccactcgctcgtagattctgctcggaaacaaagtatggaaaatgctttctagctgaattagaaaataaagcaatttgttttgcgcattttgtgtcgtttcggttatcctgcaaaaagtttgattagtttgttttgcatttgttttgggcgttgggagcggataatgttattaatgtttcctatagagtgccctggaagttgatcgaactctgagcactgaccaaaaaaggtttggcaacatagttgccgaaagtttgggtaagggttttaaaaaaaaagtttgccatcatgtgtttgcggattttcctcgagagttgttttttgtttcacactttcaggaaccggtttcagtaagccttttcagtcgaaacttgtttgtggaagccaggttagctggcctccacct

SEQ ID NO: 14189 - DNA, 1249 bp, DROSOPHILA
acacagcacacactttctaggctcacgtaaataagtatttcgaaattttttactttttaaacacagctgttgcaaggaaaatataacacttggatagcatatttaacataggacctagtaaactaaatgcatagataatcaagagcaacctccttcaggcaacctcaaaatggcgcccgtttcaaaacgccgtttaccgaaaaaatcgaatacaaatgtaaaagtaacgagcacactttcgaaaattataatgcaaggaactgaacagttgttggactcgggaaataatacaaatattcatgttattgaaaaaccccgaatggtgcggtattcaaattcatcgctttacagtgcgttagccgagggccattccacaccggaaataaatattgtggcaagtaatagcaacgcacatggcaaggtagagcttaattctgaaatcagcgatatgtctattgcatcagtgtcggtgagaaataaaccgtttgtgaactttctccaggatttctccatagctcatggttccgtaccccgagaaagtattcagcaggccatcgtcgagtgggataaactgacagctgagcaaaaacaagaatatactcctgaaaactacgttctaaaattatgtgatcaagtgcataatcgtgacgaaattttaaatgcagctacactgcatccggtatatccaattacaaccaaaatacagaatgcatttaatgaagccagtacgtccatgaaatctgaaaagtatgcgaagaagatctcgtccccaaaaatacgtaagacaattaagcgtttaaaaccaaaaccacgagttctggtgactcccagaaaatcagccaaaaatgctggcaaaaagaatataatttatagtggttcggcttacaaaaactttctgcgaaaaaccggtcaagccaatcccggtctgatgattgtggaaaaggcctcattatggcgtaaaatgactcctgccgaaagggatctctatcggaatgtgagcagaccaaggcgccagaacaccaaagtatccagagttgacgctcccaagcgcgaaaagaagcgtaaaacctcacagttcacccagatttcagaaagtgatttttcggaaactaatttcaatattcagcgagatggccagctagaagtttggaatggaagtacaaattccctagaggaggcaaacggctcctggttcaaatttggatacattgctaaagcacttggaacagtcaagagtatatttaaataa

SEQ ID NO: 14190 - protein, 359 aa, DROSOPHILA
MAPVSKRRLPKKSNTNVKVTSTLSKIIMQGTEQLLDSGNNTNIHVIEKPRMVRYSNSSLYSALAEGHSTPEINIVASNSNAHGKVELNSEISDMSIASVSVRNKPFVNFLQDFSIAHGSVPRESIQQAIVEWDKLTAEQKQEYTPENYVLKLCDQVHNRDEILNAATLHPVYPITTKIQNAFNEASTSMKSEKYAKKISSPKIRKTIKRLKPKPRVLVTPRKSAKNAGKKNIIYSGSAYKNFLRKTGQANPGLMIVEKASLWRKMTPAERDLYRNVSRPRRQNTKVSRVDAPKREKKRKTSQFTQISESDFSETNFNIQRDGQLEVWNGSTNSLEEANGSWFKFGYIAKALGTVKSIFK

SEQ ID NO: 14191 - DNA, 4295 bp, DROSOPHILA
ttgtttaaaagtcaaatcaacacctttgatgatttattccgtgagaagcgtacattgctagtggaaagctttgacgctgaggtactacacaatatgaccaaagaaaaaattatacaaaaagaatttgagagtattatattgataacctcaatcgaggaggtcttcaagcatcgcaagagcctaaataccagttatgcctatgaagcctatgaggatcgcattgcattcgagctgtctcagcaaaggtatcttcgagtgcccattttcaagattctaaaagaggtgtacgaccaaagacctgtatttgtggcacttcgacatggattaccgtatgtggaattatttaacaattaccttaggcgaatctttgaatctggtatttggattaagctccaggaagactcttttctcgaaggaattgctagtggtgaaattagttttcgaaaatccaaatctcgcgaaatcaaaatattcgacaaggatttttatttctttgcgtacattttacttggaatgggatggtgtgtcagcactatagctttatttttagagctatggagttttaaatattcggtaacaaatgttttacatgaaggataagccataaattatacgaatacgaatatttgttgcgttcagtaaaatgtaatcgtagaaatgaatgtactaatgcaacccaatgctaatgctaatacatgagcactgcttaaattaaatatacatcgcatatttccctatttcctgtctcctataggcagacctcaaatattcaaagtaataaataaaatattgtataatgcctctatgcaaataagctacatgacttgtattttttggatcgttcgttagttaaccgatgtgtatttattttacctattcaaattggaatttccacaaagcattaaagaaaatactgtaatcaaataatccaacatgttaggggatagtcaaacatggtctataaaagaacgttgatgcagaggatttcagagacatttcaatggagttactttacctgaatacgcttcaaagcctttcactgcttgaaggaaatcgcttggttcagacagttcaggaactaaataatatttaccaaacggaacttaacgtattcttagagtttggcaatggagcagatattttggaatcagcccaaggaacttttgtgcccactctttggattaaaaacccgcaaaatcaaaaggttatgaaaggaaacttcactagttgcacccttaccattttatatctggaagatgaacacctggatcgtggactttactatcttgcaaattggttgtgggaatatcatcaccttgaagtgctaatatttttcaacggaggatcttatgacaaactaatacaaatattcagtcgatgttttaatgaaggttttgtgaatgtacttgtaatgctaccgggctcggatgaactctatacctttatgccatatcaagatttgaaaattttgaacttaaagagtatcaaggagttctatagtctctcccgtaagaaaatggatttaaatggatataatatcaccagcggacttgtaatagcaggagctcctcgttggttctcttttagagatcgtcaaaatcgattaattctaactggatacatgcttcgaatgattgtggattttacgaaccatttcaatggatccgttcggttaatgaatgtgctaactgtaaacgatggtcttgaacttttagcaaatcgaacaatagacttttttccattcctaatcagaccgctgaaaagcttttcaatgtccaatatactttatctggaaaattgtggtcttatagtgcccacatcaaggccattaccaaattgggtttacttattaaggccgtatgcatttgacacttggatagcctggctaataatgctaatttactgctccttggccttaagaattttatcaaaaggacaaataagcataagtgctgcatttttaaaagttcttcgattggttatgtatctttcgggtagcagagatatgggaactcggccaacaactcgtcgcctctttctctttgtcatattaacaacttcaggatttatattaactaatctttatgtggcccaattatcgagtaattcggccgcaggactttatgagaaacaaataaatacttgggaagatttggacaaatccgatagcatttggccattgatagatgttgatattaaaactatggaaaaacttatccctgatcgaacgaaattgctgaagaaaattgtcccgactttagaggcagacgtagatacttatcgaagaaacctaaacacaagttgtattcattctggattttttgatcgcattgattttgctctttatcaacagaaattcctacgatttcccatctttcggaaatttccacatttactctaccagcaacctcttcagatatccgctgcatttggacgtccctacttgcagttgtttaattggtttgtgaggaaaatatttgaaagtggaatttatctcaaaatgaaggacgatgcctatcgccatggaattcaaagtggtttgctaaatttggcatttcgtgatcggcatttggaagtgaaatcaaatgatgtggaatattattacctgattgcgggattgtggtttggtggtttgactttggctacagtttgtttcctacttgagttgcttattggatatgccaagattaaagtaactatatcttgtaaaatgaatataatgtagtataggattatcaaaagcactattttcgaaataaatctgggtgtcattagatattagatgtttataatatcttaacatggtgattgtcatttctggtgtcaaatattgttgcacagcggaactgtaaagtaaactttggtcacagccgttttctacccataactctccgcccaaaaactgtaattacaacgaaaatacgttaaaatattttgccggcaaggtgacgcctcccttgcggcctcatttgcatgcccgctggctgcacttgtcgcggctcaaaatccactgcccaaatggccaaatggcaaactggcaacctgcaactggcaattggcaactggcagccggccaaagttgcaactgcctccgaaggtgtcttcgattattgccaaacattaattatttgcgcgcgatttggcgcccgcctccttttttttgtgaaaggcttgggctagtagttcaaatgtttatttttctgctctccctggtgtatctttgattactgactacacatgaagaagtttaaggttataaataaattgaatacaaactcatattaaaaatttccagataacgaaattttcctggttaaatttttatgtctgtatacataatttaggataagataaagtcgatgaagttaaacacttaatagcttttaactggaactaatatcctgtcatatgtttgtatgagtcgtaaggtttttgaagaggaatacatcttagatacaatttatatttttaacaaatatttatggaataaattccaaaaaattatgtttttatgtgtaagatcatcagacacaggcagcaatttttgcgcaacgaatgagagacgagggacggtcaggtcgattcaccgccgtcctctgccgtccagcttggcttatttatttttggccaaaattgcacattttcccatgctgctgttgccgcttgctgttgttgtttctgttgttgtttttagccgatgttgcctgttgctgcctggccatgttgttgctgctgttgttgttgtcgcgtctaatcaaggagcggagtttgaagtcgatgccttggtcgccccattgccatttagcccgaagcggctgcctcagccaaaacgatgaatattgatttaattgaaagtcattgaagcacacgtacttcatagacacgagtttttgtgctacccagtgtgagagtatgatcggattggtgattttcgaaaatatatcttatgtataatatcggcattattatcttcacttatagtaataactaatatatcttaaaataatgatgaacaagtgttggttgatacatcttaagtataactcatatataccaaaatgtttttaaaagcgtatataattttaaggtcatcggaattcgcaaaactttcttgatattcttatgttaatcttatgtttatagaggtatctcatacttcgattcccatccgaatcaaaacctttgcggctttccatttggtgtggcagcaaaccgaccgccgatcgcagcttgtgctctcccacatgccaacatcttcgcacaaatacactcacgaacgcaaatgtggaaaaccg

SEQ ID NO: 14192 - DNA, 2295 bp, DROSOPHILA
atggagttactttacctgaatacgcttcaaagcctttcactgcttgaaggaaatcgcttggttcagacagttcaggaactaaataatatttaccaaacggaacttaacgtattcttagagtttggcaatggagcagatattttggaatcagcccaaggaacttttgtgcccactctttggattaaaaacccgcaaaatcaaaaggttatgaaaggaaacttcactagttgcacccttaccattttatatctggaagatgaacacctggatcgtggactttactatcttgcaaattggttgtgggaatatcatcaccttgaagtgctaatatttttcaacggaggatcttatgacaaactaatacaaatattcagtcgatgttttaatgaaggttttgtgaatgtacttgtaatgctaccgggctcggatgaactctatacctttatgccatatcaagatttgaaaattttgaacttaaagagtatcaaggagttctatagtctctcccgtaagaaaatggatttaaatggatataatatcaccagcggacttgtaatagcaggagctcctcgttggttctcttttagagatcgtcaaaatcgattaattctaactggatacatgcttcgaatgattgtggattttacgaaccatttcaatggatccgttcggttaatgaatgtgctaactgtaaacgatggtcttgaacttttagcaaatcgaacaatagacttttttccattcctaatcagaccgctgaaaagcttttcaatgtccaatatactttatctggaaaattgtggtcttatagtgcccacatcaaggccattaccaaattgggtttacttattaaggccgtatgcatttgacacttggatagcctggctaataatgctaatttactgctccttggccttaagaattttatcaaaaggacaaataagcataagtgctgcatttttaaaagttcttcgattggttatgtatctttcgggtagcagagatatgggaactcggccaacaactcgtcgcctctttctctttgtcatattaacaacttcaggatttatattaactaatctttatgtggcccaattatcgagtaattcggccgcaggactttatgagaaacaaataaatacttgggaagatttggacaaatccgatagcatttggccattgatagatgttgatattaaaactatggaaaaacttatccctgatcgaacgaaattgctgaagaaaattgtcccgactttagaggcagacgtagatacttatcgaagaaacctaaacacaagttgtattcattctggattttttgatcgcattgattttgctctttatcaacagaaattcctacgatttcccatctttcggaaatttccacatttactctaccagcaacctcttcagatatccgctgcatttggacgtccctacttgcagttgtttaattggtttgtgaggaaaatatttgaaagtggaatttatctcaaaatgaaggacgatgcctatcgccatggaattcaaagtggtttgctaaatttggcatttcgtgatcggcatttggaagtgaaatcaaatgatgtggaatattattacctgattgcgggattgtggtttggtggtttgactttggctacagtttgtttcctacttgagttgcttattggatatgccaagattaaagtaactatatcttgtaaaatgaatataatgtagtataggattatcaaaagcactattttcgaaataaatctgggtgtcattagatattagatgtttataatatcttaacatggtgattgtcatttctggtgtcaaatattgttgcacagcggaactgtaaagtaaactttggtcacagccgttttctacccataactctccgcccaaaaactgtaattacaacgaaaatacgttaaaatattttgccggcaaggtgacgcctcccttgcggcctcatttgcatgcccgctggctgcacttgtcgcggctcaaaatccactgcccaaatggccaaatggcaaactggcaacctgcaactggcaattggcaactggcagccggccaaagttgcaactgcctccgaaggtgtcttcgattattgccaaacattaattatttgcgcgcgatttggcgcccgcctccttttttttgtgaaaggcttgggctagtagttcaaatgtttatttttctgctctccctggtgtatctttgattactgactacacatgaagaagtttaaggttataaataaattgaatacaaactcatattaaaaatttccag

SEQ ID NO: 14193 - protein, 574 aa, DROSOPHILA
MELLYLNTLQSLSLLEGNRLVQTVQELNNIYQTELNVFLEFGNGADILESAQGTFVPTLWIKNPQNQKVMKGNFTSCTLTILYLEDEHLDRGLYYLANWLWEYHHLEVLIFFNGGSYDKLIQIFSRCFNEGFVNVLVMLPGSDELYTFMPYQDLKILNLKSIKEFYSLSRKKMDLNGYNITSGLVIAGAPRWFSFRDRQNRLILTGYMLRMIVDFTNHFNGSVRLMNVLTVNDGLELLANRTIDFFPFLIRPLKSFSMSNILYLENCGLIVPTSRPLPNWVYLLRPYAFDTWIAWLIMLIYCSLALRILSKGQISISAAFLKVLRLVMYLSGSRDMGTRPTTRRLFLFVILTTSGFILTNLYVAQLSSNSAAGLYEKQINTWEDLDKSDSIWPLIDVDIKTMEKLIPDRTKLLKKIVPTLEADVDTYRRNLNTSCIHSGFFDRIDFALYQQKFLRFPIFRKFPHLLYQQPLQISAAFGRPYLQLFNWFVRKIFESGIYLKMKDDAYRHGIQSGLLNLAFRDRHLEVKSNDVEYYYLIAGLWFGGLTLATVCFLLELLIGYAKIKVTISCKMNIM

SEQ ID NO: 14194 - DNA, 3651 bp, DROSOPHILA
atgaggacagtgccacggcgccgattagcaaaaataatggaggcagcagcaagtgcaagaacaacgggctggtcagagaggcggccgccgccggagcggacgatgccgaatccgctgatgacagcggcaagggcgagaccacataatgcagccaggccagggtcgcgtcatctcttcctcccactcctgcccagggcggcgagccaccgccttttaatttctccaacattattactattattaattctaattatacacgtttcgaaactaaaccgaacaactgagaaaacaattatttaacaagtttatatgtaccgagggtagttgaaacaatggtcctacgctgattttatctactcaattttactttgataactaagatgatgatcgtataagctacaggttatatgcatgcgggctaactcaattcccagcctgtgggcaagcaattaagagttcagggacttctccaaatccaaacatttatacgcagaagaaacacacaacacagaaacaagaataaaaccaataacacaagaaactcaaacagaaactgattatcaatatacacagcatatgtactaggtatttaatatttaaaaatatacatacacacatttttatgagcggaaacgaaatacaaatgtcccaattcgcgcgacgcggcatcctatcgtacataatggacacagcatcaaggtaaagaacagaaaaaaaaaccatattaaacaatcaatggatttcaagaataaaagcaaatatggaaacatagcgattaagcaatttttaagtgcaaaattgacaaagtaagtttaaaaccagctattgcaatatggaaacgatgaagcgcattgttcaaacagtaacagaattgcaacaaagataaataagccaaataaaattactgaaaaaaaaataagatggtccttcaatttggatggattaattgttatggtttttcgttaggaaaggaaagggtacagaaaaccattcagtgcatcacattgaattctataatttatttgttcgcctttgtcgattgaattatttaaatttgaaccacgagcttggccctttttctccaagccactagcgcaggcgtcagatccttctcggtaacagctggcatgcgtatcagtgagctgtagacaccgacatccgccaccgacatctgggatccaccgaaatactgctgcttctgcagtcgcttgtccagcaggcgcaccatggccacctgcgttttgtgcgtgttgcagcgcagcagttggtagcaaatgtccaggacaaggtcgatctcattgcagagcggagagccctcataacgatactcggctggacccacacggcccagatagcgaatgatgttcacctctccgtagatgggcacgtacatggtgggcgagctgatcatctcggtgtgttcgcctggaaggcatcgaataaacagtattttgtactttgtagatgtgttatacttacagttcttccagatgagcgtcacactaatcttgggcaaagcagggtttactggaaccttcgccaagttggcctcgaattcccgtgctgctggtccaatgtcggccatcgtagagtgcgtaaaggtcttgacatcaatagtgtacagattgcgccaggcatttttcagggccaacaaggcatagggtatgaagttgggatgtccattgatgacgacatcctgcagtggcacctggttttgatttattggaaatattattaaataaaggtgatggaactctcttttaagctaagacttttcaaagctatgttacacataattaaatcctattgcataagcttctaaatattgtttactttgattattatttaattatttcttatttaacctttgaactcctagtcttgaccttgacatattgatagtcgtacctcctttaatccaccattctggaaagcagtcgtgtgctggaaagtcttgccacaaacaccaagtcccgcccggatttgtcccagctgcgccttcagctcctccagctgcttgagaaccttctcctgtcgggcggccactgatgccgtatcgtcctgaaagtaaaagcagggaaagaggatgtgttagggaacgacatataacgttagccaaggccacaagaacacacaaaacgaagcatggatgcattataaatatttctggtactggcgtattgttctttttttttttttgttagtcggtggtttataaatagaatttcgtattttagtttggtggtcttaacctttagcagtcgctgtatttgtcggcctaaagagtccaaatcaagtgcacatgtggctgcgtttcgtcccgttctgtcgatcctgttggcctccaatttctggcaaggatcacacatgcgggaatggaatggatgtggcgttgtagacatacgttgcactttcactgtccttgcgacccgaccaacttctcactggcccggcaaataaacttacgcatgatgatgtggacgcggatgtggatgcggatgtggaggagccgctggccaaggaatccgccgccaggctaacgttcttgagaggatacatgcaggtgggcagctttatgtcgaattgcggcagcagagtcttcagttcgtacattttcgcggcgagaatcgttggataaacacaataacctgcgcaaattatcaattccaaaatgtgcttgccgtctgtgagaaactttacaaaataccaaataatttaaggcaacgctatcgctatcgttccacttaacaccattaatctggtcacattgcgtgcggtaatgaaagctattgaattcaaatttaaaatgtagtttttatacattttatacttcatccagaatattctgcttggtcaactactgttgtgtcgttatacctttaacgaaaatcaaacaaaacattgtttaactctttttaattcaagttttttttatagaaatgtctcagttattaacaaaaataaaaaacaatttgagaaaataatgcaatttatataataatttccctttctatagctaagtaaattaggagactggcaatcgttcatattattcagatttatttttaaaaatattcctagttctatgctatcttggccttgggtggcactttcggtatgcgctttatcctcctgtccacgatgtggcgtagacgcctgtccggcttgaccagctcgctctctgtcatgggctcgattacctggcccttgcgcgtgattactgccggacgggtcagcatgcggaacgccgtctccggcacaaagttccggccaactggagcacggatactggcttcgtagtctgccagggatcggaaaggaaatggtatgctggagaccatgtgctggcgcgcctgcttgctggcggactcgttgaggtaaagattatccttattctcgtcacgacgcttttccggagcagccaacttaagaagaagccgcttgtttcgtcgctccattacctccttcgaaatgccagcacccgcccaggaaccccatccaggcagggcgagctgaagctcagtgttcttaagctcggagtccttgcttttgtcccgattaaaatcagctacaatgtcatcatcctcgaaggcttgactgattgtcaactggcgttcagcagcggcgtcttcctcgtcgtattcagctgct

SEQ ID NO: 14195 - DNA, 1091 bp, DROSOPHILA
caggttattgtgtttatccaacgattctcgccgcgaaaatgtacgaactgaagactctgctgccgcaattcgacataaagctgcccacctgcatgtatcctctcaagaacgttagcctggcggcggattccttggccagcggctcctccacatccgcatccacatccgcgtccacatcatcatgcaaattggaggccaacaggatcgacagaacgggacgaaacgcagccacatgtgcacttgatttggactctttaggccgacaaatacagcgactgctaaaggacgatacggcatcagtggccgcccgacaggagaaggttctcaagcagctggaggagctgaaggcgcagctgggacaaatccgggcgggacttggtgtttgtggcaagactttccagcacacgactgctttccagaatggtggattaaaggaggtgccactgcaggatgtcgtcatcaatggacatcccaacttcataccctatgccttgttggccctgaaaaatgcctggcgcaatctgtacactattgatgtcaagacctttacgcactctacgatggccgacattggaccagcagcacgggaattcgaggccaacttggcgaaggttccagtaaaccctgctttgcccaagattagtgtgacgctcatctggaagaactgcgaacacaccgagatgatcagctcgcccaccatgtacgtgcccatctacggagaggtgaacatcattcgctatctgggccgtgtgggtccagccgagtatcgttatgagggctctccgctctgcaatgagatcgaccttgtcctggacatttgctaccaactgctgcgctgcaacacgcacaaaacgcaggtggccatggtgcgcctgctggacaagcgactgcagaagcagcagtatttcggtggatcccagatgtcggtggcggatgtcggtgtctacagctcactgatacgcatgccagctgttaccgagaaggatctgacgcctgcgctagtggcttggagaaaaagggccaagctcgtggttcaaatttaaataattcaatcgacaaaggcgaacaaataaattatagaattcaatgtg

SEQ ID NO: 14196 - protein, 334 aa, DROSOPHILA
MYELKTLLPQFDIKLPTCMYPLKNVSLAADSLASGSSTSASTSASTSSCKLEANRIDRTGRNAATCALDLDSLGRQIQRLLKDDTASVAARQEKVLKQLEELKAQLGQIRAGLGVCGKTFQHTTAFQNGGLKEVPLQDVVINGHPNFIPYALLALKNAWRNLYTIDVKTFTHSTMADIGPAAREFEANLAKVPVNPALPKISVTLIWKNCEHTEMISSPTMYVPIYGEVNIIRYLGRVGPAEYRYEGSPLCNEIDLVLDICYQLLRCNTHKTQVAMVRLLDKRLQKQQYFGGSQMSVADVGVYSSLIRMPAVTEKDLTPALVAWRKRAKLVVQI

SEQ ID NO: 14197 - DNA, 3389 bp, DROSOPHILA
gtgtgatggcatccgtgactgccgagatggagacgatgagctggagtccctttgcgagggcgttaccataccaacgactacagtcagttcaacgacaagtacaactacggaaagtagtatccataggataactcccactgttcctgtaacaaggaaggcgtcacgaccaaatcctcttcaggagaacggggagtgcgtggttccccaactgccaaacgttatggttaagcacttcacagatgcaatcctcactgtaggatcaagggtagccaatggcacccgtatctactacgactgcccggcggagcacagactgaaaggcgagaaccagaacatttgccaggacgcattgtgggctaggaagtttccttactgtgaaagtaagttgtgtatttatcaaaagtttcttcattaatactaatttatttacttttagcaccccaagcgtatgttttcagcttggttatagtaatattctgcttcctaatcgtggtattggtgtttctaatttggcgggtgcgtcgagaaaatggctcaagaaggcaacgagaggagcacatttggctggtggagaccagcagtaatcttccccagacatcttcaataccaaaggtctaggaattaatttttacaaagctaaacatgtgatcacgcatacttacttatttaccagccaagttgttgataaaaagtactgttaatttcaaactatctaggcttatcttatgtaaataatgttatttcaagttctccataaaaattaaaagcttaaatacgaatgtatatttatttttagagtaaaacgtgagaagtagtattatattgtaaatatattaaaacagatttaagaacataataattgtgttattaggttgcacattttaatttcggctgttaacaatacttttgcgttaacagctgtaatgctagaaccacttgttgctgcgacccaaactgtgactgaaacagtgactggaaatagtggcatttctggtgggagcgaacgcggtcacacctgccccactagtgcgccaatattgctccagtgcttcgcagcgtaagtatcccaagttctagagtggctccatgccagataccgccacagattagataacgaattgcacttgcagccggctcagagttccttcaattgaaaatggccaacattgctaagatcttcgctagccgcgcccagtgcgtcctgcaggcagccgcccgtcagccacaggtggccacccgtttcagcagctcctgtaagtagatggttgattgcgagggatcaaagtccacgcgattgatgcccagctccaacctaagccggaatatcaagatatcaagtgccgccggtttcttggcgacatcttttgtacttttccaggcaaataaacattgattgcgtaacattcgcgcacatacgatcacctcatttatgatgccatctcttttcagccaccaacaacaactgggagtacatcaagaccgaagtggccggcgagggcaagaacgtaggcgtgatcaccctgaaccgccccaaggccctgaatgccctctgcaatggcctgatgaaggagctgtccaccgcattgcagcaattcagcaaggataagaccatctccgccatcgttttgacgggcagcgagaaggccttcgccgctggcgctgatattaaggagatggtgggcaacacctactcgcagtgcatccagggcaacttcttgaacgactggacagaggtggcccgcacccagaagcccatcattgctgccgtgaatggttacgccttgggcggtggctgtgagctggccatgatgtgcgacatcatatatgccggtgacaaggccaagtttggtcagcctgaaattgccctgggcaccattcccggtgccggtggcacccagcgtctgacccgcgtcgttggcaagtccaaggccatggaaatgtgcctcaccggcaatatgatcggcgcccaggaggctgagaagctgggtctggccagcaaggtggtgcccgccgaccagttattgggcgaggccgtcaagctgggcgagaagatcggcacccactccaatctgatcgtgcagctgtgcaaggaggcggttaacacggcttacgagaccactctccaagagggcctgaagttcgagcgtcgcaccttccatgccacgttctccacggttagttcaagtttaaatatctgcttaacactatttaatctcttgtattttctttcatccaataggccgatcgcaaggagggcatgaccgctttcgccgagaagcgccctgccaagtttaccaacgagtaaatactaccctaatcaatcccagccagctttgcatttatattatctaaaagaaaaactgttgtttctacgcaattaaaactttaatcgtgataatttgaaaatgaacaatttaccataatttgtcattagtatatgaggtatgctagtccgcatgtcaggtggtaatccattagtataaacatggtatggccacttgacagtcggcttgctagcccgattatcctcctatttctaatcgaaacaaaataagtgcttaggtgacttccatggttgtgtcttgttgctttcgagtttggaaggcatgttttttggaaaattgtgcgctgtgtagcgttgccttcgtgaagaatattcaatctcatggaaatctatacctccccgtatccttctcgagccatgtggatttttatagtgcctggaggcatcggagtcatcgcaacaacgagctaaatgtcgataatttcgtgaccgtgagtagttcttatccctgtgcatgggacaatgttctgtaaatcggaaacgattcccctttggttcaatcacacagggatcacttagttcggtggtaaactcgtagtttcgatatgtaaccaatcctcgacgtatgcccggattttgtgactcagttggccgtgaggtgagcaagtaatctgtgcacggcctgcatttctctacatgcctcttagcccgctttttgcgctcccgatgttcctcccactcccgctgggcacgggataccaaaggctgaggaacttgacagggagctgtctggcgtgtatcatttgagtggcagctccaatgactgcaactatccgaggaacaacttctgttacgtagtggggatttctttgcttgcgacttctgataattcctgcctcttggtggccgcctggaacaggatggttgcccaaaggaggagttggtactcctgtacgtaacgatttctgagcccgatgtgtgcgtatttcgtatcgaattgcctcttttctttatagttgtagaccataacttgggatctcttggtccgcgtatatccaggatactgtcctgatccctgaaggagattttcctgtccaaaggattc

SEQ ID NO: 14198 - DNA, 1055 bp, DROSOPHILA
cgaacgcggtcacacctgccccactagtgcgccaatattgctccagtgcttcgcagcccggctcagagttccttcaattgaaaatggccaacattgctaagatcttcgctagccgcgcccagtgcgtcctgcaggcagccgcccgtcagccacaggtggccacccgtttcagcagctcctccaccaacaacaactgggagtacatcaagaccgaagtggccggcgagggcaagaacgtaggcgtgatcaccctgaaccgccccaaggccctgaatgccctctgcaatggcctgatgaaggagctgtccaccgcattgcagcaattcagcaaggataagaccatctccgccatcgttttgacgggcagcgagaaggccttcgccgctggcgctgatattaaggagatggtgggcaacacctactcgcagtgcatccagggcaacttcttgaacgactggacagaggtggcccgcacccagaagcccatcattgctgccgtgaatggttacgccttgggcggtggctgtgagctggccatgatgtgcgacatcatatatgccggtgacaaggccaagtttggtcagcctgaaattgccctgggcaccattcccggtgccggtggcacccagcgtctgacccgcgtcgttggcaagtccaaggccatggaaatgtgcctcaccggcaatatgatcggcgcccaggaggctgagaagctgggtctggccagcaaggtggtgcccgccgaccagttattgggcgaggccgtcaagctgggcgagaagatcggcacccactccaatctgatcgtgcagctgtgcaaggaggcggttaacacggcttacgagaccactctccaagagggcctgaagttcgagcgtcgcaccttccatgccacgttctccacggccgatcgcaaggagggcatgaccgctttcgccgagaagcgccctgccaagtttaccaacgagtaaatactaccctaatcaatcccagccagctttgcatttatattatctaaaagaaaaactgttgtttctacgcaattaaaactttaa

SEQ ID NO: 14199 - protein, 295 aa, DROSOPHILA
MANIAKIFASRAQCVLQAAARQPQVATRFSSSSTNNNWEYIKTEVAGEGKNVGVITLNRPKALNALCNGLMKELSTALQQFSKDKTISAIVLTGSEKAFAAGADIKEMVGNTYSQCIQGNFLNDWTEVARTQKPIIAAVNGYALGGGCELAMMCDIIYAGDKAKFGQPEIALGTIPGAGGTQRLTRVVGKSKAMEMCLTGNMIGAQEAEKLGLASKVVPADQLLGEAVKLGEKIGTHSNLIVQLCKEAVNTAYETTLQEGLKFERRTFHATFSTADRKEGMTAFAEKRPAKFTNE

SEQ ID NO: 14200 - DNA, 5830 bp, DROSOPHILA
ccacccgggttgcgccgtagacgcggcgtggcaccgagtagctcgagtagatggggtaactcgacttgtacacctatatggcaatggtttcaacattaagacaacatcgaatatgcaaggttcggtgattatgatttgattagcggaatgagaaagcagagaaaataaaaaagaacatataagaactagaaacagaaacgtaaaccatatgttcgtgatctctccatttaggcagttttgtctgccttatgattatggaagtagtcgattttacatcacaaaaatgatgatatatgaaatgataataagtaaagaatgcatcttgaaaatgcttactactttcagattatttaacgtgggatcgtgggatttacccagaataatttctattttgattaaatggattctctagtgctttaatctaaataagactatgatgtgagggcttattactaaccgaatctgtttttccagtgacgatgatgtgatggatgtgattgaacagtgtgtgatataagtcaatagaaaagaatagtaataatccatagaaagatggatgatgacaagcgatgtaggcgataaggatgaaaaccaaatacttacacgagttactttctcgaccgaggggtactgaaagtaatacaaaatagagcaagtcatgttttggttcaaaagagttgacaactctcatatatttcttgacagaaacggtttagatttccttatcctaatttgtgtcttcagtatgaatatcgtatcgacctctatatatgttcatttcaagaaaatataatgctacgttcatttgagataagaccgtgtttattttattgtatcacaaatatgttttaacatgacttcttgaaggttgcaaatacacacagaaattgttgatcttgttcggttaatctagtctatatgcgaaactatttgggcattagtggtgattagtccaagtcaaaacgaaaatacatcatcattgaaaacttcgtatacaaatatatatatatatatatgggcactcaaggttagcgggttaagtggattatttgcaaaatgtatatatttatatatatatataaattcagaacaatgacgtattagtgggcaccataacattcaaagccgtggacagccaacgccgatcctttgacgctgtgcgtctcctacacgtggtaggagaagtggcggtacttggtgccgccgggcaggttgccgctggtggtcgaagaatagctgtagccaccgggtccggcgccagtggtgctggtccgctctgtgctgtagttgtacgagccgccgggaccgctgcgcgacgtcttctccacagtcgacgtgtacgtggagcgctccgggcggtacgagtgcgggttgctcgagtcgtagctgctcttctccacggacgacttcgaggtgtacgagtagtccgaggaggcccggctgcggtgcgagcccggtctgtccgtgcacaggtctaagcgtggagtctataaattccgatttgatagtgatatagagataaggtttggtttggttttggttttggtttctatttcggcattggcagcacaagcatcataaaaggattaaacttgctcctgctgctccacgaactgctgtatgcaaatggccaaagaacgcaaggcgactcaattggggaaattgaaacatgttcgaactgttttactttagagttaagagcttaatgcaaccatctatgcacacaaatgctatgagtctatgaatgaaacgttagatacatgggtacacagagaaaaaagcactgaccgtttgtagttggaatctcattgaacaatttctatagagcgtactgctaaaatggaaatatttcgattacaacgtattctggatagaatgtctaaaagttctactttttctctgtgtagagtaaaaacttgttcagtgtttagtgggttaacacaagattatatggactatggctagactatatgtaggcctatcattattttgaatgcattttcagttttttttttgtctgttttagttggttatgtgtccttagatacgactaggttcgttcgactaggcttcgattgggttcgggttatcggttgggtgaataggatgatgctcccctagtaggagtacttggtgaccatcgcgcccgacctctcgttgcggtaggtctcccggcgaactggcaaggactcggagacggcgcgatggagtcgcggcagctgggcgtccagactgtcgcggaaggtgcggccggcggtattgccacccgcctccacggtgtcgatgtgctggcgcaccatgcccaggatccgcgtccggttcttgtcccgggtggagacatacggctcaatgggctcgtaggccagcttgtagtcgggcttgatggaggcccgattgatcggatcgaggatcgaccgctggcgccgctcgagatcgggacgccgcactccgaaggcggtcaccggatccgagatgagcgacggccgcggcacgaacggaactttctcccagtcaattggtgttctcttcgttctctgtaatgcccaaaagtccacaattttgtttttaatttctgggtcagccggggattaagctgtggctcagtggttaggtggtgcagcgaacggggatctcaactgggcggtgcggtgggtcaaagtcatatgtacgagtatatacagtacgcgggcggggcatttatatacagcttcgttggggcagtagttgagtttggtatcagatcgcagtgctgggtgggtcaagctgtatccaataacatcgaacatccttacattatgacacaagatgcatagctacacatgtgtctgaaccctagggtggacctgcatctcttttggtttgcacaagccttaaacagatattacgtatacgcaacgttgcttgcacagttgggctgcagaaagctagcctacttaacaggtttctattgaagtgcagtaatgaaaatttagattttgtttttccaaacggtccaccctagtctaaatacacatatgtatatatgcatattgatacgacgtagtgtggttgtgagtaatgtgcaatgggagcattaagatggaacacaaacagcaaacgtatatatatttacagcaatttagccaagtttatttatcaattaagccagttaccctacattctaaccctaaataccaaaaattaaatctcaataaaacgtatttcatagatacacatcaaagtagattgccgttttcattcatcgaatcatcaagttatcactataaattataaacagcgagtgcttttcaaaatgtatatgcatggcacacagaaagtgtccagacaagatggatctcttggggattcgatgtacctacatatatatccttgctttggattatcatcacattggacagtcgaaaaaatgggcattttcttatgttgttccctctaattttcgaatattttgcgttattttgttgtagttgcttgccatggcatcggtttatttgaatatattatggaaatcggaaagatatttttaggaccagcaaagagcgaaatgcgcgcgcatatagtattacacatacaaaaagcaaatccacggcccgtacaaaaacaaattatcgagagagctgtggctccgtatgagtttcatcgcgaattcgcatgtgtttggaattccactcgcccatacatatgtatatattctaaacatttttgggcaccagaccattagaccaccagaccagacggacctcagcattttgtaaataataataaaatatagagatagagaagaaaatgttcggcctccgctaaattcttagttcccaaaatgtatttagcgtgttatatttgggaggtgagtaaacacgtatatccgaaagagatatgaagatcattgcacagcaataaatttgctgaagattcaattcccacgatcgcgcgaaaattgcaatcttttcacactcgcatcgttttgtcagaatattttgtcacatatttattatttcggtctggtttaattatggttagacgactgtgcaggcacataactcagatatacatatgtagtattcagtgtagtacgagtacaccacaaccattgtgtgagagttattaaattgttagaaataggcttatgtatgaattactacacaaatgtttacactgaacctgaaaatgctatatatgtacaacatgggcagaacgtctaggtgatcattaaatataatatctctgagcacaaggacattccgttgcgaaagaccagctagttaggtactgtaagttcgatacgatattcataattggtagacactttacattcaaacgtgtttcaatttctcaagtaatctgctcgcttctcagaatgataccattgagtacagcaagtgggacacaagcgcttaaaactgaattcttgtgactacagattcgattagccattagctaagtgctaacagcaaatagttaactgctttcaaatttgtcaaatttatcctcagcgttttttgcaatcacaggttagtttattcttgaactgcttaagtttcgagtttggcaactgtacgcacagatatatttcacagatttaaatcgaggaaaaccacactaccgtatgtcaagtaaagttcagattctatttcgaagggcttaccgtaactgcgtaggaagttgtcaccggcctcgaggagtaggttctgcgggtcgtaaatccactttcgtaaaccatgttgagatttttagatttggatgctttgagagttttcaaatagaattgttcgttggattttggttcggatatatcgtcgttgcgtgttgttcacttgacgcccgttcgagttgatctgcctgagaatcgcacggagcacttgcttataattttttgattttcaaaattttcacagccttcgatcccgctctctctcgcacgttcggtccatacctctttctctatccatctcccaaatgaacttatttttggaattaagaaacattgacatctctcctcgcaaaagagcgagcgaattctgtttacataaagccagcacttttcatacagttgcgttcggaaaagcctatatacacatgaaatgtaccgagtctagtgctcccaggatatagagcccttatctgcgaaaacagacgtcacggatttcttccagaactttatagataagattagaatctgtatttagcatgggatatgactcgaattgatgatgatggcatctgaagatggaggaaaggctaatatttggcataggctaaatatgggtcgataaacatcaaaacattcggcggattatttatttataaatctgccacaagaatttctcaatataatgagcaattattgattatggtaatttcaatatttttacatttaattggcatttagcagtatgattacatgtagacattaataatgtttatagcttaattcgtattcccatcattcaaaatatcagcattcaaagcatcaccgttgtttaaagattgattagccaaaactgatatgaatgagcttggcattttttgaaacaaataaggcgtgaaattaaaatcctgagagcaatttatggtcagtgggtatcacctgtggaccggacacagagctttccacacaaatagctggatataaattattaagaaaatacaaaaatgaaaataagataaaaataaatgttgttttccaacagtttgaggccagattactcataccatcttacaataagatcggaaacatgtattcgtgaacatataaataaactgcacatcatcctatacccacattttaaatcgggtgtgtaggtgtttgcttgtatataaacaaaaccat

SEQ ID NO: 14201 - DNA, 672 bp, DROSOPHILA
ctcgaacgggcgtcaagtgaacaacacgcaacgacgatatatccgaaccaaaatccaacgaacaattctatttgaaaactctcaaagcatccaaatctaaaaatctcaacatggtttacgaaagtggatttacgacccgcagaacctactcctcgaggccggtgacaacttcctacgcagttacgactccacgcttagacctgtgcacggacagaccgggctcgcaccgcagccgggcctcctcggactactcgtacacctcgaagtcgtccgtggagaagagcagctacgactcgagcaacccgcactcgtaccgcccggagcgctccacgtacacgtcgactgtggagaagacgtcgcgcagcggtcccggcggctcgtacaactacagcacagagcggaccagcaccactggcgccggacccggtggctacagctattcttcgaccaccagcggcaacctgcccggcggcaccaagtaccgccacttctcctaccacgtgtaggagacgcacagcgtcaaaggatcggcgttggctgtccacggctttgaatgttatggtgcccactaatacgtcattgttctgaatttatatatatatataaatatatacattttgcaaataatccacttaacccgctaaccttgagtgcccatatatatatatatat

SEQ ID NO: 14202 - protein, 131 aa, DROSOPHILA
MVYESGFTTRRTYSSRPVTTSYAVTTPRLDLCTDRPGSHRSRASSDYSYTSKSSVEKSSYDSSNPHSYRPERSTYTSTVEKTSRSGPGGSYNYSTERTSTTGAGPGGYSYSSTTSGNLPGGTKYRHFSYHV

SEQ ID NO: 14203 - DNA, 13587 bp, DROSOPHILA
aaaatcgtttatttaagacttaaaaaatatgtaatcaagaacaataatattaatttcagagataccatgaaattaaatattattaaaagaatttttcaatattctcaatttatacagtaaacgtaactagaacgaaactcactcgcttttccactcaactcagtgcgctgtggtgaatagccaatgagaaacggaatggaatcggaccgagttgagaataattgtaaatagtcgacgaaaagcggtgaaacacacccccaaccccgaccaacaaaatccactcacactcaccatagcaacaacaacaatgaagcaaagaactgtcaacagccaaaaacaaaatgacgaatttatgaactcctcagcgcgctctctttcgcgctcccttgcttctagcggcacgagtgagatggcagcaacaaaaggctctcactcaaatacggctatatagagttgtctcgctctaacacgcggctagcttatgaattggtattgttttgagtgcatgggaatgtgtgttcgaattggaaaatggaaatgagttatgcctcgacgccgacgtcgctgcaagcagcatgggaatgcactgcatgtgtggccatctcgctcacaccagtctaattgaaaaccgtattttttcccatatttcttttgcggtttaaactggcggtttgcctacgtcacgtaaggaaagtttcgggccatgttctctggaaatgtttccttacgtcgcgttacgtggtgttgaaaacctttcgccgtaagacacatcagctgttgttgtttctgttttggggggtcagtcgacgtcgcagttggcttcgctgtcggcgtcctcgtatttgttgttgatttttgcgttgcgtttttttgttggttttgttggctttggctttggcgcttttggcgtttacatggcgaaaagcgaattgggattcattcaatggtcagctgcgtgactgtgaagcagcgacggcgctccggaatttcccgtttcctactcgagaatacgcaaattacgataaatagcacgaaaaaccggagaccgcaaatacgggcgtaaagtcgtcaagtcgcaaagtgtgtcgtaaaacgttggaaaaaataatacacattatttgcaaaaaaaaattagacaaattttataatattttattatttaataaaaaatcaaacggcacaagaataataacatacatacatatataaaaaggaagcaaagcaactctgtgtgataaagcagtttaaattattaaaagcaaaagccggcaaaaaatcaacaaatatgttgaagaaaattgtaaagaattcagtttaaatccgaatataatattttaaagagcattaaacaaacaagtcccaaaatagtagaactaatgcaaatacaaacatatcaaataatgggcaacaaataggcaaacgataaagaaaataccaacaaaagcgggaaagaaagtccgaaacctttgagagcatatatttggcaagaattggctaaaatccgtgcagcagcattaccaattggtctcggcccgaaaatgcttttgagcaatcagccggcgaatacgaaaccgcagcaaacgccttcgccgtcgcagacgcagaacttcaagtcgaagctgcagcagcagattgtttcggcagcggcggcggcagcggcgaacatagccaacggcagcagccatcatcatcatcatcagaaccatcatcatcaccatccgctgaacaaccatcataatcacaatcacaatcagcacaacatttccttcgccacggatttctcaattgcggcgattatggcgcgcggcggaaacgccccaagcagccgcgaaccttcggaacgcagtctgagtgagtaaagtaattcccgcactaaaatatcaggcctacatcgcaaactagactcaagagctgttcaaaaatagccaatgcattttagggcttcattttcgattgggtttcagaacaataagtatcttgatatcgttagtttgcatgaaacgagcttaaaaaccaatcttcatttgagtcccatcgcttcattcatgaacgtatgtttcttatgattcttgaattcatattcagctccttactacaaacaagtttcactctattaacatattcaatattccattctttcgattgagactaataaattggccagtcaaagtttgaaaagattttaactctggcatatctagcatgttgatgtttatcccaagttacgggcttgtctgctgatttaactataaatatttacgatccaggattaaaatatgaaaggcttgataaatgattgaaaataatcaagctgtgacgaagagccaattatcacatttatgtattatttatgtgaattttttaattcagatttcagatacaagattaggaaagtacactcaaaatcgaaatagaactcgataaaatcacacataagagcagaaacaaaatgcattgccagaaaaatatatgtgtagcaaattggctttgaatacttgagacttgatgaagaacaaaagcaaattagtaggttagtgtgctagcaagaaaattgaaatgtagttgatatttctatatatttctagaaacacgtaaagcagttaggaaaatatataaacatatttcattggctttggtaaagagtcatgtaatcgattgcttagtaatattcacttgctttattacccacctcttgaaaaactgtcgcagctgcattacatttctatattttccacattttttgctgccctttttgtgcaatataaattatatattgatgacaatgcaacgttgatgacttgataattgcagcaaatgcgcggcaataaaataatcaaagcctatttgaatgcgccaaaggggttgggaaatgcacatgacaggcgcagagcagatacatatatatgtataatcgcatttgtatatacactctgaatgcaaaactatttagatgccataattgggcagagacaaaagcgcaaacagatgcattcattagtgtgaaaaccgaccccccccccaccatcgtgcacaccattctctttcaattggcaattttcattggcaatgccagcacacaaatacacacgaaattaacatatgaaattgcattttgagcaaataattgaatttctggcgtaatctgtaaaatgcatctggtcgcgaactggattctcgttggcattgctgttgcgactcgtcatcgacaacatgcaacatgttgcagcccagcagcaactcccacattaacgagccacgctgatgtctctcttttctaagtgcactgaaagaatatgctcttctaatatgacaacaaacaattagcacttatgtctgttaagaaatgatatacttaaatacacattctttactgttagaaattcgtaggaatcttttttataaacttataagctctaagtatcattatatttaatattaattatttttggttacttgtatcaaacattaatttttaatgattgtgttttgtagttgcaagtagttgtttttccataattgggacttagttactgacgcattctgccccccattcatttctggtcgtgtaggtcccgcatctgtggagcgctattcaggccaggatgcggacgatgatgttgacgttgatgtggtcgactgcagtgactcggaaatgccgtcggcaactgcggcagcagcagcggcggcaacaacagcagcggctgcagcggcagcattgcaggcgcagcaacaagcgcgtcaggcattgcgtgttgcacagcaacaacagcagcagcagcaacaacaaaggcagcagacacatcaccacgcaacaactggcaagcaacaacgccaacatcacaatcatcacagcagcaacaccaacaacagcagcaactcaggcaacagcaacaccaacagcaaatcaagcagccagcgagggcgttctgctgccgcagtgggagccgctgccacgccctcgccaccgccgcccccgccctcgcaaagtccggaggaactcgaacgcctgtcgccagaggaatcaccagcccaggtaaagctgcacagagacataaatcctttttgcttctagaaaaagtggctagcaaaaagtattattagcaaaatttataaaataagatataggtacaaaaaatttgatataggattatttcctatcttatatattatattatcttatataatagattttatatatagtagatatgattttctttgtgtgtatgcatcaccaactaagtgtggcgaaagaaatatgcatctcctcgagcgtcctactaaaatcgcctcctaattctctactccttctttttcatctctcttggcaatgccacgcccacagcagcccacgcccaagatagtgggctcgtgcaactgcgacgatctcacgcccgtccagtgccacctggagaccaaggagctgtgggataagttccatgaattgggcactgaaatgatcattaccaaatcgggcaggtgagtgcagtgccattgccatggcggcaacaaatgcataaattaaggggtttacacctaagtgagtaggctggaaaaaccaggggtttccattgatgcagtcatgaatgatttttagcagagatgcaagcgcagatatatgcctactttattctatttaaaaggggatattctatatatacagagtgagcttatctgaagtatactgtatattatatgagatttaagttgaatttccttttttaaatgttctcactttcttatttgttgatctttcaaaactcacttcaatcaatccaccaaccaatcaagttagacatttgaaaactccacttatcgacatagccagttattgaaagaaatttcccgataatcgatcacatttcgtttatagccccggcaacttgcattttatttcattaagcgcattcgttggaattcaatttgccggcggtgttggtgaggcggagtgctgggaggagtggattggcatggggcagtccgggtcataaccataatgccgcccccggcagttggccaccaatcgagcccacgaaaagtcctcgaacgaaacacaatcaataaaaactttaatgcgcctttcacccatggaaagccaaatgcccaacttccagctcatgttggctgtaagctagcggccacgccccgtttacgccccatgccgtcttaactggaaatatcaacagcttttcggttagttcctcatttacatcaagacatttttttgtcgttgtattttttttttttttttgattgacaaggctttgaagtaatttgcgtcgattttcgattagcagaaaaacaaaagacaaccatttcgtcagctgttttagctcaaacattaaacatacatacatacgtacgcccaaaaaacacaaacacgcatactcacataagaaaccgaattaaacgacttttcattcgcaactcagtcaaagttgaaggaattattgctcgacgatatgttcgaatgttgtggcgaagttttcagggggtgggggggttctttaaaaggaaacatgaacgtgaaacataaccgtttggggcaaggaacttttgttttatttttttgcccttttttctctctcccagaaaacatgcgaaatgcgcattagtcgctaggtggtagttaggatctcccttcctttgtttgttgatttttttggggcctttttctggttggtttatttcgggtatgatggaatttcgcaatgaaatgatacacacacatctgtgaatggagtatgtattgtgcagaatgtatattcccttttcacttttgtttttataatttgtttaatttttttgtagggtactttaaagtctacccagtgctagtttttctttttatatttctgctactgtttctttgctttttgcctggcaacttttgtttattatttggctttgttgatgcttaaccctttggcggccgtcaacaggcggctctgcaccgccccgctccctgcatttacgacacattaacaaatttactcctttcggttgccccgcattttgggtacccccatccggggatccacaccaagtataaattgcattgtaatagctgccgattgtcgcgctaacaacgcatttgcatgtcctttggctttcgggacaatcgctcctttggcttcgtgtttttgcgtttttgtatttgttttttttatgctgttgctgttttttttttcggccctgtaattagtcaaaggataccgatgaacggccaacacttatttacatttgtgcgggtttgacgaacgcgtgcaacacaattgcaaaacggaggccagaaaaaaaagccacaaattcgatggaaaaacagtagccgaagcagtggcagaataattcccattcccagcgatatccatctatgtcagcacatcgtttgctagctaaacatgtccacgaaaggggcgggccaggtggctaagtgggtgtggcaatgcgggacttttttatgtgaatgatacattttaaattgcaaaatatacgactggggctttggctcgatggcatgactcgctgcagtctgtcatggcggatataatttgacaacggtaaacatgtagaaacagatccattgtccgcacttatcaatatttcaaatgaaagcacaaaaacatagaaatagggaaagattacttaacaaagatggtaaaaaaaaaggttacccaccaatcctatatacacattcttaaagttattctacgaatatttaagcaattcaaaactaacaattatacatcaaggaactaagtatcagcttatttccttatgaagttgtgatcactccattggttgcatctgttctttccattataacccgcaatttttcagacaattcgctttggcagctgtgaaaatgttgctgccacatgcaaatgcgcatgcgtggcactcatcagaaggaaaccgtgaaaagcggccaagaagtgccgcgaattgccagcacatacgaaatcgagaaaaaaaaaacgaaaagacttttcagatgatttacaagcaggggcaacgttgaaaaggcgtcaaagtcagagcgttcgaattttttacctgttacgtggtcaggttgggatggttctctttgtttgtgcggttgccgagataaaatatcacgtggtttgcgattttgtcacgctgtcagcggttttgaggttggcatttttccaaagacaaagccggaaaagtccgcagacgggctaattgtttgttgacccatcgcaaaatacccagagtttgtcaatattttgcgacaaacgcttcacgcctattagcccgagctcttttccgccgcaggacattcgaggacagtagcctgagctgcaaggatgcgttcaaattgcaatttccatggtgcaaccccttgcaggtcaagatattttcgccgctctggcatttttttttttttttggtaaacagtgtccacaacttcattaatatttgtgggcaacagctgaaatgctcagcagatagcagatagatcggaaacaagttaatccccagttgcagtaaaacgggcagggtatgagttatgaattaatcaaataataaaagatagcgaacggagggagtgtgttgtcagctggcgataagatcaaagttatagtctataacttgtctttttcgggggttgctttttagtttcgctttgttcacctactcgctggctaatttgcattttattaatttagaccttgaggcttaatttgctgtaacaaaggtgttgataatgaattgccattcctacatgtttcagcttatatgtataccatactaattgaaagccgagcgaccccatggcaaatggtgtgtaaacttcataattgtaacctttggcacctttggctctttggctgcggtccgaaaaaccgagtgagagccatttccctaattttcccataaacaaatacataaaatccacacttagaagctcggccagcgggcgaactaaactaaaccgtcgaaaccccccacgaaagcgaaatagcaaacttggcattggctgggggagtggctattgctttagctgccctcgggcggctcttcaactcgtaaaatgtatgtaaatgctggaatatgatttacgacatttccgcctagcagcagaaacaccacaaacacacaaaaaacaaaaaaaaaaataatggaaacgtgggggcgcgccattagatatggcccatcaaaacggggcgtggcagttgctcggctttcacacatttatggattacattagcaggtcggtcaagccatcagcaaagtgttaacattttactcgaaactgagaaaaatatttgccaaaactcctaagtaaaagtgtaattggccaagtgtctaaaaatatattgatttatgaagttatcaacccttttgaagaaaaatgtaatgaataaaaatcgactattgtttcttgtgcttaagaataccttgagaagtattatgcccagtgcattatgtgtagcatgagcttcttatggaaattctttccattcgtttcggggttagaaacaaaatgggagcttccggtttggcggcttccgttctcgagttttggcggtcaagcttgactgcagttagtcagtcagttgaagtcggtttgtgggtccgtgcagatatcgagataagcgaaacacgttaagtgcccgctacaatggtgctaattgtggcatgcaactgcgagtgcaacagaaagagcttacagcacaaatcacaattacaacttgtgattcccggattcgttttggcctggtaactgcgataaatacgcggccacagaaacaatcatggtgacactgtgcccgcccattacaataatgggctgtaaacacagctcgaacaaacaagagttgtacgttatgcatactgacatatgtgggttgaaattcaggagaaatgggaaaaaattggactggaaagaagtcttcaatcgggacctacaaacctatacaggtacaaattgtatttgcgtgcctgacaattaaagtccttttgcatttgaaatgctcgtattaacacatttgttattgaataaatgtatcttaagataatacggcgaggtttgcaaagacgccttatgaaaatatcagtcgtttagtttcaagtttcttgatcgccagtaaaccaatttgttaaacaaacaattagaattatgcaacccagactatcggctttactatttgattcatggtaggcgttctttctgcaagacaaatgacaaaaaactgggctgggtcattagcgtcatttacacttacctgcgaccacaaacacgattttctgcgggtggtgggtggtaagtgggtgggtcggcggtacacaccccgttccgcccacccgctgggcgaacgtcctgcgttcaggacgacgacatcgctttcggaaatgtgtcaaaaacgtgctaaaagtcataaaattaaatatgcgtcttatttacataccttgctagctcaccacctacttgttttttttttgtgtttttgccgccacaacacaatggcgggcaataaaaaaatagttcatgatttttcgtgtttttcttgtgtgtgttttcgtgacttcactagtattttccgaagactttggtgcaacataaaatgtactccatccaatacaatactattaaattattttcattaagatttccttaatttgttaaatgttttataaatttcagacgcatgtttcccaccgttcgagtgagtttctcgggtcctttgcggcaaattcagccagctgaccgatatgccgtacttttggatgtggtaccacttgattcgcggcgataccgttacgcctaccatcgcagttcgtggctggtagccggaaaggcggatccgccgccaccctcccgcatttacgcccatccggattgtcctctgagtccggaggcactgcgaaaacaggtcgtctccttcgaaaaggtgaagttgacaaacaacgagatggacaagagcggacaggtgagtcgaagcgtctcaatttatggagttcagattttaagaagccagaacaaagccagaatagagttatagttagaatggatcgatacgttttaacagtttttaaaattttaacaaataaccctcaagctttagttagttaaccttcaactttcaaggattaaaagtaattctccgaaaaaatgctgctaagttagcttctactcttttatagcccgaacctgaatcatctcagtcttgaataatttaggctgcaagacaaactcataaactggcggcccgtcttgccattgtcttgcgattcggcggggtcagccagggttgccaacgaacgcgagtgcacatatgcaaatggcattgcgcgcgcacaaaaatgaatgaaaattgttggcaatttggtggcaaatacgagccgtctcagaatcctgttggcatatatatttctggggattttcgagcctgctaccgtttttatcacggccataaaggcggtggatgtgagtgaaggagtggagtaaaaagacgctgcgaggacagtcaaaacaaacgtcgactacttttttatggacgtacatttattattgagccgtgtgtgcgctccaaacaaacaacaacaaacaatccgcattcagggaatttttcttctccaaaaacccactttttgcaggtcgtgctgaactcaatgcaccgctaccagcccaggatccacttggtccggttgagccatggccagagcatacccggcagtcccaaggagctgcaggatatggaccataaaaccttcgttttcccggagaccgtattcacggccgtgacggcctatcagaatcaattgattacgaaactgaaaatcgattcgaatccgtttgcgaagggatttcgcgattcgtcgcgtctcagtgactttgataggtaagtttttctcccttctagtcttgcccgatttccattcctctagtccatagttgcccccgtttcggttttttatggggtcatgtctgatttatggcctgatttacgatgtcctgttgagccgtaaagccgatacagtagcccaacttgccgctgattagcgaaaatgtgtgaaagtgccagtctgcgaagcgattcctgcaggttcttcatcttcaattagcgtgcaacgtgcaacaccggcaatcaatcggatcgaacttatatgattatatgaccgatgtcggtgtgtgatttcgatacacatttcatttaagagcctttaaggaaagtagggcaatttgaagtgctaccacctttggaatttatttagtagaaataaacggtgataagaaaaacctaaaatttccaaaaatatataaatgatatattcttcacgtagtcgaaattgcttgcaacatttctgcggatcagcaacatttgagtgtcttgtagcaacatgttgccctactcccgacaggatctcgccaaaggcaattcttttgcagcattttggaggactgctgcccttttttcggacagcgacttcaaagtgttgcaaggcggcgactattaagacggcaaatgccctgccgccagcagcaacacgggcgcagcagcagcaacaacagcagcaacaacaacagcagcggcagcaacaccaaaagcaatgttgctgttgtagccggcacggcggcggcttaagtggcgtaaattacagatcggcgcttttaactttgatgccgattcgtacatgaaatgaaaacacgaaaataatgagtgaatgtggctcttgttgctgttgttgctggctttgttgttcctgttgtttagtgtcggcaattggcagttactttcgacgtaattatgttattgctccggctgaagtggcagcagcaacaagttgctcatcgggttctgacactccaggtttcctcaagtcaagctcgaacttccccaaccgaaacttaatagagtggcaatggctttaaaagagcaaactctgtcattgtttcgactgattagaggcacgaattcaaaagaatcatttaattattattatttattatttaatcatttaattatttttgtgcaacatttccagggatcccatggatgcgttcttcttcgaccagcacatgcgtactgctcccctgcgattctttcccgatccgctgatgtcccaattgactcctcaggaggcagatgccgcatcaatggcgctgttggagaaagcccgccagcacttgcagatgtttggacgatcgccgtacacggagatgttgctgccacatctgtatcagcgatcggcggcaccgccgccgcccccaccggccccccacctcagcgcctttcagctgggaatgtggcagcagcagtggccccaactcaccgccggattcctggccagcgccaatcagcaggcggccttggccttggcagcagcgggcgccaatcgaacgccaccaccttcgatggcggtggcgccaccagctcctgccacgcccacctcctcgtgcggttccgcctctccggatctgagggccagaccccaactgaatcattatcctcagcggttcagtccgtatcaggtgccccagcatcaggcatcgccaccagcctccaatcgagcagaaagtccataggatacagctaccaacgaaaacaactaaaccacccaaaaaaaaaaaaaaacaccaaccttttcccattttgccccacccaaaagaaattaaactccgatgtggtttttaaatttggaaatcctacttttcgtgtgcaataaatcagtttaaattcccattaaaaatcaaaaattaaatttaaaaaaatcacagattgggctgtttgaaagtttaacttattaaaaaggtgcaatcaaattccttctgtctgaaacaaaacaaaatatcataagtttcccaagtttatagaccacattagaataccaacgaaatgtatgtgcaatgttgttgaacaaaatgaaagtaaatatatccctttgtaaataaccccgaaaatgttgctgcgacatccatcgatgttgcatgtgatgctaagctagagaaccgtcttaaccggtttcactgtattgtaattttggtagcattataacagtattagttaatttaatattaggcctaggcaatacgcataccctttacactttctgctgtgttttttcgttgtcgtcccatgtgttcctaatactgcaaatcattgtgagaattccacgctgaattaaaccctctagacactccccgcaaaaagcaattgcaaaatccaattactataaacacttatttaaattatgtgcaaaaagataggaggaatcaaaactgaataaacaatttataacacaaagagaaaggcatttgttcatatttatttgtgctcgtatttttttctgtatattaatattgtggcttaatggctggcaaatataaatgtttgtgaaaatatggccagctattaataaggttaatgctgctgatgggttgcaggttgcaagcggctagttgcatggggagcagcgtgcaacttgcaacctgcaacacgtgatgcgcagtcgcgcatggccactgacatttgggaacggcaatgaaatataatttatagaattttgtgctctttatgaaagtctaattaattaccactccgtgttttagtccatgttgct

SEQ ID NO: 14204 - DNA, 2555 bp, DROSOPHILA
ctcgagaatacgcaaattacgataaatagcacgaaaaaccggagaccgcaaatacgggcgtaaagtcgtcaagtcgcaaagtgtgtcgtaaaacgttggaaaaaataatacacattatttgcaaaaaaaaattagacaaattttataatattttattatttaataaaaaatcaaacggcacaagaataataacatacatacatatataaaaaggaagcaaagcaactctgtgtgataaagcagtttaaattattaaaagcaaaagccggcaaaaaatcaacaaatatgttgaagaaaattgtaaagaattcagtttaaatccgaatataatattttaaagagcattaaacaaacaagtcccaaaatagtagaactaatgcaaatacaaacatatcaaataatgggcaacaaataggcaaacgataaagaaaataccaacaaaagcgggaaagaaagtccgaaacctttgagagcatatatttggcaagaattggctaaaatccgtgcagcagcattaccaattggtctcggcccgaaaatgcttttgagcaatcagccggcgaatacgaaaccgcagcaaacgccttcgccgtcgcagacgcagaacttcaagtcgaagctgcagcagcagattgtttcggcagcggcggcggcagcggcgaacatagccaacggcagcagccatcatcatcatcatcagaaccatcatcatcaccatccgctgaacaaccatcataatcacaatcacaatcagcacaacatttccttcgccacggatttctcaattgcggcgattatggcgcgcggcggaaacgccccaagcagccgcgaaccttcggaacgcagtctgagtcccgcatctgtggagcgctattcaggccaggatgcggacgatgatgttgacgttgatgtggtcgactgcagtgactcggaaatgccgtcggcaactgcggcagcagcagcggcggcaacaacagcagcggctgcagcggcagcattgcaggcgcagcaacaagcgcgtcaggcattgcgtgttgcacagcaacaacagcagcagcagcaacaacaaaggcagcagacacatcaccacgcaacaactggcaagcaacaacgccaacatcacaatcatcacagcagcaacaccaacaacagcagcaactcaggcaacagcaacaccaacagcaaatcaagcagccagcgagggcgttctgctgccgcagtgggagccgctgccacgccctcgccaccgccgcccccgccctcgcaaagtccggaggaactcgaacgcctgtcgccagaggaatcaccagcccagcagcccacgcccaagatagtgggctcgtgcaactgcgacgatctcacgcccgtccagtgccacctggagaccaaggagctgtgggataagttccatgaattgggcactgaaatgatcattaccaaatcgggcagacgcatgtttcccaccgttcgagtgagtttctcgggtcctttgcggcaaattcagccagctgaccgatatgccgtacttttggatgtggtaccacttgattcgcggcgataccgttacgcctaccatcgcagttcgtggctggtagccggaaaggcggatccgccgccaccctcccgcatttacgcccatccggattgtcctctgagtccggaggcactgcgaaaacaggtcgtctccttcgaaaaggtgaagttgacaaacaacgagatggacaagagcggacaggtcgtgctgaactcaatgcaccgctaccagcccaggatccacttggtccggttgagccatggccagagcatacccggcagtcccaaggagctgcaggatatggaccataaaaccttcgttttcccggagaccgtattcacggccgtgacggcctatcagaatcaattgattacgaaactgaaaatcgattcgaatccgtttgcgaagggatttcgcgattcgtcgcgtctcagtgactttgatagggatcccatggatgcgttcttcttcgaccagcacatgcgtactgctcccctgcgattctttcccgatccgctgatgtcccaattgactcctcaggaggcagatgccgcatcaatggcgctgttggagaaagcccgccagcacttgcagatgtttggacgatcgccgtacacggagatgttgctgccacatctgtatcagcgatcggcggcaccgccgccgcccccaccggccccccacctcagcgcctttcagctgggaatgtggcagcagcagtggccccaactcaccgccggattcctggccagcgccaatcagcaggcggccttggccttggcagcagcgggcgccaatcgaacgccaccaccttcgatggcggtggcgccaccagctcctgccacgcccacctcctcgtgcggttccgcctctccggatctgagggccagaccccaactgaatcattatcctcagcggttcagtccgtatcaggtgccccagcatcaggcatcgccaccagcctccaatcgagcagaaagtccataggatacagctaccaacgaaaacaactaaaccaccc

SEQ ID NO: 14205 - protein, 660 aa, DROSOPHILA
MLLSNQPANTKPQQTPSPSQTQNFKSKLQQQIVSAAAAAAANIANGSSHHHHHQNHHHHHPLNNHHNHNHNQHNISFATDFSIAAIMARGGNAPSSREPSERSLSPASVERYSGQDADDDVDVDVVDCSDSEMPSATAAAAAAATTAAAAAAALQAQQQARQALRVAQQQQQQQQQQRQQTHHHATTGKQQRQHHNHHSSNTNNSSNSGNSNTNSKSSSQRGRSAAAVGAAATPSPPPPPPSQSPEELERLSPEESPAQQPTPKIVGSCNCDDLTPVQCHLETKELWDKFHELGTEMIITKSGRRMFPTVRVSFSGPLRQIQPADRYAVLLDVVPLDSRRYRYAYHRSSWLVAGKADPPPPSRIYAHPDCPLSPEALRKQVVSFEKVKLTNNEMDKSGQVVLNSMHRYQPRIHLVRLSHGQSIPGSPKELQDMDHKTFVFPETVFTAVTAYQNQLITKLKIDSNPFAKGFRDSSRLSDFDRDPMDAFFFDQHMRTAPLRFFPDPLMSQLTPQEADAASMALLEKARQHLQMFGRSPYTEMLLPHLYQRSAAPPPPPPAPHLSAFQLGMWQQQWPQLTAGFLASANQQAALALAAAGANRTPPPSMAVAPPAPATPTSSCGSASPDLRARPQLNHYPQRFSPYQVPQHQASPPASNRAESP

SEQ ID NO: 14206 - DNA, 6729 bp, DROSOPHILA
agcagccgactttggcttggaaatttatgaaaatgatcgcatcgaaaattaataaatatcgaaataatttcgagtaaatttcgtatgcaaattggcgacgtgcacaaatcggcaaaaagccagtcacatcatcgcccggctttgcacacttaaaagtgttgagtttcgactcgcagtttttgcctaactcgttttcgatcgtgccaagtgattaaataaataattaattagtttgaatttatgaataacggttgtaaataatcattaataaaaattaaaaaagatttcttttactttaagactgcgccactcagcacagccccaaaatccgtagcaacatcattagcatcgatcgcgccgaagcatcagcagaatattcaaattagaactgctgggctggcttccagatacagatgcagatacagatacacaaattcgaattgaactcaccgaaacaggccgaatggaagcgctcgctgtgacttgggcattgtttgcttaaatatgcttaaatttattgacaacaatttgcggtcttttatatctgcctttgttcgcatcaaattattaattggagtgaaacatatttcgctttttagagctaattggctggggaaatacatactgtgttttttaagttgcttaaaactgtattaaatatttataagattagatttctgtaaattataagaaaacttattaattatattaatcagggaaaggagaagaaccatcgattgctaagaagggagcttaaaagttgaactcataaaattttaaaaattaattgtttacatgcttagttgctcctaaaatgttagaaaaaataatctgtagttttgtagtgttggaatattgatattatacgaaacaccttcatttgaataactgcttagcacaccatttgaatgtactatatcaaaatctctttaaactttcgatgaaaaatttaaacgcctctttgtacatcagtttggtggctcttaaaagagccgattataatcgatgtgatcctggctgtagagccgaatccaagttctggctggttccatatccacttccgtttccggctatgattgttctggcttgattacacggcccacaaaggggccttggtcctggctggttagtctccatcggggcttggcattgaatgttgcccttgccctctgcgtcgtggccatggaagatgttaaggatgtcctggatcttcctttggccgtcgaatgcctggtgaaaatgaattgggcgaaaagatgcgtcccaactttcccggcactcagctcaaaattaaacaaaatactcgactcctcgttgctcactttctgtaccaatcatcaggttgccttggcggttcggtgcgcacctggccacgccctcatttgggcggagcgcctcccattggcacggatccaggcacgggaaccaccattccggcagcggctgccgcagccgccaggcccaccatatctgactcatgcatgggcttcttcttgaggatgcttaggtcgttcacgttctccaggaaggacttgtgggcggagaagaccttgacgctatcgaagtccttcttcagctcctcgatgtcccgcttctgcttggctcgccggttctggaaccaggtgatcacctgggcgttcgacagtcccagtgaggcggcgatctcatcgcggtccgctggcgacaggtacttctggtagagaaatcgcttctccagctcgaagatctggtggttggtgaaggcggtgcgcgacttgcgcttcttcttcggctgcggcctgttcgagaagatgtccaagtgggatttatctaaaatgagagtgaagataatgatgggttagttaatacatttaattatgtgtagcttattgaacaatcatatcattatttgaatttaatgccttcacaggtacttgatcgcatgctaagcccgctgccgcccgacataatatatgttgttatagtaataagaagataatttttccgaatagctcatattaattggagtcagttactccaagtgtggccagtgaattctacgatgcacggcatttggcgaaccggttactaacgagcgactttggcttggtttttaattgcctctccgaacagagcgcgtgttgatggaaatgcggtgattgatacattttatgaatgcaactgcgattgcagttggagttctcagatctgaaatctcgaattcgcgacctcagttcgcagcttgaagtgtataatttcaagttgattgattgcgcgagtggtgggcgttcattggctttgttggtctaatgacgatcgcagctttcccagtgccgcgacttatgcaagacagcggctcatttgtctcgtttgtagtgtgatttataataattattgacacctacaaatcagttttaagtggtacacgtagccacggcttgattaatgagccactgacccgtacttaaagcgctgattgagcttgcataacgtttcctggtgcaaattattaaccaaattccggggcgcggtgccagtcaaagcgattggagcagatcgccgatcatcagcataaatatttatctattgaatattggctaaccggtttgatggcttgggacgatggcttcacacccatttcgattgcttgtcaaacaaactagatcgacattaaaaactaattaaatgccctccaaccgaatgcaaacgaagtctccggagcttggctatgggtatacccgttttacatacacatactcgtacatttggaatgcataatttggtcatttgttatctcgagcacgttttgtaacccaaaacccattaggcacttgactgcacgcctccctttcctttctccgagcctttccccgagcctttctcccccacctccgcagctattgtatttgtttttatcgggcctcattaagtaatttccatgacttatctctggagaaagggagtcgagcgggccacttgggtatccttttacccactcaggtgtccacttacaggcataaatatggctcttacttgggggagttttgttttggtcgcatttgtcagggcttcatgtcgaatgcgtttgggaacgcaggaggaaacccgatcgattttcgaggaacctgccgagcaacagttggccacagggagtttatgttttaatttggcgcgagtaccgagaatcgcaattaagatttggccagcaggggcgacaccacgtctggcattccttccactagctggagcgtttataccacggcaaaagagctgaaacatcactttccatatgtgaaaatatcttcgactagtgctagtgatattaatgggacctagtcataaattaggagaatccaatggccccacagctgcctatctgcctatcgccctgcgcagacttcctcctccgcactgatgatgatagacaaacgacgcatccaaggcgcaaaaccaaagaaatccgtcgtaaatatttcgagcgcagcttatacaacgcatgataaacagtaatatgtgtattttgtcaacttaatactcggagatacggcattatacaacgcggagcagcgagtgtcgtcgctaatcgctagttgggggtattttaaaacatgtttacgactggagctgtggccactatatttactgtacagacgggctagagtttgtcagctattatttttgagtagcaacaaatggaaacggcatgttaattgttcgccacaacaaaactcgattaggtaatgcaccagccagctaattgttgctaatcgctgcagaatcgacacgactaacaccaatatactaatgcggatagtgcggactattaaccattaattgccatgaaatcactttggggtcgggggtggagtgcagggagtacttgaacgcccactaaatgccctcggtcgagtttatgccaaaataaacctaagttgcagaataaaaatgccgcagaatgaattatactttatcatcaaattggttcgtttgtttctgtcgaccgctggcgcatgctgccaattaattaaaagcccgaaatcgaatcggttaaggaatttacataacaaaagatttcaaatggcgggtcgcgggcgagtgctaccatttgtttcaattaaacgaatttcgaatttgctgattgataaatggaaaacgtcataataagcttaatattcagcttctgcgtttgcgattccccaatttcagaacgataacaaattagaagcttttattctaattaagaaatcgcgcaaatttatttcgaaaattgagacgtttttcaaccgagacacactgatgaaatcaattgggctactaaggattccataatttagatattgattaaggaaatttcatttagcttaaataagactcgtagttagaatcatattcatattcatatcatcatcatcaatcacttcaagccactcaactattttccaataagaagaaagaacctttacgaactataactatgtatgcaatgtatatttaatctcctggatgatgcttaccttgcgactcgtcaaagtcctttgtggtcatctggaagagagcatccagaggagtgtctccgtttgactttcctgaacccgttggctgctcctctgatttcttcttctgagcttcctcacttccctcttgggtggttagtttttcaagtttttccgcctgccgtgggctgcagcattcggtgctgccattgctgctgctcgatcgctgggaacgctccgagctgccgtcctcggaagcgatgatcgcgggattcatgcccatgtggcgaaggagctgggcctgggcgttaaagtgttcctgcaactggcgatggtagtccagagccaggcgctgctcgtagtgcagcagggcggaggggatgaaggggcggacgggcatggtcggccccaggaggtgatcccacggccgaacaatctgtccgcttggcaggagcatggcagcagcagcggccgggtggacatccaacggttccgtgcgtggttgcagtaatccgcccgagggggcaatgggccgggaggcaggtggagccaggaggtttgcatttgggggcggggaaacggactcctcgcgctgcttctccgagtgacccagtatgtccgcgatggagaagctcttgaccccctcgatggccgacttggtagtctggttggtctggggctccggaactgctgacggtggactgggcgtgtggtctcgtggctccgaggaggacgaggacatgcgcaggcgcttcagcggatggaagtagtcctccggcaaattgccgacggcactccgggtgagtccggaggcggctgcagctgctgcggcggctgctgcggcatggtgctgcatcagcagctgctgctgctgcagcagatcaatggtgctggcccgtggatgctgcagcggatgaggatgcgagtgcggatgcgtatgatgctgcgtgggcagcgggctgggggctccgcccacggagatttcggattcggcgggactggccggacgcatggttggagggcagagcatttaggttcgcttcagcacttggtttcttttccgagagtttcgtttcaattcgtttggtttagcacttaactgtttttcaagacggctttgtcactacactgcaagtcggtactgacgatactgacaagccttgtacactcaaatcttgctataattcctctgatttgtttgattagtttacactgatgcttcgacacgacgacgctgatccaatggcgtaggacctctcaactcgacgcttcgcagtcaactgttcgaaactagattgaagattggtttgctaactagacacgtcgatatttcttcagttcttttgctgccgctgctctctgccgcagctctcgttcgctcgctcactctctgtctctctctctttctctgtctcgctcgcgagagagcaaaacccgttctgcgaaagagcgagatacccttatggtagtgtcatctcgctctgctcggctctcagcaccaatcggctacagcaacaaaaaatagcaatggtggcgtatacgtaacggtaattatggcgttcatcatgagactgctgtgcaaaagggatggcagacggcgagtgcgagcgagacgggcgcttctcagattgtaacgagactgtatttagtattttagtcgctgcaaagttttcacaactccaaatgcgtcgactgcggcgcaggcagtgacagagggggctaggagccccctccccactttatgtacagctcgtaaccccctcacagttagcattaatgacgatgacccccgaaggcagcctgcgtttaattgtcaagcgtttgcaattaatttgccttaagaaaaacgaacaattaatttggaggaaaacaaaaaatagaaaacagtggggatataaaaatgcgcataaatttgaagacatttggaaattaattggagtctgagaatggaaatgaggccagtttcgtctgaatgaaaacgaatattctctattttcagccaaatttggtgggaagccagtttatataattgactctagttgcttagattacttatttcggtgtgttttcattcccgacggctttttttattgcttgatttcagtattgtattcgtatatttgaatttttattttatttatataataaattgtgatgctagtaatattattattaatcgaaatattttgttgttgtaaaacatctttatgtaatatttagttgtacaagttaaattacgtattaaaataactttaca

SEQ ID NO: 14207 - DNA, 2045 bp, DROSOPHILA
gaggtcctacgccattggatcagcgtcgtcgtgtcgaagcatcagtgtaaactaatcaaacaaatcagaggaattatagcaagatttgagtgtacaaggcttgtcagtatcgtcagtaccgacttgcagtgtagtgacaaagccgtcttgaaaaacagttaagtgctaaaccaaacgaattgaaacgaaactctcggaaaagaaaccaagtgctgaagcgaacctaaatgctctgccctccaaccatgcgtccggccagtcccgccgaatccgaaatctccgtgggcggagcccccagcccgctgcccacgcagcatcatacgcatccgcactcgcatcctcatccgctgcagcatccacgggccagcaccattgatctgctgcagcagcagcagctgctgatgcagcaccatgccgcagcagccgccgcagcagctgcagccgcctccggactcacccggagtgccgtcggcaatttgccggaggactacttccatccgctgaagcgcctgcgcatgtcctcgtcctcctcggagccacgagaccacacgcccagtccaccgtcagcagttccggagccccagaccaaccagactaccaagtcggccatcgagggggtcaagagcttctccatcgcggacatactgggtcactcggagaagcagcgcgaggagtccgtttccccgcccccaaatgcaaacctcctggctccacctgcctcccggcccattgccccctcgggcggattactgcaaccacgcacggaaccgttggatgtccacccggccgctgctgctgccatgctcctgccaagcggacagattgttcggccgtgggatcacctcctggggccgaccatgcccgtccgccccttcatcccctccgccctgctgcactacgagcagcgcctggctctggactaccatcgccagttgcaggaacactttaacgcccaggcccagctccttcgccacatgggcatgaatcccgcgatcatcgcttccgaggacggcagctcggagcgttcccagcgatcgagcagcagcaatggcagcaccgaatgctgcagcccacggcaggcggaaaaacttgaaaaactaaccacccaagagggaagtgaggaagctcagaagaagaaatcagaggagcagccaacgggttcaggaaagtcaaacggagacactcctctggatgctctcttccagatgaccacaaaggactttgacgagtcgcaagataaatcccacttggacatcttctcgaacaggccgcagccgaagaagaagcgcaagtcgcgcaccgccttcaccaaccaccagatcttcgagctggagaagcgatttctctaccagaagtacctgtcgccagcggaccgcgatgagatcgccgcctcactgggactgtcgaacgcccaggtgatcacctggttccagaaccggcgagccaagcagaagcgggacatcgaggagctgaagaaggacttcgatagcgtcaaggtcttctccgcccacaagtccttcctggagaacgtgaacgacctaagcatcctcaagaagaagcccatgcatgagtcagatatggtgggcctggcggctgcggcagccgctgccggaatggtggttcccgtgcctggatccgtgccaatgggaggcgctccgcccaaatgagggcgtggccaggtgcgcaccgaaccgccaaggcaacctgatgattggtacagaaagtgagcaacgaggagtcgagtattttgtttaattttgagctgagtgccgggaaagttgggacgcatcttttcgcccaattcattttcaccaggcattcgacggccaaaggaagatccaggacatccttaacatcttccatggccacgacgcagagggcaagggcaacattcaatgccaagccccgatggagactaaccagccaggaccaaggcccctttgtgggccgtgtaatcaagccagaacaatcatagccggaaacggaagtggatatggaaccagccagaacttggattcggctctacagccaggatcacatcgatt

SEQ ID NO: 14208 - protein, 479 aa, DROSOPHILA
MLCPPTMRPASPAESEISVGGAPSPLPTQHHTHPHSHPHPLQHPRASTIDLLQQQQLLMQHHAAAAAAAAAAASGLTRSAVGNLPEDYFHPLKRLRMSSSSSEPRDHTPSPPSAVPEPQTNQTTKSAIEGVKSFSIADILGHSEKQREESVSPPPNANLLAPPASRPIAPSGGLLQPRTEPLDVHPAAAAAMLLPSGQIVRPWDHLLGPTMPVRPFIPSALLHYEQRLALDYHRQLQEHFNAQAQLLRHMGMNPAIIASEDGSSERSQRSSSSNGSTECCSPRQAEKLEKLTTQEGSEEAQKKKSEEQPTGSGKSNGDTPLDALFQMTTKDFDESQDKSHLDIFSNRPQPKKKRKSRTAFTNHQIFELEKRFLYQKYLSPADRDEIAASLGLSNAQVITWFQNRRAKQKRDIEELKKDFDSVKVFSAHKSFLENVNDLSILKKKPMHESDMVGLAAAAAAAGMVVPVPGSVPMGGAPPK

SEQ ID NO: 14209 - DNA, 2127 bp, DROSOPHILA
aaaaaaatatgcaatattctaagagcgttcattgtttttgtagctcctttattgaaattctatatacaaggttacttgaggttggatggcaattattcctggaacccgaagtaatcgaatttcatattcgcagatcgtaaagatctatcgcagatataagcagattgtaaatcttcaaaccaactgattacgaatatttagagccgatagataccactcattcggcagactatataaagaagtgccgcaagtgccattgttttcagtgtaaaaatcattcaagcgatgaaagtgcttggagttttgctgttttcggctttcgccttggtggcggcccttgaaaggcctgttcccgtgaaggatatgcccgctggcaataagattaacggacgtattaccaatgggtatcctgcttacgagggaaaagtgccctacattgtagctctgcgcttcgataatggaaacggcggtggctggtactgcggaggctccatcattggccacgaatgggtactcactgcggctcactgcacctatggagccagttacgtgaccatcagctatggagctgtgtggcgccaacagccgcagttcacccacgtttcatcggatctcattacgcatccggagtacgataccggtaaccggtaacgcatccggagtacgataccggtaacttgcacaacgacatcgccctgatccgcactccccacgtggacttctggtcgctggtcaacaaggtggagctgcccagatacgacgatcgttacaacaacttctatggctggtgggccctgctctccggttggggctcttcctctgatagcagcgggatgaccgactacctcaactgcgtggacatccaaatatcggacaacagtgtctgcctggactactacggcagccactatatcacctccaaccacctgtgctatgccactcccgagaataagggctcctgcagcggcgactctggcggaccactcgtcctccacgacggcaatcgtcaggtgggcattgtctccttcggctccgccgcgggatgcctgtccaacagccccaaaggattgacccgagtgaccggttacttggactggatccgcgaccatactggcatttcttactaataaagttcgctattttgagaaattaaacgaataaaaaagttcacttaaatcctttgttaatctttagctatcatagctacattatattttgccgtagctatgactaatcccaagatagataggtagattacaaacacatacggtgatttggtttctgtaccattttaaactacttccttaagctaactaaactatatcctctggaagaagagtccaagacttctttaaaaaatcgatttggttttgaaactaagtttcaccaaaaggagtttattctattaatatatatcgattagtatattacagataacaactaatactgcatttaacatgacccttaattaggcgctcaaatctaagcttatcatagcttatctattaagatcacactttcaggaggttgcaatatattttcattattttattaaaacatctttttaataagagatgccagtgttgtcgcggatccagtccaggtagctggtgacgcgcaccatacccttgggaccgttggagaggcagccggcggaggagccgaaggacacaatgcccacctggcggttgccgtcgtggatgaccagtgggccaccggagtcgccgctgcaggtgcccttgttctcgggagtggggatgcagattaggtcgccggagaagctgccgtagtagttctcgcacacggagttttcgccaatctggacatcgacgcagttcaggtactcggagacaccgccctcatcggaggtcttgccccatccggagaccagagcccaccagccttggtagttgttgtagcgatcgtcgtacctggggagctccaccttgttgaccagcgaccagaagtctacgtggggagtgcgaatgagggagatgtctccagatccgtgctcaatgaagtcgctacgtcccacccagtgggtgtactgtgcctgcaggcgccagagggctccgtagtagatggtcaccgattccatgccatcggtacaatgcttggcggtcatca

SEQ ID NO: 14210 - DNA, 780 bp, DROSOPHILA
atgaaagtgcttggagttttgctgttttcggctttcgccttggtggcggcccttgaaaggcctgttcccgtgaaggatatgcccgctggcaataagattaacggacgtattaccaatgggtatcctgcttacgagggaaaagtgccctacattgtagctctgcgcttcgataatggaaacggcggtggctggtactgcggaggctccatcattggccacgaatgggtactcactgcggctcactgcacctatggagccagttacgtgaccatcagctatggagctgtgtggcgccaacagccgcagttcacccactacgataccggtaacttgcacaacgacatcgccctgatccgcactccccacgtggacttctggtcgctggtcaacaaggtggagctgcccagatacgacgatcgttacaacaacttctatggctggtgggccctgctctccggttggggctcttcctctgatagcagcgggatgaccgactacctcaactgcgtggacatccaaatatcggacaacagtgtctgcctggactactacggcagccactatatcacctccaaccacctgtgctatgccactcccgagaataagggctcctgcagcggcgactctggcggaccactcgtcctccacgacggcaatcgtcaggtgggcattgtctccttcggctccgccgcgggatgcctgtccaacagccccaaaggattgacccgagtgaccggttacttggactggatccgcgaccatactggcatttcttactaa

SEQ ID NO: 14211 - protein, 259 aa, DROSOPHILA
MKVLGVLLFSAFALVAALERPVPVKDMPAGNKINGRITNGYPAYEGKVPYIVALRFDNGNGGGWYCGGSIIGHEWVLTAAHCTYGASYVTISYGAVWRQQPQFTHYDTGNLHNDIALIRTPHVDFWSLVNKVELPRYDDRYNNFYGWWALLSGWGSSSDSSGMTDYLNCVDIQISDNSVCLDYYGSHYITSNHLCYATPENKGSCSGDSGGPLVLHDGNRQVGIVSFGSAAGCLSNSPKGLTRVTGYLDWIRDHTGISY

SEQ ID NO: 14212 - DNA, 3511 bp, DROSOPHILA
caagcattattatatctgattcttttattggcacttgcgacattgggtcttattttgtgtgggctaatgccgaatctgtccatggccggactgagtaaattgtctgctgggagctctttcacccgtatcgctttaagaaattcgtcgtattcgctctgaaccgtctccaggtccttaggacccagctttcgagtagctttctcttggcgctcttgctccaggatgagggcgaggacctccacttctaaatgccggcgttccgcttgcgccatagatttcacgaaaggcaactgactgagaagaaactcctgacacttggttttcggcacatccgccggattcggggcttgcatgcgaatgtgcacatcgtgcatcacccgccacagaggttcagggatttgccctttggaaccggccaaggctctgaccagcgggcgcagcttcacccaacgcagcttcagttcacttacggagaacggagtactcagctcaacgtgctcgtagctttggttaaaggacttggccagctgatcccaaccccaggagtcgtagtcaacgtccattttgggctccacctgcgggatgataaggaagggataccgggcgagcatctccatgagcagcaagtcgtttaaaacaatctggccgctgatgttggtgtttgatatgttaatctccaaatggggaacagtggaatggatcaccgtttcctcggcgctgtcggtactcattttaatatttttcgcactgtgtttctccaacgttctacaacacatttgtgtactaattcatccgtatgttttaatataccacttaacggtaatttctttaataaaatctatgtttttagaatccgagttttaatttgtgtttgctaactaatagcgatggaaattgtttgagaacagcaatcgataggtaagcgaccaaagcgataggtaggaaaatatttggcttaaacaatcgataacttatcagaccatctccagcgaggaagaagcgtcgtgaaaaaagccgcaaaatatacacagacggaagtattttcgcgaattacttgaacacaacgtgcgaaaaaaataatcggaacgccccaatatgagtggcggcaccatgctatatggcggcgacgagatcggcgccctggtcttcgatcctggacatcattccttgcgagtgggctacgcacaggaggattcgcccaaggcggagataccctcggttgtggggattggagcagctccagagaccaatctcgatccggaaactaaaacagacaacaatgccacgccaaatagttagtttctacatcgcctttatttagtttatggcttttaaaaacccggaaaaaccggcaatccctacccctactctagatgctgaccagcgcaagttctatgtggacaccaactacgtgaccgttccccgttccaatatggaggtgcagacctatatgaaagacggcatgattgacaactgggacctgtttgagaaggttattgattatgcctacgccaatgtcattcagtcggagccggaataccatcccgtgctcttttccgaggcatcgtggaatgtccgcaacaaccgcgagaagctaaccgagcttatgttcgagaagtacaatgttccagccttctttctggtaaagaacgccgttctggctgccttctccagcgggcgggccaccgctttggttgtcgatagtggagccacccacacctcggccgttcccgtccatgagggctatgtcctatcccaggcggtggttaagtcacccctgggtggagacttcctttcacgacagtgccgccagcatctggagaagcacggcattgatctgtcgccggtatacaagattgcctccaaagacgttgttaaggagcgcgacaacggacgcttcacgctgcgcaaactgccagagaacctaactcagtcgtggcaaaactacatgttgcagctcatgatgcaagactttcagatgaatgtgctgcaggtcctagaaaatccgttcgacgaacgggttgctgctcaaatcccgacggtacactatgagtttcctaatggttatcatcaggactttggctctgagcggttcaagatagccgagagtctctttgacaatgcaatgctgggagctggccaattggcgtccaccagtgtgggcatgtgtgatgcggatgtgcggctgtcacttttcggctcagttgtcgttactggtatgaattttccctaggttttaaaactaattacttataccttaatattttgctcttaggtggcaatacccttctgcaaggctttccggagcgcctaaatcgcgatctccagctgcgtgccccctcaaatacgcgcctaaaaatgatttctgccaatggcagcgtggagcgaagatttggagcctggattggcggctctattctagccagcataggtactttccaacagatgtggatatcgtcgcaggagtacgaagaggccggcaagagccaagtcgagcggaagtgtccgtaaggacagcgcaatcgaattccaattttaattttaaagacgcaactctatgtaataatataaatgtgaaatgtgaaaagtgtcccattattcagaagacatctgagcgtttgtttaggaatagattgcatttgattacggaaatgtttttagttacacacatatgtatatatttactgcgacgctgacgcggacgttacagtttcacatttcaatggagttttcaccggctgccttttgtctttcggatctaattcgtacgtaatggatatggagtgaactctgggtcctcgctttttgtggaactgttgatagagcggtggcacataaatcttgcggcgaatcagcgtctcttctgttatttcgtggcaaagttttataaatcgtcacatggctccagacattgtgttgttgcaaacgcattgctatgggcggaacacatgatgaacttagttttaaatgatgtttatctcggctcactcaccttggcatttagtatgtcctccgaccagtcctccttggcaattcgaccaacagcgttgaccagaatcttcttcaccttaattacgttctcggcaaaagtacggaggacatcctgcacgttgacaccctcgcaacccatgcgccagcagtcgtagtccgtggcaatggccaccgacccgtaaagtaggccagcctccttggctagcaccacttctggacacgtggtcatgtttatgaggtccccgccccactgacggaacatgtggctctccgagcgagaggagaagcgcggaccctcaatagtcacaatggtggccttatcgtgggcgggaatctccagctccttggccgcctgaagcagaatgttgcgggtgcgttcgctgaatgccggaaacatgggcaggtggcaaacaccacgtggactttgtgccttgccatcgtagaaggtctgaaggcgtttagtagtcctgtcgataaagtcgtgtggaacaaccaggttgcccggcttgatttcctcgcg

SEQ ID NO: 14213 - DNA, 1373 bp, DROSOPHILA
cgtcgtgaaaaaagccgcaaaatatacacagacggaagtattttcgcgaattacttgaacacaacgtgcgaaaaaaataatcggaacgccccaatatgagtggcggcaccatgctatatggcggcgacgagatcggcgccctggtcttcgatcctggacatcattccttgcgagtgggctacgcacaggaggattcgcccaaggcggagataccctcggttgtggggattggagcagctccagagaccaatctcgatccggaaactaaaacagacaacaatgccacgccaaataatgctgaccagcgcaagttctatgtggacaccaactacgtgaccgttccccgttccaatatggaggtgcagacctatatgaaagacggcatgattgacaactgggacctgtttgagaaggttattgattatgcctacgccaatgtcattcagtcggagccggaataccatcccgtgctcttttccgaggcatcgtggaatgtccgcaacaaccgcgagaagctaaccgagcttatgttcgagaagtacaatgttccagccttctttctggtaaagaacgccgttctggctgccttctccagcgggcgggccaccgctttggttgtcgatagtggagccacccacacctcggccgttcccgtccatgagggctatgtcctatcccaggcggtggttaagtcacccctgggtggagacttcctttcacgacagtgccgccagcatctggagaagcacggcattgatctgtcgccggtatacaagattgcctccaaagacgttgttaaggagcgcgacaacggacgcttcacgctgcgcaaactgccagagaacctaactcagtcgtggcaaaactacatgttgcagctcatgatgcaagactttcagatgaatgtgctgcaggtcctagaaaatccgttcgacgaacgggttgctgctcaaatcccgacggtacactatgagtttcctaatggttatcatcaggactttggctctgagcggttcaagatagccgagagtctctttgacaatgcaatgctgggagctggccaattggcgtccaccagtgtgggcatgtgtgatgcggatgtgcggctgtcacttttcggctcagttgtcgttactggtggcaatacccttctgcaaggctttccggagcgcctaaatcgcgatctccagctgcgtgccccctcaaatacgcgcctaaaaatgatttctgccaatggcagcgtggagcgaagatttggagcctggattggcggctctattctagccagcataggtactttccaacagatgtggatatcgtcgcaggagtacgaagaggccggcaagagccaagtcgagcggaagtgtccgtaa

SEQ ID NO: 14214 - protein, 425 aa, DROSOPHILA
MSGGTMLYGGDEIGALVFDPGHHSLRVGYAQEDSPKAEIPSVVGIGAAPETNLDPETKTDNNATPNNADQRKFYVDTNYVTVPRSNMEVQTYMKDGMIDNWDLFEKVIDYAYANVIQSEPEYHPVLFSEASWNVRNNREKLTELMFEKYNVPAFFLVKNAVLAAFSSGRATALVVDSGATHTSAVPVHEGYVLSQAVVKSPLGGDFLSRQCRQHLEKHGIDLSPVYKIASKDVVKERDNGRFTLRKLPENLTQSWQNYMLQLMMQDFQMNVLQVLENPFDERVAAQIPTVHYEFPNGYHQDFGSERFKIAESLFDNAMLGAGQLASTSVGMCDADVRLSLFGSVVVTGGNTLLQGFPERLNRDLQLRAPSNTRLKMISANGSVERRFGAWIGGSILASIGTFQQMWISSQEYEEAGKSQVERKCP

SEQ ID NO: 14215 - DNA, 2144 bp, DROSOPHILA
ctacaaatttaaattccgagcatgctgctccgtaggctccaaaggcatccagcatccagcatccagtatccaacacatatttacatattctccttgcccgtttcacttgccaaatttttcacccaaagccattttatattaaaaaacggtagcaacaaaacaaaatggaacgaaaagttttatacatttctaatatgaaacccttttgtgttgtttttttcaggttgctttggcagcactaagccgcggatgattaaaacgataaaaaggtgggttcacaaaattccagacagctttaaaatattatttctgggatactttaataggtattgctgaatacctgtttggcttataaatactaaatttacaatgccctaattttgattcattacattaaatagtattttgtactgcattttttatgttaaattaaataaaatatgtaaatcaaaagcgacgctgtggctttgaagtaagttttcaatttgttgtaatatttatttttctttgtgcgtttttgccaccgagctgtcatgtgctggccccattatttatttatgattatatttatttatttataaatgctatgtgtacatatgggcgattcatcaaaaacgcatgcaatatttcattgggttttaaaaacaatatttatacgcttgcgggccaaaagtaaaaccgagagtttttgcttgcttgttgaatttgctactttttcttttcgaggtttggcctttattaactgaacggcatacaaatggccagaaaaatcgctagtactggtcatgtaaaagtaacacaaacaaacggcactcacaataaaaacgaaaatgatttattggaagacttgaaatgttgccatgttaagaccagatatttgtggatatttgtatttataaaaacagagtgcagtttttgttacagccttgagaagtgctgatattttgaaccacatttccacttccatatacaagatccttctttgatttctatagatgctttacatgcaacacggatcctttgtgatcaaacatcttggataaagaacgcagtctggaagtacactttcagttgtgtgctgacccagtccagccagaaacaggataatggtgaaaagaaatggaactcgcttggaaggtagcatcttgtagaatgaaaatcatgcagagaataaactttttacaaagactatattttatttaataggaataattgcaatttaaatgcaataattatgttaagcacttacgtaacgttttataatttagttcgtttcgcagattataaacagctagaaattgtaacgaatagggtaacattttaaataaaaatttaactagactgttttagaattggttgatcttaaaaagtttccttaagaggccttgaagtatttgaatatgtactcaaccagttttccttgctgtccattattatacaccatacactcaattctcgccagttgtctccgagttatctcattagatgtacttgagactgttgaggtggaaaattcgggggggaatggcaacattttaatttctttttaatgcggtacgaactcatggtcttagcttctcgcttggggtaggccaaaaaaattaattatcgttggcaaacacgctcagcgcggaaaaaaggaggatggcaaagtgggcgggagctgggcggagaaatcattgcaagtgaattgtaagccgctgaggcttcgcgtttttcattacatgagcgttgttaagctaaaaataaattgcttattaaaaagccttctcggcacatgtacagccaggtgggtagtgtttcgcggatggtgatgcggtggtgcagagaatggagccactcatttacactcgaggggacaccaaagcggcgagatgtggaggagctgttagcagtgacaatgcgaaatagagcgatggaggcagacatccaactgggtgtgaatgacaaagccgccaggaatccaagcccactcccacaccgcctgctttctacatctttctgctcccctttctgcaaatttccctggctttcgacgctaagcgcgagaaagtccttgaagcaatcgacttagtgcctggctgtggcgtttgtacatatttagtttgcatttacatggcacacaacaaggacattggcataca

SEQ ID NO: 14216 - DNA, 144 bp, DROSOPHILA
atgctaccttccaagcgagttccatttcttttcaccattatcctgtttctggctggactgggtcagcacacaactgaaagtgtacttccagactgcgttctttatccaagatgtttgatcacaaaggatccgtgttgcatgtaa

SEQ ID NO: 14217 - protein, 47 aa, DROSOPHILA
MLPSKRVPFLFTIILFLAGLGQHTTESVLPDCVLYPRCLITKDPCCM

SEQ ID NO: 14218 - DNA, 4686 bp, DROSOPHILA
tgcacgcgctcggcttctaccaccagcagagcgccacggagcgggatgagtacgtcaagatcaactgggagaacatcctcgacgggcacgcgcacaacttcaacaagtacgcccgcacccacatcaccaacttcggggtggagtacgactaccagagcgtcatgcactacagctcgcgggccttcagcaagaacgggaaagccaccatagagccattggtgagtaggccaacccaaatggttaccagttattcatgtaattgagtattattttaaatcgcttacactgtaaaggagttcagtttaacattcaatagtaatactgcgaattaatggactattgtatggacatacagtaaattcgcttatcttaacaattactacacctaaatgttatatttcgatatacaaactataatgctatcaatctattttgcacaaaccacacttgaatatgtgcattcaaaaacacctatcaattaacttagattccattaggaatgccaaaaaccgtggctcataaaatatttaaattcgatagtgatagtgatttgatcatattcagattaggaattcctatattaacacatggtccaatgacgtgcaactatgctaggaatagacgaagcattttgcttccttgtccagttggaactatatcaaatgagaattctttagctgaatggttgactacaccttagcagttttagttgaagcgatgagatgtttgtaatgacttgggggagcttgcatcgtctacactctctgactcctgtcctttgcttccaggatccgtacgcctcgctgggccagagacgcggcctctccgacaaggatgtgtccaagctaaacgagatgtacgaacaggactgcagcgaggactacctgctcaacttcgaccgcttcgggaactacatcgacgaactgctcgactacttccagggcaacattcaggatctgctcggataaaaacgcctgaggccaataaaagaaagtgccggctaggtgacgaaaaaagtgaagtgactgatctcgtcgagggtctgggcggcctccccacggagtgccgggtacgagtggtgctcagagagttgttgcagcgcaaatcgcagctctccattccatatgcgctgcacgccgcgcaggctgaagcgggccagcaggcgcagcagctgacaggaacgttgccgcaacaggtggtgtcggctctgcaggagcgagacgaagtttagccgcggattaaagacaatccgttctacaagctccgcgttttcgggcagctcgcgcagcacacagcccatcagggccaacatgcacccagccaggcgaacagaggcggcgtctgaatccgattgcctgaagtctacgggagaacgggaacgggctaacagtttacaggagtcagctcataccatctaagggtaatcttaccgtgcgtgaggaagttgaggaacagatcgcttgctgccagaatggcaaccgcatcgcagaactgcgttaggaactgctgctgcaggtgtaccaagtggcagaccagttcgtacagactgcaagccgtctccagctcctcgacagttagctccggaatgctacgcaacgttcgactgagcgaacccgtggtgagtggggcggaggcagccgagtccgagagttgtttgtgcgacaggagcagcttgcaggcgtacatgagattgggcaccagttttacgtccacgtacacgttgcggatgagctcgaggtcaacaatcaaaacaggatccaccagcacaaagggcaacgacagcaactgggccacactcttgagtacccgtggaatggccttggagttgcgcagcggtgccacaataatgctcaccaggttgtgctgtttcaatgagtccagttcgccgtcaagcagctcctgcaccgatctgttcaagaaggctagccactcatcgttctcgatgggcggactttgggattcatcgcagctatcccaccccgggagcaggcacggcggagtgttgctgttattgaaaggggaaagttagtaaaagaaattctatgaggcgcagtggccacttactcgctgctcagcttttcctcattggtggaatgcattgagtgtttaagttgttgtggctgttgctgcgggggctgagaatttgcgtaggaaattgcttcagcgggaggcttgttttcctggttatgcttttcctgtgtagcaatctccgtggccttgcgttgcgcctcatggtcgacgctgtgacccaagcgaacagagaagttatccagattctgactaagcttacgcttctctagatccttgctgcgcgactggcgtacggttggagcgactattggcttagcggccacgcctccgccccgcaaggaagcctgaaagtcgaagttgtcgttcatatgattgaggatcatattggagttgccactgacgaagcaagtgtgcgagttgatcaccggctggtgtaccatcggcattgcccgaacaccagacagatccctgtaggacaagtccgcgaagggaacgaccacacgttgcatattgtcctccacatcggtctcaagatgctcaacatcgctgggagcaatggcgtttatgctgtcgcgggaggtggtcaagttttcctgtcgcgactcgccaaagtccaaagcggccagggcctcgtccagatcgcctacctccggatcggactgttttgacgacttaaccttggcttcgggatttgtgaaaggcgattccttggccgcctccgcctgcgtttctgcgataaagatgcgtccctcaacgaaggggtgacacaacagctgcgtccaggatatgcgcagaccggggtccttctcaagcaggccctgtaggaaggagcggcactcgctagtcagcgtgctcggccacttgacgtcctcgtgcttgatcatcttcaccagatgcaggatggagctggcacagaagggcggctgaccggccatgctttcgtaggctatgcagcccagtgaccacatgtccgcatgatggtcgtacggctgctccgccagcagctccggggccatgtagaggggcgttcccttgatcgaggtgagcacgtgggtacccagggtcatgttgcgggccagtccaaagtcgcagagtttcgcgtgcatgttcttgtcgagcagcacgttttgcggtttgagatcccggtggaggatgcggtttgaatgcaggtagtacagagcggacaccagatgcccggtcacccgacgtgccggctcctcgcccatggctccattgtaggacaggtagcggtgcaggtccatcagcgcgaactcagtgaccacgaaaaggtccgtcttcgactcgaaggactcgatcatctcgatgacgtgcggatgcttcagccgggcctgaatgtcgcactccctgcgcaaattcttcagctctttcgtggctcttccgcgctgcagaacatgaatatggtgtgaactagttgtatggacttgttgctttatcacctggcccgccccactcaccttggagatcactttgatggccaccaccttgctgtcgtccttgcgtgtcgccttgtatacgcacccgaaggatccttgccccaccatcgagcttaccgcgtagcggttcatggttattctttgttttgctgcggattgggatgtgattaccactgaagtgcgtgcggtatgaccgtagcaggttgactccgaggtgggaactcggcttcggtacgtaggtatatgaaaatactagattgctcatacagggttccttttctgataaatgacgcttttgctggacagcaattgtacctaaaaatctatatagaccagatcatgatacaatccaagacaaatacaagactagtttgcgcttttatctgtggcagtaggtattagtattatctgcgaataaacatttattaagtgataaaagttggaacgaactttaacttatatattattatatattataaatatttatatgtatatatttcttaatgtacaaatttttacttaataagtgcaataaatgatatgcaatataaataattaaaaattccaaaagtgcagtagataatataactaattataggtatgtacctatatatcgtaatgtacctaaaattcagtgtgaccaaaccaacacaaatgacccttttgacagcaactcggtacggtcaccctagacaagcacggccgaagaacagctgattgctggctggtttttattgtgcggagccaggaataatcgttgtgaaataaataatgattgccaatttgaacacagccacccagtgagacgacacccacaatcgcagcacgatgcgcgagcccaacctgtacgtgatcctgtcgcacgcgctgatcggtgagtttccgccaaccggcagacacttctgccacgcctcttccgcttccaggcggcagtctaattgagttggggattcccactgccattgaccacactcccaattccaatccgcatcccaggctgcggcttcttcttcctatacgtgcagcatgtgcgcgtgatcttcgagacgcgcaccaacatccagcagctcaatcagctggagcgggaggcgcttctgcggcgcgaggatgccctgtactatgccttctacaagcagctggccgaagggccggacttttggcacggctacgagcagctgaagaacgtcacggacatcgagta

SEQ ID NO: 14219 - DNA, 2487 bp, DROSOPHILA
tgctacggtcataccgcacgcacttcagtggtaatcacatcccaatccgcagcaaaacaaagaataaccatgaaccgctacgcggtaagctcgatggtggggcaaggatccttcgggtgcgtatacaaggcgacacgcaaggacgacagcaaggtggtggccatcaaagtgatctccaagcgcggaagagccacgaaagagctgaagaatttgcgcagggagtgcgacattcaggcccggctgaagcatccgcacgtcatcgagatgatcgagtccttcgagtcgaagacggaccttttcgtggtcactgagttcgcgctgatggacctgcaccgctacctgtcctacaatggagccatgggcgaggagccggcacgtcgggtgaccgggcatctggtgtccgctctgtactacctgcattcaaaccgcatcctccaccgggatctcaaaccgcaaaacgtgctgctcgacaagaacatgcacgcgaaactctgcgactttggactggcccgcaacatgaccctgggtacccacgtgctcacctcgatcaagggaacgcccctctacatggccccggagctgctggcggagcagccgtacgaccatcatgcggacatgtggtcactgggctgcatagcctacgaaagcatggccggtcagccgcccttctgtgccagctccatcctgcatctggtgaagatgatcaagcacgaggacgtcaagtggccgagcacgctgactagcgagtgccgctccttcctacagggcctgcttgagaaggaccccggtctgcgcatatcctggacgcagctgttgtgtcaccccttcgttgagggacgcatctttatcgcagaaacgcaggcggaggcggccaaggaatcgcctttcacaaatcccgaagccaaggttaagtcgtcaaaacagtccgatccggaggtaggcgatctggacgaggccctggccgctttggactttggcgagtcgcgacaggaaaacttgaccacctcccgcgacagcataaacgccattgctcccagcgatgttgagcatcttgagaccgatgtggaggacaatatgcaacgtgtggtcgttcccttcgcggacttgtcctacagggatctgtctggtgttcgggcaatgccgatggtacaccagccggtgatcaactcgcacacttgcttcgtcagtggcaactccaatatgatcctcaatcatatgaacgacaacttcgactttcaggcttccttgcggggcggaggcgtggccgctaagccaatagtcgctccaaccgtacgccagtcgcgcagcaaggatctagagaagcgtaagcttagtcagaatctggataacttctctgttcgcttgggtcacagcgtcgaccatgaggcgcaacgcaaggccacggagattgctacacaggaaaagcataaccaggaaaacaagcctcccgctgaagcaatttcctacgcaaattctcagcccccgcagcaacagccacaacaacttaaacactcaatgcattccaccaatgaggaaaagctgagcagcgacaacactccgccgtgcctgctcccggggtgggatagctgcgatgaatcccaaagtccgcccatcgagaacgatgagtggctagccttcttgaacagatcggtgcaggagctgcttgacggcgaactggactcattgaaacagcacaacctggtgagcattattgtggcaccgctgcgcaactccaaggccattccacgggtactcaagagtgtggcccagttgctgtcgttgccctttgtgctggtggatcctgttttgattgttgacctcgagctcatccgcaacgtgtacgtggacgtaaaactggtgcccaatctcatgtacgcctgcaagctgctcctgtcgcacaaacaactctcggactcggctgcctccgccccactcaccacgggttcgctcagtcgaacgttgcgtagcattccggagctaactgtcgaggagctggagacggcttgcagtctgtacgaactggtctgccacttggtacacctgcagcagcagttcctaacgcagttctgcgatgcggttgccattctggcagcaagcgatctgttcctcaacttcctcacgcacgacttcaggcaatcggattcagacgccgcctctgttcgcctggctgggtgcatgttggccctgatgggctgtgtgctgcgcgagctgcccgaaaacgcggagcttgtagaacggattgtctttaatccgcggctaaacttcgtctcgctcctgcagagccgacaccacctgttgcggcaacgttcctgtcagctgctgcgcctgctggcccgcttcagcctgcgcggcgtgcagcgcatatggaatggagagctgcgatttgcgctgcaacaactctctgagcaccactcgtacccggcactccgtggggaggccgcccagaccctcgacgagatcagtcacttcacttttttcgtcacctag

SEQ ID NO: 14220 - protein, 805 aa, DROSOPHILA
MNRYAVSSMVGQGSFGCVYKATRKDDSKVVAIKVISKRGRATKELKNLRRECDIQARLKHPHVIEMIESFESKTDLFVVTEFALMDLHRYLSYNGAMGEEPARRVTGHLVSALYYLHSNRILHRDLKPQNVLLDKNMHAKLCDFGLARNMTLGTHVLTSIKGTPLYMAPELLAEQPYDHHADMWSLGCIAYESMAGQPPFCASSILHLVKMIKHEDVKWPSTLTSECRSFLQGLLEKDPGLRISWTQLLCHPFVEGRIFIAETQAEAAKESPFTNPEAKVKSSKQSDPEVGDLDEALAALDFGESRQENLTTSRDSINAIAPSDVEHLETDVEDNMQRVVVPFADLSYRDLSGVRAMPMVHQPVINSHTCFVSGNSNMILNHMNDNFDFQASLRGGGVAAKPIVAPTVRQSRSKDLEKRKLSQNLDNFSVRLGHSVDHEAQRKATEIATQEKHNQENKPPAEAISYANSQPPQQQPQQLKHSMHSTNEEKLSSDNTPPCLLPGWDSCDESQSPPIENDEWLAFLNRSVQELLDGELDSLKQHNLVSIIVAPLRNSKAIPRVLKSVAQLLSLPFVLVDPVLIVDLELIRNVYVDVKLVPNLMYACKLLLSHKQLSDSAASAPLTTGSLSRTLRSIPELTVEELETACSLYELVCHLVHLQQQFLTQFCDAVAILAASDLFLNFLTHDFRQSDSDAASVRLAGCMLALMGCVLRELPENAELVERIVFNPRLNFVSLLQSRHHLLRQRSCQLLRLLARFSLRGVQRIWNGELRFALQQLSEHHSYPALRGEAAQTLDEISHFTFFVT

SEQ ID NO: 14221 - DNA, 4478 bp, DROSOPHILA
agtatctctttatattcatccacatgctgcaattcgaaaaaaacatgcatatatatattagaccatgtatcatataccgtttttttttcggcacgttttgcaatggcggcatacttcggatattttatcgcccgcctcggacagaatctcgtagcatttgtacagtcgctctatgttgtccatcttcttggccagtggtacgcactatatttgcagaggtttcaagcgtctatagtttactttacacagttttcgttgcagttaaattggatgacagcgtttctcaaatgagagtttttcacgttgcaaacaaaatggtgagcacgggggagtgaccagatctcgagacagtaaaaacccagatggatatcgatataccgttgggaaaaatttgtactaccgttattcagaatacacatcgatagttagaacaagttattagtaccgttattctgaatacgcatcgatagtttaaaaaagttattactaccgttgttttgaatgcctatttcaaatcgatataaatgtgaaaaatatataaataccgatattccggaggaactatttccaaacgatgtagtgatatatttttatttgaaatcctcttaatgttaatgacgaataagtaagaattattcttttaatacgaaacatcttccaaaatgtgtcttttgagtaagtaccagtatcatttatattaaccatggaattccatttattcatatagcgccagccaaaactgcctaccaaaattaatttaatcaaatgacaatatgacacaacctcgcataatttcaattttaagcctctagcctcaagttctcactgctatcattattccactcaataagttattctaagaaactcattagcttcatttagcggaaggaactgagtacaatgatttaatagaaggatgccatgcatatgtttattccaaacatattcgtgctcttacatacatacatacatagttctagatacataatacattagacatttatggaagtgcctttaaggcctgttcaaaataatctaccatcatggggtaaacttcgtcgtactgctgaatgttctttcgcctggcattgtcccgataccgttgcagtgcccccgagatcagctctagtttctcccgttcagccgtgtgcccatccagccattcgatcagccgctcattggaccagttggccgtcgtgtgtggcgactgcagatctgctccagcgtgtccgaagagcagcaacagcactatgtaactgggcactagagagtcctcgccgattgtctgcttgaccagctcctcggccgtttggacgatcagcaaggacatggctcttagcagacgcgacggctttcccagctcggcgagatttgggcaaagaggtttcaacgcctgttccatgtgttgacagtcttgcttcaaacgctgccttccgcaggagcttaaaggtcgcagaatgcacacattgtgcaggaagagctcaatgcaacgtttggccaactcgtgtccgcactttttcgtcatctgcttgtcatcgaacagggcgatgtgatgcgaccaggatcggttgacgaactcctaatagtttgattgagacatatgactagccaagtattacattcaaattcccacccacctgcagttccttcatgtacatcgacggacctgtggtagacatcctctccgaattcaatcccggctccctgtgcatactcaatacaatgatgctaatggtcgtgataatcgactccattatctgctgtagaatggtgccgatcagtaaatcagcctgttccaaggatcgggatataatctccctagctgttcccggtgtcttttcaaagtgcacatgaagatcactgagcatgcgacgcactgaatccttatagtagaacagaacattcgccagctgggtgttttgctgctgctgcagattgggcagatccacgacctgcttggaatcagctcccagcttgatttgagcctctagttttgtgcacaactcttttccacaggccgcaaatacatttgctatggcattcgtgagacgggaatcgatcaaagcagcactgagctccgttgatgccacacgaataaagttgtccaccgtttcgttgccgggcaaatcgactcccgccagacatgccttaaagttggcagcacacttgctaacgtaacccacttccaggggagcaaatagttcgttgtcaaactgaaactcgccatgcagacgctgctccaagccacgagcggaggtcaggagctttgagagcccctcctgaagggtctgcgtaacatgctgggggcattcgtcaaaggattttcgcaggagctgctgcacctgctgccaaaaacgctgcggaatgcactgatccgatgattctgatgtatagccaaactggttgatctgctcgagagccgttttcagcagcttgatttgcgtgcaagtctcaaaaagttcatcatagagcagccaatgaagagacttccagaacttggcacggaagttttgagtggttgtcaactggggagtttttcctggtcccctcgagggagcaggtttgctcacattgtgcgtcggggacttgttcagcacagatatatcgttgccagcaaagcactctttcagagattgctccatgtcggcaataaaggtggccaataggttatccagcgatttttccagcgtattgaaattcataaagatctaaggaataagaactcttaggtatatgctagaaaaatgtttgttatatccaccttcaaggcattaaccacttggttttcattgcgctcctggagcccagtgaccaactgcatctgcgtgaggttccttatcttctgagcagagctgatcacataagctcgctcctgctggataaaatcaatgtcctttagctccttatcttcgatgagttggcccaactcaaagtggatttcggccaggcgtaggacatccttggtcgcttttagtttggccgtgaggctcagcaatgttccagccgagcggagtaggtgactgacatcgtgcagacgccctagcacttgcgtttggttctccacctgctggtactgcgtgtccacctggttcttcagccggtgcccagtttccctgacccgctgcacatcctcggcgagcgcgtttaaagccgcatcgaagcgcccagcgtgggtggcctgctgcagtagagctccgtgcttgtcgcgcacctgctggtgcagctcctccttcgtgttctgcagttgcttggacagctcctggatttgctggccaatggtcaggtgcgacatggatgcggtaaagtcattatcatccgaatccgctgcgtttggggtctttgtcgctaccgggtctccagtcaccatgatgcagaaggttttaatctatggtaatacgaattataagctggtattacacttttatttccattacttgcagcaattttacgtattgcaaacaaactgtttttccacgcaaccaaaaacaggctgtaatcgataaatttccagttgagcggggattgaattttttgaaggggtttctaaaaaactatataaagtattgcgtgatagcttaataatataatatttaaataataatgttaaaaactagccgcatcctttttccgcttgctgaaaatattttacttcgaccgccgactacgcccctgccacatgaacttatcgataacttgaggcagctgttgctcactttgttttgtgtaaataattggatgcggagaaaaacgtattattattgccataccttctctagtctttcgctttaacaaattttccatgtcggacgacatcaagaagtatttagacggcctgctgcaaaagtaaatattccacaggaaaggctgttcccaatatgattaacttataatttttcccccattccccgatttacacaaaagggtcagcgggctgtacgttattcagattacggatcgcgacggagtgcccctcctgcgggttagccaggagaagaacgtggacttcgccctgatgccctcgttcatacccacattcaccaccgcctgcgatcaggccagcaaactgggattgggcagaaacaagaccatcatctccatgtactccaattaccaggtggtccagatgaacaagctgccgctcatcctgacctttgtgggcgcggagaactgtaacacgggacacattctcgcactggagcaccaggtcgatggctatttggaggacattaaacaggctgtcaccgaggcctaaagttagtctaccttgtaatatgcatatttttaatatttactaaatgtttatacatacatactttattgagaacagaatgagtttttaaaaatctcaactcaccattgtactattccgggaatttatttcatatcctgcgaagggtgatctcaaagatgaacaaagttccgagtcctccgttttggcaacaatatcaaatatgcaaactattgacactttatttaaa

SEQ ID NO: 14222 - DNA, 2367 bp, DROSOPHILA
tgcgtggaaaaacagtttgtttgcaatacgtaaaattgctgcaagtaatggaaataaaagtgtaataccagcttataattcgtattaccatagattaaaaccttctgcatcatggtgactggagacccggtagcgacaaagaccccaaacgcagcggattcggatgataatgactttaccgcatccatgtcgcacctgaccattggccagcaaatccaggagctgtccaagcaactgcagaacacgaaggaggagctgcaccagcaggtgcgcgacaagcacggagctctactgcagcaggccacccacgctgggcgcttcgatgcggctttaaacgcgctcgccgaggatgtgcagcgggtcagggaaactgggcaccggctgaagaaccaggtggacacgcagtaccagcaggtggagaaccaaacgcaagtgctagggcgtctgcacgatgtcagtcacctactccgctcggctggaacattgctgagcctcacggccaaactaaaagcgaccaaggatgtcctacgcctggccgaaatccactttgagttgggccaactcatcgaagataaggagctaaaggacattgattttatccagcaggagcgagcttatgtgatcagctctgctcagaagataaggaacctcacgcagatgcagttggtcactgggctccaggagcgcaatgaaaaccaagtggttaatgccttgaagatctttatgaatttcaatacgctggaaaaatcgctggataacctattggccacctttattgccgacatggagcaatctctgaaagagtgctttgctggcaacgatatatctgtgctgaacaagtccccgacgcacaatgtgagcaaacctgctccctcgaggggaccaggaaaaactccccagttgacaaccactcaaaacttccgtgccaagttctggaagtctcttcattggctgctctatgatgaactttttgagacttgcacgcaaatcaagctgctgaaaacggctctcgagcagatcaaccagtttggctatacatcagaatcatcggatcagtgcattccgcagcgtttttggcagcaggtgcagcagctcctgcgaaaatcctttgacgaatgcccccagcatgttacgcagacccttcaggaggggctctcaaagctcctgacctccgctcgtggcttggagcagcgtctgcatggcgagtttcagtttgacaacgaactatttgctcccctggaagtgggttacgttagcaagtgtgctgccaactttaaggcatgtctggcgggagtcgatttgcccggcaacgaaacggtggacaactttattcgtgtggcatcaacggagctcagtgctgctttgatcgattcccgtctcacgaatgccatagcaaatgtatttgcggcctgtggaaaagagttgtgcacaaaactagaggctcaaatcaagctgggagctgattccaagcaggtcgtggatctgcccaatctgcagcagcagcaaaacacccagctggcgaatgttctgttctactataaggattcagtgcgtcgcatgctcagtgatcttcatgtgcactttgaaaagacaccgggaacagctagggagattatatcccgatccttggaacaggctgatttactgatcggcaccattctacagcagataatggagtcgattatcacgaccattagcatcattgtattgagtatgcacagggagccgggattgaattcggagaggatgtctaccacaggtccgtcgatgtacatgaaggaactgcaggagttcgtcaaccgatcctggtcgcatcacatcgccctgttcgatgacaagcagatgacgaaaaagtgcggacacgagttggccaaacgttgcattgagctcttcctgcacaatgtgtgcattctgcgacctttaagctcctgcggaaggcagcgtttgaagcaagactgtcaacacatggaacaggcgttgaaacctctttgcccaaatctcgccgagctgggaaagccgtcgcgtctgctaagagccatgtccttgctgatcgtccaaacggccgaggagctggtcaagcagacaatcggcgaggactctctagtgcccagttacatagtgctgttgctgctcttcggacacgctggagcagatctgcagtcgccacacacgacggccaactggtccaatgagcggctgatcgaatggctggatgggcacacggctgaacgggagaaactagagctgatctcgggggcactgcaacggtatcgggacaatgccaggcgaaagaacattcagcagtacgacgaagtttaccccatgatggtagattattttgaacaggccttaaaggcacttccataa

SEQ ID NO: 14223 - protein, 751 aa, DROSOPHILA
MVTGDPVATKTPNAADSDDNDFTASMSHLTIGQQIQELSKQLQNTKEELHQQVRDKHGALLQQATHAGRFDAALNALAEDVQRVRETGHRLKNQVDTQYQQVENQTQVLGRLHDVSHLLRSAGTLLSLTAKLKATKDVLRLAEIHFELGQLIEDKELKDIDFIQQERAYVISSAQKIRNLTQMQLVTGLQERNENQVVNALKIFMNFNTLEKSLDNLLATFIADMEQSLKECFAGNDISVLNKSPTHNVSKPAPSRGPGKTPQLTTTQNFRAKFWKSLHWLLYDELFETCTQIKLLKTALEQINQFGYTSESSDQCIPQRFWQQVQQLLRKSFDECPQHVTQTLQEGLSKLLTSARGLEQRLHGEFQFDNELFAPLEVGYVSKCAANFKACLAGVDLPGNETVDNFIRVASTELSAALIDSRLTNAIANVFAACGKELCTKLEAQIKLGADSKQVVDLPNLQQQQNTQLANVLFYYKDSVRRMLSDLHVHFEKTPGTAREIISRSLEQADLLIGTILQQIMESIITTISIIVLSMHREPGLNSERMSTTGPSMYMKELQEFVNRSWSHHIALFDDKQMTKKCGHELAKRCIELFLHNVCILRPLSSCGRQRLKQDCQHMEQALKPLCPNLAELGKPSRLLRAMSLLIVQTAEELVKQTIGEDSLVPSYIVLLLLFGHAGADLQSPHTTANWSNERLIEWLDGHTAEREKLELISGALQRYRDNARRKNIQQYDEVYPMMVDYFEQALKALP

SEQ ID NO: 14224 - DNA, 5169 bp, DROSOPHILA
ccctaaatgtgcgtaaactacatcagaacctccaaaccgtgggctaaactactaacattgatctgtgaacttaaattgtctagggttatcctggcggtactggactatccgcctacaatcccataaaactggacctgggtggcgttgtcttaggaactcttgtgggcataggtgccattatactgattcctaagattctatccgccttccatggtggttatggaggctacggccgcagtgagtgaaatgcttttatggaaattcaaaaataaagttaattttcggtcatttttaggcgaggacagtgacctaacaccactgagcagcatgatcaataagattgacgatgttctgggccagaataatattgactcgacgagttgcatgcaacgtgctgtgtgcggttatgttcgctctacggagtataatatgaagatcggttcctcagaccagatggacgaatttattcatatgctagcggagtgagtagaggcttttaactccaaggtacttagcacacaatatttgcttttgacttacttgtttccagaaatgccctggtggattacctcctcgatggaacggctattaaggaggcattggagcatggaaagcgagccaatgatcgagcctgtgaagaggtgtactccaattgtccgctggacagtaaatcagctacggatattctaatgaagctgatgccaaagaaaaacccacaaggaaaaggaaaatcatctggaatttcccgagaaaagaaggtttagttaatgttgttctatgaaattttaaaaaattgttctccatttgcatacaaccaaatattttcccaacatataaataaactccattgtgttatctttattcaactagtttctgtgcgtttataagcttttccaaaacaattaacaatgccttaggccatttaccatataatttctttggtaagaagttttaaccatagatccaatattttgtaagcatttgtgatttttgagtacgtctattctggggaggcattcttagcctcattgccgcttaaaataatttgcaattgcttttcctgctgttcaatgaggggcaaccactgctccgatggggctataaacttggtcggttgaaaggtgggtattttacctagttttcccaaaaccgacctgcgatgcgcttgattctcaatcatgatgtgttccagtttgtctaccaagtggttggactctttgatcaggtcatcgatggactgcagcagggcgtaccaatctattttctgcgtaccaatcagagcattacccctcaatcgaaagggaaagggaacgaagctgcgccaaggcttaaacgattcgatggtatagggtataaaatgccgctcagattccatttccacggcatcgtcatcgaaatgccaggatgctagagtaggagccaatatagagttactcccacttcccctcgacagattcgattcatcaaagttgagcctccgtatcttggctatctgatcaccaagtctcttctccacatcggagatgccatcactgtcatcctcatcggatttgggtagataggagttgaccaggtccttgttataggccttcggcagtagcgtctgagtttgtcgcgaaacggtaggcacactatcggtcatttgggacatggaataggtaagaacatctgcaagtatttgggttacatttaactaaaccaaatatctaactgaaaacttacacttctcatagccatccttctttttggagtactgtccatcagtgagaatacctacgtccttgagtagaataagatccttctgtaccccgaaactgacttccttcatgagcttcgtcggcacaaagtccgtctgcaaggccacattagccttgccagctcttagtcgtctgtatggaaaaacactaagtactatttaaattgtatgatttggcttaaagaccttgaggcatccagtaacttggcccgaagcaaggcgctcttatcgggcttggtgagcgtggaaacgctaactgcccgccaaggaggtcgcttggcttcattttccttttccttctccgcagccagctccttcatgcgtctccaactgtttttggctctaaagaggaggtattttatttgttaaaataatgtgtaaggtattttataagttaaaccctattacccacctactcaatgatgcactactcgaacgaatggctgaatgcggagtaccttgctggtcatccacactttgcgtctcgctggtttccgatgatgtgccactgttgttggagctggtactctgcttttgcctactcatggtagcgagtttttgccttttaaaactttaaatgtgtgtgggtggagaaaactgcttgacgtctctattagcagtcaatacatcgatgcataaacaattcagtgcatcctggttgctatggcgtcgactgaaatagttggggatggggcttggatatcgacctgtggatgaaagggaataacaaggcgccaaataattcaggcattcacaccttgttaaatcacccggtgttgacactctagctattttaagtaaagaaggaggcaagaggcaatacataataataaaataatatacagacataacaaaaacatattttattattcagtaagatttctattttaggaattgttatagaaagcattaaatatgcggaagacctcgccattgtaattatccaaatgcgttcgccctccttcataagagcattcagcaaacagattgtagttttgcctatggaaccaatagttcttggcagtgctattggcaccaagatcgagggtattcagctgcaacactccgaagtggaacgtcctaccgtcagtctggacgctctgcacaacaattggtttgggaagagctcctacggaatccccatgcagttgctttgctcgagcggctgccacaacgaaagctttgaccagtgtcctcgcctgaagctgagaagttgtgacctcggatccgtgggagtttttgacttggtgtttgttaaacaccgtaaagatggtgtgcgggtgggagcaggtgatgtccgagcgcaaagctaaatgaataacattgttagtcatgcatcgggtagtacttattaaacaacttacgatacaagttcttagcttggtaaatgtggtacttcggaatcgatatagtactcttcatggggtaaagatcaggcagatctccttcgaattttcccttaacaccttcgatggctcggttggcaaataccactttttcagcattgattgagaatcctagcagatccccgtctttgcttaaaaaagtcttaaaagacgcgttgtctatcagcttccttcgaacagagactgaacggccagccagtttttcactttcatgcaggagtttgtttaccaacagtcggctgaggagatattattatttacttatgttatgatacagtttaaagatatgatcttacttgaccctttcgtgtgatattccgtaggagcggggcaggttaaaggccggcctctccggtagcctcaccttgggcagcttgacttgctctgcatcaagcacgtgggatgccagaatcgcatgccggacactcttgtctacggaatttggcaactgctgacttgcaatggcatcctcgatgtgcttgggaaatgtttggatcacaatggagttggtcagcacctgggcctgcggcaatccaccaattagcacgctgttgtcggagtaagtgttgcaaactgtggggtgccagtcagggtgcctgctgtcctcgggaacgggtttttcgcgtgcgccaacaatgtccactctgtaggtaaagttagatatgttaccttttaccatcagtacatatttcccattaatactcacagttttttttcaactttggcgttcaagagatcctcgggattcttcaccagaacacctagcttcaggagctccgccgcggcgccagtttccttggggactcgcctaccctggaccagccagtgcttcttgaaatgccagccgatgtgctgggcacagagagtgttcgtcagcctcatttaagttaggatttgcttatgttttcgttcaatgaaatgaagcccggcggactggttatgaaactcagtgctgccagatggtgagagaaattccctgccccatcggcaataaatattagtgatgtgatcacttcatccacggttcaagctgtaaatcgttacatcgtgatttttaattttatatgtattcaatttcttgtataaggccgtataatttaacaattttagtgaatgaaattgcaatatcttataattgttgtttttttggcacttgtaatggttagagaaatattataaaaatatttaataacaagaaaatgtaacatatcagaaactggcgatagcgatgtatcggttttcgatgccaccactatttccgcgtctggtcacacttttcggtaattgtaataaataaaggaaaggcggagatttttgttaaaattttaacaaaattggatgacattttagaaggtaagtgtggaaattagtgtttatacaacagctcattgcacggataatataagtaacccgtatactcgtgttttagccgcttgctcacctcccgcaatactcacgataccgcaccgcccgacaaaaatgccgcgatatagggagtgggacttggcctgcaaggtgtacgtgggaaacctgggctcctcggcgtccaagcacgagatagaaggcgcatttgccaaatatggacccctgcgaaacgtgtgggtggcccgcaatccaccaggtttcgcctttgtcgaatttgaggatcgccgtgacgcggaagacgcaacgcgtgccctggacggaacacgctgctgcggcactaggattcgcgtagagatgtcttcgggtcgctcgcgcgatcgccggcgcggagaaggcggcagtagtggtcgctctggttccggacgctacaggtaattccacgacaaaaaaactgtacttctcatgttacttggctcaatgtgtctcccaaatggaacaatggatcacttgactccaaaaattgggtactttcttcaggtttctaagcatatgatggcggtcttgcctgtaaccgtcaaaattaatcaatccttatcaaaacgtataaaatttgttatcgaaatttcattggaatcgtcgcaa

SEQ ID NO: 14225 - DNA, 2195 bp, DROSOPHILA
acatcactaatatttattgccgatggggcagggaatttctctcaccatctggcagcactgagtttcataaccagtccgccgggcttcatttcattgaacgaaaacataagcaaatcctaacttaaatgaggctgacgaacactctctgtgcccagcacatcggctggcatttcaagaagcactggctggtccagggtaggcgagtccccaaggaaactggcgccgcggcggagctcctgaagctaggtgttctggtgaagaatcccgaggatctcttgaacgccaaagttgaaaaaaaactagtggacattgttggcgcacgcgaaaaacccgttcccgaggacagcaggcaccctgactggcaccccacagtttgcaacacttactccgacaacagcgtgctaattggtggattgccgcaggcccaggtgctgaccaactccattgtgatccaaacatttcccaagcacatcgaggatgccattgcaagtcagcagttgccaaattccgtagacaagagtgtccggcatgcgattctggcatcccacgtgcttgatgcagagcaagtcaagctgcccaaggtgaggctaccggagaggccggcctttaacctgccccgctcctacggaatatcacacgaaagggtcaaccgactgttggtaaacaaactcctgcatgaaagtgaaaaactggctggccgttcagtctctgttcgaaggaagctgatagacaacgcgtcttttaagacttttttaagcaaagacggggatctgctaggattctcaatcaatgctgaaaaagtggtatttgccaaccgagccatcgaaggtgttaagggaaaattcgaaggagatctgcctgatctttaccccatgaagagtactatatcgattccgaagtaccacatttaccaagctaagaacttgtatcctttgcgctcggacatcacctgctcccacccgcacaccatctttacggtgtttaacaaacaccaagtcaaaaactcccacggatccgaggtcacaacttctcagcttcaggcgaggacactggtcaaagctttcgttgtggcagccgctcgagcaaagcaactgcatggggattccgtaggagctcttcccaaaccaattgttgtgcagagcgtccagactgacggtaggacgttccacttcggagtgttgcagctgaataccctcgatcttggtgccaatagcactgccaagaactattggttccataggcaaaactacaatctgcaaaagcagagtaccagctccaacaacagtggcacatcatcggaaaccagcgagacgcaaagtgtggatgaccagcaaggtactccgcattcagccattcgttcgagtagtgcatcattgagtagagccaaaaacagttggagacgcatgaaggagctggctgcggagaaggaaaaggaaaatgaagccaagcgacctccttggcgggcagttagcgtttccacgctcaccaagcccgataagagcgccttgcttcgggccaagttactggatgcctcaagacgactaagagctggcaaggctaatgtggccttgcagacggactttgtgccgacgaagctcatgaaggaagtcagtttcggggtacagaaggatcttattctactcaaggacgtaggtattctcactgatggacagtactccaaaaagaaggatggctatgagaagtatgttcttacctattccatgtcccaaatgaccgatagtgtgcctaccgtttcgcgacaaactcagacgctactgccgaaggcctataacaaggacctggtcaactcctatctacccaaatccgatgaggatgacagtgatggcatctccgatgtggagaagagacttggtgatcagatagccaagatacggaggctcaactttgatgaatcgaatctgtcgaggggaaaaatagattggtacgccctgctgcagtccatcgatgacctgatcaaagagtccaaccacttggtagacaaactggaacacatcatgattgagaatcaagcgcatcgcaggtcggttttgggaaaactaggtaaaatacccacctttcaaccgaccaagtttatagccccatcggagcagtggttgcccctcattgaacagcaggaaaagcaattgcaaattattttaagcggcaatgaggctaagaatgcctccccagaatag

SEQ ID NO: 14226 - protein, 689 aa, DROSOPHILA
MRLTNTLCAQHIGWHFKKHWLVQGRRVPKETGAAAELLKLGVLVKNPEDLLNAKVEKKLVDIVGAREKPVPEDSRHPDWHPTVCNTYSDNSVLIGGLPQAQVLTNSIVIQTFPKHIEDAIASQQLPNSVDKSVRHAILASHVLDAEQVKLPKVRLPERPAFNLPRSYGISHERVNRLLVNKLLHESEKLAGRSVSVRRKLIDNASFKTFLSKDGDLLGFSINAEKVVFANRAIEGVKGKFEGDLPDLYPMKSTISIPKYHIYQAKNLYPLRSDITCSHPHTIFTVFNKHQVKNSHGSEVTTSQLQARTLVKAFVVAAARAKQLHGDSVGALPKPIVVQSVQTDGRTFHFGVLQLNTLDLGANSTAKNYWFHRQNYNLQKQSTSSNNSGTSSETSETQSVDDQQGTPHSAIRSSSASLSRAKNSWRRMKELAAEKEKENEAKRPPWRAVSVSTLTKPDKSALLRAKLLDASRRLRAGKANVALQTDFVPTKLMKEVSFGVQKDLILLKDVGILTDGQYSKKKDGYEKYVLTYSMSQMTDSVPTVSRQTQTLLPKAYNKDLVNSYLPKSDEDDSDGISDVEKRLGDQIAKIRRLNFDESNLSRGKIDWYALLQSIDDLIKESNHLVDKLEHIMIENQAHRRSVLGKLGKIPTFQPTKFIAPSEQWLPLIEQQEKQLQIILSGNEAKNASPE

SEQ ID NO: 14227 - DNA, 26147 bp, DROSOPHILA
acaactttaaactgaaatcgatcttataaagattcatatcattagcgtgagatagcccaacttcgatatatcggattatataattgccacagcttgtctattaaagcggtagagtctcaattgcaacgagcatttcaaaaatagcgaaacatggaccggcaacaagttacactgctgaatatccttatatccctaacattgcaaataataagcccttcatttgcattaaatcacttttttattcctgaaagggaagagctgtttagtgagtgcctcgacaagccaggattttcttacgtgaatgagttggctgatctttcccgatttaaccgtaaaaaagatgcagatggggccatgaatatatctggaaacataaccatgttatgggacgtcgaaccttcaaatcgcgtcgcggtgagcatcatatatccttataatatccttattggctgtggttgatggaaaccacatttcaggttgaagtaaacatagaaaaatttgaaggaggtacttggaatccaacattattcaaaggaggtgataaggatttctgcaagaacttctatgataagaacaccatttattatcctttctcgacaaaacacgtaatcaacaagcagcaagttaaggacaaatgcattacaactccgggagtagggatactctaaaaacaaaaaattcgagattttaattgttttctttcggttatttagacagttttagtcctggaaccatttatcctgaagatattaatcaatttcgcagtgcctctaagcccaggaattcacaaggctgtcattatattttctgcattcgacaaatctggtgttaagcgtccacgggacacttgcattgaaattgttggcgaaatagtgaatatctgattattaattatttgttttactattattacaacgagatatattaaaacattttattcagcataataaagctaaaattgtttagttgttacatgtacttattatggaactcatgatgattcgttttaagaatatttattaggttcgattattaactctcttagttacagtgaaccagatattacattaaaaattagaaacggaataatttaattttattgatttctagaaagggcaaatggaataaactcgtaattgaaatcaacttatccgtaaaaacttcacattgaaaaaatataccggtaaatatgttaaaattaagattagcacatgaattattatttattatgcacatctttaaaaattgtattttctaggcagaatttcatacataggagttgaagtgtaatacttgaatcaatttaaccaaaagagcttcgccattttttctcaaactaagcgggtttattttttggcaaaatatatgcatttaaaagcgttattttcaatagtttacaaattaggctaatcagcgttttgcctgtggggaatgggcaaatacgatgccggtggctgctgatatagcaacttgccatcggaatagcgcatcagggtcatgagctttagcatgcgcagctcctctttgtccttatccttctccttctcccgacacctatccttatccatatccctatccgatcctatgctctgcatgtgtgcgtagtgctggtgttgctggtggtaatgtgggtggttgtggtgcgagcgattgggatctgctgactggtcgggtctttaaaatagtcaagtcattaacgttctttaaaaagctttggttcgctgacattttctcgcactgcacgtccttcttcagctcctccatgtcacgcttaagtttggcccttcggttttggaaccaagtgatgacctgttataaggaaaaattattagttgttctttactggttcacaaaggggagaatacgttttaaaatctagaatatataatttacgtttatacatttaataagtataggcaatcgataaacaattttaataataaattaattaatattttaaaaaggaacacttctatccactgtacgccatttgaaatattttattgaaattcacccctaaaagatgagagtccacccctcggattttgaatcgtattttctcccttgaccagcacctacagacattcccatactcacctgtgcgttggagaggcccaagccgccggcgatttcgtcgcgatccgctggcgataggtatttttggtagaggaagcgcttctccagctcgaagatctgctggttggtgaatgcggtgcgggacttgcgtttcttcttgggattggaacgcgtggcaaatatgttcaacgtggcgggatctgcaatgcaaaagatcaactttaaaatcaactatatcggcagcggaaaggtgtgattgcatcgtaaattattcagatatcggtcacttttatatgcttcacacggatgatcgtaaaacggtgagggtttatgggacttttggctttaggcttttgcagccaggtcagatctttgtccggagatcattgtgaggatgctttaatggtcgtatttacggccgatctttacgcactcaccggcactttcaattcaatcactgaaatgcttgtgtggttaaagcaattccaaacacacaattcgatggaattcataatagacaatccgacatccacaaatcggtggtcataaagacagctctagcttcttctatatacatatgtatgtacacccataccatcgcattttattggccacgccgcgttgaatgatttcccctgtgttgttttcttaagcgattcgatggggatttgatttgatttggattttgattgccggtatttgtttttggcatgtttaaaggtaatacggcggctgattgatgtttttaccgtccgttttgtttttttcgaaagtatttctcggcggaaacggctttcaacccagttgaacccaatggatgccagccagccagcccaaccccattaggaattgtttatttatcgcgagcaattcaatttctgcgcctttcggtcgagtgtttattaatgcccgatatttatatcgccgcggaatgatcgccgcgaatgagtgtgagtgctcagccaaagtatcaacggaaatggctgttgccttgttcgtttatggggttgaatttgggggatctacaaggacccaggaagttcgaagatgggcgaagatggcagctgcgcagtggaaaccctgtcgggcaatactgttgttgctaaacatgtccgacaaataacaattaagacacccgaatgtggtccttgaaatgtgcaagaatgtcggggttgatttattccctattccctttttccccggtgtccttgcggtttaagtcgaaattcgggtccaaagccattttgacactatcctgatgtgtttattgtgaggttagataatctactgtttggggaacgccctgtgccaccaccagtaatcgagggttgaaaggatccttggcggtaggaagcacacataaacgtgttttccattaacatgagcaggaacatgaagagttaattaaaggtaaatggtaggaatgccctcaggacacttaaaatgtgcgtgagtaaaaatgcccttcgttgggtttttgctaatgcgttaaataactttgtaaaatgtaagctaaacgagtaggttcttgtactttgtaactaattaaatgctttacttggaaagcatctttcctacgaattaatttgtgagggcaaacacatttgtttgttaacaaaatcgttgccggtaaggcaagtactaactaaacacttgtttgctaaaaacaagataagcgagataagtttgcttaaaattggatgtataaaaaatactttattaaagatgggaggcggatagtctggacaccgtttggcattttcttaaacctgaccgttagaggcataaaccgaattccattcattagccagctcaattttgttcattagccagtttaatgttgcccacttgccataaataccacgtcctagccacgcctctaattaaaggccgtggctagcttgctgttggccaaaaactggtcggggatcgcgatggtgggtgtgttttcggccatttgctgaactttattaattaagaaactgcacttcggggggctggaccaaagcggagcctggttaatggcttaacccacatggagagcgtgtgtcagttgctgcacttacagccacaatgacggagctaaagtgcacaggtatttgccgaaagaattacgacctggtcggtcacctggtcaacacctacacctcggagtcgtggccaacaaacaatgtcatcagcataactaatcattgtggcaggcggcggagagtcaccggtgacacctaaccaccgggcgacatccagcacaatgggtacaaggagctgctcctgttgtctggaaagtacgcataacttatgccttctggcagcgttgctaattgagacacaaacaaaacgacgcattgtccttgtgccagtggtgggttgggtctgcttctaatgcgggaaagtgtacactacgcaaaagtcaagttgggttgcaaatctctaaagattaacgcgttcataaaccggaagcatatgcctgttaaacattttacaacaaatctgaatttcctatttggaaagaattataatttttataactttacaaaaggcgaaagtatttctaaaggacacattctctatggtattttgaacgatttaatttaatacgggcaattatatagaaatggtacaaaaatatacataactattttaggtctaggcaattaatagtattaaaaaaacgaatgctcaaactagtatgattattattgtatttatataagaaactacactggaacgcaaataagtataactcgatgggagaacctactgtttatttggatataagagccactagagtgcctttaggaggccacttttagtgtagatagtaatgtaaacttgctagtgcgacgatttttcgccgagtgcacggccacaacgcgatttgagatggcgtgccttatcaacggccaatctggaatccattcctggtgcgcatggctaatggtgtgactggtaattaggcaaattagctggactctgctactgggaggcacataaattaacagcaattaattaaacgctcgctggttaatgccggatcacgaccagctcttccgctccttcgcatcgatcgagattgttttggaaaatgagctgcggctgtaaccagagtgcggcccaaagtgccggagcaattatgttgattaagtccgaacgattcaattaaagccagctccaaatcaatcagtcgagatcagccagcggccgaaaatgtggcagtggtaatggtaatctccggggatacacgcataaagcgaacatcttaataaaaggcagtggagatcacagcgtcgagatactctggtgctaccaagatgcgtatcgcatcgctcggataaggctaatgctaatgctaatgcccagggaacgggaacactcgaattgtttgccacaaggtgcctgctgttcacacgctcttcaaatgtttcggatcgcagcggaccctttgaaaggcgagtaggtaggtaggcaggcaggcaagaaggctggtttggtagctggatttggccggaggaaagcaggccaaaagcatgacatgtggaatgtgaaatcgggctgccagcggaagactcaattaggagcttgggcttttcgggttttcggatttatgaccgcaaggaatttcacattcccagggctctgggatgcctaaatacctgccaatagctttataagatcgccgccaccacagcgttatgacaaactccaaactccaagccggcaaaggacaaaggcgaccttcggatgcaaaagagtttggctaaaagcgctaattatggccagaagagaaggagaagcagcagcagcagcagcggcagaccacaaattgcgttgtccagaagctcgaaagcgtaatcaaaaactaattttaatcctgtttggggcttgggtcttggggtttggggctctgaggagcacaatatgaaaacgaagttgcggagagccgctttgtgatccgatcggatcagagatctttttatcggtaggtcccggttaatttattctaaatggctttttgaaatctccgaaacaacacaagaagtttacttatgacgttgccggcgtctctccctctccccgaatatgaaaataagagtaacccactttgggttctggaatctcgggatctggtatatggtatatggtatctggaatccgagatcccagcgatgattcagatcggatcaaagtcgatggcgggccctgcatatttttctcactttggcgtgtctgcgtgttgttagcaatgaaattgatgagttcgagcaggttataaaacccgataccttttggctacctttgttgctggctcttttattattgttatttctgtttctgttgtttttgttgctgttgctggacctacgaaaggccgaaacacaataacacaaattaatataagaagatgagacaaatttagccgccgacaaagtgagctggccacggagattcccattcccattatcattacgaatcgaagtgaagcgcggggtgcgtctccataacgagaaagttataaattttggtattttcttctccacattttcgagctggcgacttttcgactggtggggtcttccttccaactggaacactgtcatcgttggtcccttgtttacacgctcgtaatgcgcccataactttttgtattttgttgtcatttgtaccgccccggagatctggcaacaggctcgagtttataaccaagtgctcttttcaacccaaaatggacgttgttaaggaggagctgatgtataatagatacatatcttatattctaatatctcacaatggtactaacaagcaaaatcctttttaagactgcattaaataattatagtttgcggtgtagaaaactaaaaattgattctttaaaacattattgtaataatcaaatggaaggttggctattaaaacggacataaacccaagatcacttagtatatatatatcaggatagaacaattttatgttaatgggtctctgcgtgacgcctttaggctattgaaattactgattagctgttggcataaaggactttctctggttctttttttgccccttctctttaattgaaattttcttacgttgcggcagagcgtaaagtattcatgttcatgttggcccgcagctattttgattgcgatattacatcttgtaaacattaatatggccaataatttctgagtgccccggcaatttggcgattggaagaacatgtcaacggtacctgggggcagcaatcggatgttttcgatggctaatttcttcatacacatgttcatgcaccgaacgatcggatagtggggcactttcttttcgacgtcccgcggctcgttctccaatatatgtaaacatataagggtaaacccacaaatcgtttgcaggcgatgttcactcactctacactgccgcaaaattgagctggtgccgaaacatatgatcaaaatcgatcgagcttatggatacggagaattttattgaggactcttagcatgaagcagaagatgtatatataagtggatatgtccaagtttttaattactaaagatcacttgaagctgtaacctttcattgacttgcgactttcacttgtaaatgccagtgaactcgttggaccacccccggcattacatttgattgattttaatggctggcaaatcaattgcgtttccgacgcagcgaaacaaagcgccgaaaacgtggtcatccttaattcaataatgtatatgtagggccagacgagaagagtcccggccacacaccgatactcctccgcgggacacccgtccatccatccatccaatcatccatccgaccacccgaccataccaatcccaattccgatcccgaaccccatccttggcatccgccacatgattcacgatcggaccgttgcgcatgcgctacgcaaagcttcggatggacaacgggagggaggggacaacgcgtcggctccgagacaaagtgtcggctccctttgatcaacacgtataaaatactatggccccgccctctaaaaggcagattaaacgagatggcgctcgggcagtgggcaaacgtatacttaaacttaacgtaacgtaaagagcaatgaagtcagtcagtgtaagactcggccgaacacgaagctgcagactgggagctcggatcggtgggacgggacggggcggaggagcagatggaggggcttggagccagtctctggatcccaggcgatgtctgcaagaaccatgtttcgacgcctcccgaggcgcagtggtagtggaagttgcagcgacagtgggtcaaaatcataaagacgtcgataaaaaccagtacctgcagtagacggcgttaaaaggtatattctatttataatttaagagcatggtgaatagtagagatttaggagttaattaagaacacattggcaagcacttttaaaaattcttaatgctgtatttattatatttaaatgccatgaatgtaaatcttaatgaacataaagacaataaatatatgcataatatttttgaaagtaacttttagtacgccccagaaaatgttacgaattcacgtatccccaaattcgtagataatttttcctatgacgactgttagttcgccagagaagaattgaaaatagaaacacacgaatattggtatattggctcgtcattccattcaagatgtaacgatgtttaaaatgtgaaaaaattcgttgcagtcacataatttttaaagcccaaataaagtttgttcgcctactttgttcaactataaaacttttgtttaaggtagtaaaaatcaccatttgttgtaagagctattggaaatacacactttgcaactgttaatagtccgccgatatagtaatgagtcgagttcccatgatggcagctttatggccaaccatagcgcaatttataccactgtgtgagcatcgcttgttcgttgcgagacaataaaacttacgtagcattgcaatttgggcgctgagcgggttcatgcttgtattttcccccttctggcccagattcactacccctttcggtggtggaagggtccatccactgcatcatttttatgtttgcatgctctttaagccctcccgatctggggcggcggtatttggcggctgatgttaagtgaaaatctgggcttgcaatcgctaacatcagctaacaatggtcatcatcattaaaaggcgatcaaagggcagacagcggctctcggaatggataggctgggatgggatgggatcctgtgccctgattgagtgaccttccccagctccgactcctggaccagcctcctcgcacacacgactccaatgtgggccagcccatcgcgcggaatggacttgctggcttaatgtctttataagtagcatgtctatggagacgatggacaagaggggcgagaagggtgagaaatatgcgctgtaatcaaaaccgtttaaaaaactacacactaattgagttagaagttcgttgggggctttgaactggccgccggatcaaaggcgccgccgctctattggtggcacaacaaagagcgttgacaacggcatgtaaagccaacaatgccccaagcagccactagatgaatggatccctgctgatgatgatcaccatggccataaccatcgcgatcgccgagccgctaaacttgccccacagacattgtacgatagttttgacaactcagcgaaaccaaagcggcgacgaacaagaggaaaacacatcgagtgcttattaatgagcgctcgccaacaaaaaccacaggttgggaatcaattttaaatttgattaaatgcgaatgccttacggcggggatttagctgcactcagagaaatgagctaacgaacttagttctcggaaatcagaaataaatgaagtcatttatgggacaaatagaagaaaccttaattttaaatcaatttcaaaaaatatgtaatttaattaaatattaataattaaataaattaacagtattgtcaaaattttaaagtatatttggaaaatgtatacgctcttaacaaaatataattacaaaatgtaacttacataaaatgtgcgaattagttataatatatatgatttatttactcgttacctaatttactcgactatcaccttgtataatggtacctaaattactgaggattaccagcgcagtttcgttgatattatgacaagctgtcataaattacaaattaatgtactgatgcgcagccagtgaaaaagagatagacagagagagttaggagtcggaaccagaatctccgaatgacttcctcaacttggaatcaacttcgcagcgaccaggaccaggggcaatctaactctctgcaggtagctggggtttctgtggtcagggtcgtgcgatccatcggatgcgatgcgatcgaatccgatcgaatctgatcggatctgatcggataggatggtgtggatctcgatcgcaatgcgcatcgattgttcgtggttcagggttctgggttctgggcgggggtttgggattcttcaggtgccggcattgccaccgccattgactggcctaccttacacctcgcagaagcgaagatcaaaggctgccgtgccgacttaataacataaattaatcttctcattgttgggcccagagagagaaagagaggtagagagatagagagagatagcaagtccagttagagcaggacggaaacggagagcctgtgcacatgcgtgccaaaaatgatacagtaacaacacgctatgctaatccgtcgttgttggttgcctaaccagcctctgttaacgcacaaagccaaaacggcatttaatttggttttagcccggtatttggctccgattcgatttcattcattatttcgtggcgagcaatgaatttgtagctcctaagcggagatcaaagcgaacgggccgacggcaaacaggagatggactggttgtgcacttgggaaaaaagttattatttttaactttaatactttgggaccttgtcatcatgggttagtgctatatgattgggctccttccaaaaataaattgagaattataagcagtttggtgaataaaaaaataaataaaatatatatattcgagaatattactacccgatttattactatgacttctctcagactttacgattaaattgattatttgctgttcaagatcgaagtttagatttttctcagtgcagagctggcaaatgtgctggcgagggttttgatcgaacggctatgacgacgaaaagcaaccaacgagtcagtattaggtatttgaaatgacttgccaggcatgagtggaaattgaaacgagcgcggcatattagctaatcaacgcccattagtcgtaaggtattggaatttatgataaatttccgttagtacccatgcgactggagcccagattgcggcacgagtggcagaactcgcaactcaggaacaagttaatttgccgcggtctaggagtctttacctatctaaaacacggtacctgatttgcttgatcttcgatcccgccgatcccgaaagccgtgtgataaagcaggcatctttataacactgcgatcgcccagcaggacgactagcaagtgcatcctctcatcgcagtgcatgtgcgcctgcgcgctaataacacataattttgctgtaaaacaacaaaccgctgcgcatcgttatcattatcgttatcattatggtgagtttttatgtgcgcctgcatgttgactgcccgttttcgaaaaggcgttggcccgcttgccgttttcagtccgcagtccgcagttggcagttggcacttggcagttggcagttttcagcttgtagtcgccggtttggggcgacaacgacaatatcgcataatttatgtttatcgatatagccggccagataagcggctttaagcaagagcagtgggccgcgctcgtaggttttgtttttagtgagtgccataaaatgaaagttcactgccgatggccgttcgttgcgagaagttggaaaaatgccacttggctaccagctgagaggcagaaaaagacatttgactcaaatagagttggcataaaaagataatcttatttaaatttattaaattcaataggtatcgcaacacaaaactctcagataatacttgacgtttccttcaattttacttatgattgttgcaacataagcatgtattaaattgtaaagttttaagtttcaaatcaacaaaaagtacaccgataacttacattggtctctattcataaatctaattagcaccatattttttttataataacctctaaatgaagtcgtcaagataaagacatattaccaggctccatatctatttgattcgaaatagccaagtcttgcggaccgataaccgtttctgcgttctctattgactggtcttcagaacgggttacgtttacggccgatccgatgcgatccgagctattagccataacaagcgaccatttgcatggcgcttttgatgtgcgttcgtgttgcgagggccgtaaaaagtgttttgcatgttgcaccgaaaacacaaaaaactagttacggttatgtgtataattacggcgacagcatgttggcatgacaaataaactgcgagcgagaccataaattaaagtatcagaatgcgtgaggggagggcggggcagtgggcggatgggcggttggtcgggcagcgggtgtggcagggggagtggcacacgcaaggcgtcaagaacgggattggaagtggaaatgtgcaggacgacgaggtcggcggtggaaaagcggaggcttaacggcaatggccacctgacgacaagtctgagccaattgttaagccgttgatatatgcctggtttagatataagcataagtatgtatgtaagtatgtaggcctgattctgcgagtgcgtgtttttttgtagtagactcggcactccggctgcggtgggcgtggcacacacttagccttcgtaattgcaaggctcgccggatgacaagccaaataaattaacattaaatattgtgcaaatccactttttgtacacatcattgtgtgcactgaaagaaaatgatgtttttatagaaaatcgaaagtgtactcattcaattttaaagtacaagattcatatttagcttgtaatttcgttactacggacaagttcttttgtgattacttgaaagtaagatacaatatgcaagatatggttacgatgtaaaatcatatacccagcattttctttaatacaattgcgtgtgcatataatcacttagaatgttatttatcttatgcataggatatctgggaaaactattgcacattaaaagcattataaaatcccccaggggatagggtaactcccgctgttgcgtatactactgtcccatttatggttgccgctttaacggcactgcaaacaatgcgcagatttatttaattgcaggtgacgcacatgcacgcacacatcagcactcttataatacaaatttacgcacaaaaatgcaaaaaaagccacgtcgctcttggaatttatttaattaaatctacgccccgttggcagccacttggctctcagcccctccgatcgcccaaatgcacataaattcagcactttatgcatttgctcagcggctgccgcaggcgaagttgcagttgcagtcgcccaggctgccattacgtatacgcagcgtattgctggaaacatgccccatgacaatttcgttggcgtttacaaatgtgcgtgatgcccaaggcgaaacacagcggtcagcgttagttgaactgtcataaaaaggcagatcatttggtaactgagtatagaatgtgaatactcgtggctatagtttcagcccaaattcaaatgcaagggataggaaaaagttataaaggtacttcaaaaattacttataaaactcttcttaatttataaggatatattaagctataatctgaaacaatagtagttaattttaatcacttaaatagttttaaattttggttttaactaacttggtactacaaagagatcaattgtagtggaaatcgtatatattcatagaaataagtacttacaaatgagtcaattgaaattcttaaagaaattcttaaagaaagattctgtcaattgattgaaatatggacttcgacttgtttatccacacagaactttaccttctgtgtatcatcctaagatattatagggtattccagaaatgtttactgcattctcgtgttcaaaagtcccacgctctcttgaaaaaggagaatttatgaaaaattcgtgttatttcctacgtatttcacatctgagctcgcacaagccgattcgatacactggaacatatgtctggtgcttttgtgtctgccaaaagcgttacgtgggccgtctatttttggccaaacttaacgagagcaattgatatctggctgctgatattggtagcgaaatcgataataagagtgggtcttttaggaagatctttctaagactatgctttttcatgtttttgtcgtggtaggtggaagttctgaagatgagtcggccgaactgctagctcctttgttggccagcagctgctcttagccttgtgcctccgcagtcttaagtggcagcaacaacagccacatccacaaccactgagtggccaaacaaaggcacatagttaagcataatttaatagatacgccgctcgggctctgcaatctctttatggttgacactattgtctaggccaagtttgtatgtggggccgtcataaagtgatgaatgcattattattattgttattgtggctgccgtcgtatggcacagtgtatagtatagtatagtgtatagtgtacattgtgtattgctggctgggcctttgttgaaaagcgttaattgagtgttgcgaatgtgcaacggcaattgaaattgtttatgacttgcagttgctgccagccttagctcatgctcaatgatgtgtaatgcaactgtgcctgctaatggacccgcctgtcctacactatccacttggccaatcggctaatcggctaatcagcggctgtatctgagcaatatcctgcgcaccaaaggataccgccgacggcagctctctcctacttgacaaaacactcgggccttccatttggggagcggtgattatgctttattaagatgcaattttcattaccgcaatcgggacctgggaatccgtaatcgggaatccgagccactacccacttgaactcaactggctggctgccggagggaacacttgacggcgacgacgaagatcggctatagaaaatttcgtttctttcttacatttagtggtttttaattgccataattagcgagaactgggagctgcaaggagattcaagtgcattctgaagtgacgtctgccgggtggatggttgcccatgatggccgacgtagacgacacaagacggaagcaattgattccgagtctgggccataaagatacgccataaattaacaccaaagcgattaatgaaaagtggcgatccgcatcgggagcacatgttttgtgtccgacgtcgacccagtcaggatattggcacattaaaatcaattaactggcccgacactctgatggacgcagttctcggtttctggtcacccaactcgaaaagtggaactgtaactggtacagatcttcggttggcatcttaatgagtccgatttgttcgatcgccagttgattatttcgtggatgccgtgtcataaacttaacggccatttaaatgctgacttgtaatttgtaaaggtgttggcctggcgcgatctgtcggccaagcatttagcattaagatttgcattgtaaatgtttttacactgatagaataattcattgtgggactataattaaaggcgattacaaggtattggtaaatatatataatatgtgttaaccacatactttagatgcttatttgtagtgaattattaagaattagtttaacagtgtgattgaaaattacaccaatgtgtaagttgaaggatatatttgtacgtaagttcttgctttattgtataattaaaccaatcaaaaacatgttatattcgctttgtatttattgtatgtatttattttctaaggccgcaaagtgagtttagccaaaaaaagttaattacaaaatacattttaatcactctcaatagcagttcacttagtgacgaagtggaaaatcatttctcgccatataagtggtttattataactctgatcttcatgttgatgttcatcacgtacatttattttaatgaatttacagtgttttttttctgtgtaataatccccacgactcgagagctttgacgtggaaatcagcaccattttaggttaacactgcttatgtttttagaaaacagaaaacagccccatttgattagttctgctcgctcgttccgctgttatgacaaacgaaacttagcatttaaatgcattcgaacttgactggctggctggtggcaggcagtcaattaattaatcgaaaaactgccgaaattccaaagctgtcagcccgtagacatgtccctgaaatgataaactccaagcccagaaatccgtcgcgtcggccgatccccagtcattttgccacttgagcaataagccagtgagcaacccttgtgcgcctccttgcctttattttatgtttttttttttgtccgtcgactgtctcttttacattcgttagttgcccattggcccctggcatttatgtttaacactttaattgtgattacaagctgcaatcaaacggctacgaaaataaactaaaggtcggtttggcttggttcggctcttcgactgagtgactaactgacttgcactcgagccaccggcggtggttgcccctttcccagctccccgctctcttaacgtggcttatgcatgtttaagcagcaactgcaacaccttttggcaacaacagcgcgtcatgtcgctggctttattaaattacttgtcaaaagtgcacacacgagcctgagttaagttaaagcccgaacggggaatggatagaggggaggtggaagggggcgttgcaatgtcggcagacatgaaacagccccaaacaaccaggcgagtatttacacgcagaaaaaccagatcagtacgcatggaatttaaaatatttaacagggctaatgctaatattcatactaattttaataaaatatatatgcatattatatgcatgtgtatgtgtttttattttatttatgaacttatgtattgaatatctggttacaaagtaattttaaattccattaactggaattagtggctgcaatacaaatgtatatacattttgcacttaatagatactagagtttacacactatttttcctctgcacttaactcttctgcatatggccaaaacatgaaacacaacgcctttcgttggcataacgagacgtgtcataatattccgcactgcaaaacgaaatacaagcgaaatcgaaaagaaaagccatggataagaaaatcaattaaggcaaacattttgttttcatttcgatttccccgcagctgtgcaaggggattaattaatcttgtcagcgattgcaagtcatttgccatggaaacagcggcaaacatctcgcatagtcaaattaatttacttcacactttaataaacgattacacaaatacccaccagcacatggggctgctgttgtgccgatgaaggtgttaaatgctttgttgacattgcccacagtagcagcccatatagatatagaactatatatataccgatctgaggaagcaattcgggggaagaaaacattttccacagcttccttcgattttaccgtgaagtttgtcgttctcggcctgttttattgcggtgattgttggtggttgttgtttggttctcagtcgtgttgcgtgtaaatagcaacatccacatccacaataacaccaacttgtgcttgtttttccaaatcactgagttttccattcattcccgcattcgttatgcccttcgtccctttggatttgggcgaagtctcgaatatgttccagcgaagggctgaatgcctctttgatgtactgactgtgcgggggaaggcgtgaaaatgacttaatgtactgattagggaaagtcaatcgtcgggaaggaaatgatttcgtgcatccgactgtagtgggaggttgagaaattgaagaaatcacaggtgatgattaacagattgaatgggactaatacatgctcagcggaactaatgggagacgtaacaataaatgtgaataaaaatgtgacactttaaacttcttgccatgtgttttgaccacttccctctgatatcataatatattttaaatccatttaaccaccttatcaagatcagctagatctcctgcacttcatgttattatcgaaatacattaagaatccgccacgctgcagaatttaagcgttctttgaagatcctatgacggagcggtctgattatgatgaaccctaacgaatcctgttgttttacaatgtatcaaacgatagtcggggctcgtcaaaagtgaagtagatgactgcacctgtcggcgcagcgaatggtcgaagcccgaaggagggcaacaccttgctggctggaaaactggaagcctggagttcctggggaggaagtggaggtccaccccgagcatctgcaactatgtttcttcgcattaatgtcgcctgatccgtagccgtgaataatttccccatccgctcggttgattcctcccctctgaccaaccaacgatcatcgctcgtttgttcggcatcgctgctaatgatttgaatgctttaatttatgctggcttttccacatttatcatcaaaggcctgggtatataaatatgatttgtatccatgcattttcacgattattacagaaactcccgcgttcctactgttggcttggaaaatgctcctaatctgattaaaacccatatcataggagagaaagtattcatttcatttacctagtttggtttaagcatctaatttattatttgtccaattatataaaatattttccatagtttgaataacttttttttttgcagtgaactcagagatccgcataatggccagcgctaggatggaaaactggttttgcccgaccaggcgccaattgacccacataatgtgcagctggaaaagccgcgaggaaatgcgttttcccctccgagccttttagccacctcgccatccggctgcagtagttcgctgggctgtccgtgaacgcatcaatctcgcgctccgcgtttcctggccaagaccctgttggccaagactgctggccaaatgcagagtgcgctatactccgtggggccgcggggtcagcgaggagtgttgctccggggcacggggccaggcagaaaatgcgtttttaaatggtttttatgcgtggcgcgggcttttgatgttcgacacatgccgaaaattcacagctcgggcggtcccagctcttcactgcggccagtgattaatgtttagcaaaaacgcgaatgcgaatgcgaatcgcagtgggaacgagaatgcgaatgcgtttttaagaactttgacaaggtcctgacttgaatgccgcattccagccccttttctgggttcatttggtacaccgaaaaagaaagctactaaaattgaatgaatgttgtgaatatttttggtagatataaacttattacgaagcgaattgtttcagttgtttccattgttatgtttgaacataagtttcttaagagatgtacaaatacattgattgttaacagcgaaccgtgtttaaatctgaaccatcctgatttctcttcgtgtagccaaccctcttagcatttggcaacagttggcctcggcctcccatatggccctgctctgatagagttattaccaaatgtactgctccttggccaactctcgttcgcacctctatcgctcggctgccactgcctttgccacttcctcatccacttccactccaattcagtttcattctcagtcagagttcgaggactgatctcccggctggctaattctctcatttgctgtctcttgtgcaactgtcgatgcttgattttcgcttgtctttatgatcggcctgccgtctttgatcttgacgccgatggacagtggaggatgaaatgaactggacgggactgaactgagctgaactggacccctttccgcccgatcggatcgcgggtaatgggcagagaagaaaaatgcaacttgagctcaattagtgctcatcaaaagcgtgcaggcaacaccttcagtgcgtcgctttcgcacacctctgcagccgtcgtgtatctgtgtacctgggtatctgggcatctgggtatctgggtatctaagtatctgagcgtctcagatactgatgcgagtatatgctggccaggcgtcacttgctctgactttggctctaaccgaaccgagcgagtcatgcaatttgctcgaggggtgccccatgatgacggaccacccgagtggtaccgcttgaaatggtatagccctatatgggtagaggtgtccatcccggagggtcgagggccagtgaaagcaaatcaggcagttaaccaattttgaggggccaccacgtaagttcggctagttttctgtagttttcgctggctcatattaatgcaaatgctttatggttagccggcacgcaaactcatatttctctgccacttttacaactggcgaattataatttttaataaaatatttgaagcgcaaccgttaattagagaatttatgccgaacgccggcttgtcaacttgtttcggctgctcggaggctttttgcaatatctcatgcatattttatgcgacgttagaacagtttgcgcccgcagtcatttttctcgattttattgaggcaaacgagtctcgccttctagcattcaataagcacatatgcgaatcacatttttttttatagtattagtatttgccgcgctcggtgttttaatgtcattaacgaattttgttgaaacgctgtgcagctattaatcatttgaaatgaattttatttttacactttagcggaatttctttttgtctgcttgatttatgtgtagtctgaactgggagcttgttgacttttgccaaaggttttcgcctattgaatgggattcttgggaaacatttaaattgaatgaaattgcaagtgcaattgatcaatttgcgcattgatcgtcggaatgtgcagtagatttgtgcctagctggcaaggaactcaaatgaaaccttggtattttaaacaatttgtgctctccagcacaataaactaacagagagattgttgttatccaaatatctgtgtgctaaattgtttttggattttgatgcacgcagcactaatatttttttatcagcaactagatttttaatacccggcgatctggaggcaaatatatttgaacagcaattacggggcaagtggccactaatgcgaaagatggaaatctatctggcacagcagatatacatatacgtattatcattgtagggggcgttttaagccaaggcatgccattctgaatgtcacgttgttcggaaagtagaatctcgaaaagccattaccccacctattagttgcgatggcatatgggacatgggagcaccatttgtggatgtggaccggttatggatcgtttgatttgacgtgactgaaaattgccctctaacagctctgactgggatccatttgcatggtagttagcacacaggccggcccactctccgtgcgaatttccaattataactataatttatgctcaatccgccacttatttacattttcgactttgctcccattcgaaattaagtatacgtctagttgaactaattagctccgactctttgggcagcctaacaactaacacccggccagcgttttactattgttatttggatccgccccgccccgcgacctcagcccgcattttgtaaaatgtttacactgctatctgtcaaatcaactgtcaacccgaagagccatcatcattgtggccgaagtgtgtgtgtgtgtgtctagggcctgtcaatgtatctggttgcggtgcgtttgtggttcatgctcggctgcgtcgcagtctttgggtcttctggtgttctggtcctcaactgccatggccgccgcctttttgtcaagtgggaaaagttttagtaattaaattgtaattagggatgcatccgccgctctgtgccgtttgtgcgttcaataacgcggctgtctgtgccaattgtcttggcgtttcatcaagcccacatttcagcggcagccaccgaccgtgctgatcgccccacgaccgggctttctttgtgcccaagtcgccatccgtttgccggtataccctgtaagagggtagttcccccagtaattatccactttccattttcaattggcggaaccatagaaattctacatactaactgagaaaatgtaaggaaaccgttctacgatctaaaagaaagaaacccttctggcaacattcgactctgctgaaacgtgttaaagggtacccattcttcggtgacgtaatgtggcaggtatctacgcgtaattgacaagacctaacgacaggtccattgttcaaatagctgcaacttttcagccattttcattgtaattattttgtatgtgctgcctgggcctctttatggcttatctgccggcaatcgtcatgagcggtgagcaggcccaagccccaagtggggctacgatggcgttgcaatgggagttgtcgctgctcctaattaccaggcggaagtgtctcagatctttccctcaactggccggttacggcttttgatcagccgggcaaattgcaggaggcagccgtagaaagggttcagtccatggccaacctcgcgtcttctcttccacttccacaccggatgctgtcttgggaaaaagcaatacaattttcgcaaactgcggcgcttaagtgcagctcggcgataatcataatcatcccgggcggcactcaatgccagtagcagttgatcaaccgatcaaatcagctggtgctgattagatggctctgtggcaaccgaacaacccaacagctcagcaatccggcaatgcggcaatctagagtggagcacgaaccaattggctgatgtacgtgcggcgcgtaaattcaatttcagtagctgatgaacaaaagcgcagaccatgggttcgctgatggattgctggtcagtgcactcggaaaaaatatgacagccgctgtgggaagatattttaatagacattcatggccaatattgttttacaccgaaaaatgatggaaattgatttgcagatataataaataaagaaatgttccgttcaggatatttttaaatactcttagttagttgtttgtacaataatttgtatcaaggtgatgtgttttccaaacgaagatattatgaggaatagttttcccagtgactcccggcagtttctgtttttattccgagtgtgggataaatcggtttgcgtctgcgacttaacgagaaatcaacgccgctaagcaaattatgccgaacgatacgcatgcgccaaagccatcagacatcagccatcagctggagtctgagttcgagttggagcagcagctcgccgcagctagagcatcatcatatgaccgggctggggccttcgagtggatctgggtatgggtatgggactgggactgggtctgggtctgggaaaggcaattgccatcaaaggcgatgccgagcgagctgccagccggctggcctgaaattgatttagccacctcggacgagcaggctgacctcactactgtttttacgccttaagcagaatctcatcaagacgtaatgacaacaattgatcaatcgctggccaggctaatggttatgatgggtctcgttgggaaatcagtttatattaaaatgtaatttgattgcggttgtgcacacagaggtgaacgcggagtaagtaattctacagtttgtggatatttttatgttgaagatattccaatcatatataacaaaaagctcatatactcaggggtgttgataaaacttgagaaaaagctgatgaaatatctattatctctgcactataattttgtttgtacttttttacatatagtaaatatgaagaatatgatttttggttgtccactgggttccgcagtttaaaagcaaagtcttcttctgtttggatttagaggaatatattttctcttgaaaactactcaccctgctcttcgtcaaagtttttggtggacagctggaagagggcatccaagggagtgtctccacttgatttgctggccccctttggttgttcctcgggcgacttcttaggaacctccattctgtcctcttgggaacgtttttccactttttccgcctgggtgggactgcagcattcggtgctgccattgctgctgcttgatcgctgggaacgctctgaactgccgtcctcggaggcaatgatcgcgggattcagggtcatctgccggaggagttgcgcctgtgcctggaagtgctcctggagctggcgctggtagtcccaggccagtcgctgctcatagctgtggagcaaagcgggcgataaaaatgtatgtagtgcagccggcggagggcaattcggcaccaagggtatttgcaatctttcgttgatcagagccaatggagcaggtactcctggtaaagcattgggaatggcaattctctccggcttcttctccacacgatcctcttcatgccctcgccccaggatatcggcaatggaaaagctcttgaccctgacgggtgatgacttttggcggtcatgttccaggctaataggactcctcaaaagccgcaatcgtttcatattcaacgatctcagaggcggtggactgggcgaacccaccgaaacatcagagttagcgggactgggagttctttgcggcatctctaggtgtattttcctttggccactcagcacatcctggctgtatccttacggcttagctccaaactcttttctacgggcgattaaaaacgcgtcggcaaaacgcgcggctgtcacacgaaaaacgtcggcacaacgtgcaacacaaacaccaacaacgaaaatggctcgtggccagaatgcgatgctaatgctgctcggctctctgtctctctttcttggccaagctctctcaactgctttttggggcctccaaactggttggcacccatgacgtcacggactcgcgcagctgcgcagcttgtctaattggaaacgccgcctcgctctcgccaagggggcgtgccagcagaaaagagagagatggagagagggagagctaaccagaggaccaatagcagttggtcgagggccatacagaccccctcacccgaccaaaagtcgctgtcaacgtgcgaacgtcattaatttgtacaatttgacatgcgctctctttcctccctctctctctctctctcattctcgctctctctctggggcggcactatttccctctctttcccgtcgctttccaggcgactgactgcgttaattatcgtaattgttggctcacccgctttttcgcagctctcttttggcccactcaattgtcatcaataatgatgtctcgttgtaccgttggcttcgactcctcatctattttccactggaaaaacaagcctcttcgaatccgtgtttcgagacctctgatgcactgggaaaaacagttccccgaactgacaatccttcgttcaagaacgtctttttgaaagaggtttatttgtcataaatagatgtgcctatgaaaaatattatagtaatgtaaaaatgtctttctccctcaaacttcctcaacataaattaaaaagcgaacgaattctgcacctcaaaagtaataacctataaatggcacaacatgacagttactttgctcttcacatttattacttgttaacttgagatcgttgttagatctaataactagctgcatcttgttagttagttagtttctctacacacaatttatgattatattattttatattttcccatttatatttccatttgtttaagtgcattttgctggcacacattcgtttgtcttgccacttccctc

SEQ ID NO: 14228 - DNA, 1847 bp, DROSOPHILA
gttggtgtttgtgttgcacgttgtgccgacgtttttcgtgtgacagccgcgcgttttgccgacgcgtttttaatcgcccgtagaaaagagtttggagctaagccgtaaggatacagccaggatgtgctgagtggccaaaggaaaatacacctagagatgccgcaaagaactcccagtcccgctaactctgatgtttcggtgggttcgcccagtccaccgcctctgagatcgttgaatatgaaacgattgcggcttttgaggagtcctattagcctggaacatgaccgccaaaagtcatcacccgtcagggtcaagagcttttccattgccgatatcctggggcgagggcatgaagaggatcgtgtggagaagaagccggagagaattgccattcccaatgctttaccaggagtacctgctccattggctctgatcaacgaaagattgcaaatacccttggtgccgaattgccctccgccggctgcactacatacatttttatcgcccgctttgctccacagctatgagcagcgactggcctgggactaccagcgccagctccaggagcacttccaggcacaggcgcaactcctccggcagatgaccctgaatcccgcgatcattgcctccgaggacggcagttcagagcgttcccagcgatcaagcagcagcaatggcagcaccgaatgctgcagtcccacccaggcggaaaaagtggaaaaacgttcccaagaggacagaatggaggttcctaagaagtcgcccgaggaacaaccaaagggggccagcaaatcaagtggagacactcccttggatgccctcttccagctgtccaccaaaaactttgacgaagagcaggatcccgccacgttgaacatatttgccacgcgttccaatcccaagaagaaacgcaagtcccgcaccgcattcaccaaccagcagatcttcgagctggagaagcgcttcctctaccaaaaatacctatcgccagcggatcgcgacgaaatcgccggcggcttgggcctctccaacgcacaggtcatcacttggttccaaaaccgaagggccaaacttaagcgtgacatggaggagctgaagaaggacgtgcagtgcgagaaaatgtcagcgaaccaaagctttttaaagaacgttaatgacttgactattttaaagacccgaccagtcagcagatcccaatcgctcgcaccacaaccacccacattaccaccagcaacaccagcactacgcacacatgcagagcataggatcggatagggatatggataaggataggtgtcgggagaaggagaaggataaggacaaagaggagctgcgcatgctaaagctcatgaccctgatgcgctattccgatggcaagttgctatatcagcagccaccggcatcgtatttgcccattccccacaggcaaaacgctgattagcctaatttgtaaactattgaaaataacgcttttaaatgcatatattttgccaaaaaataaacccgcttagtttgagaaaaaatggcgaagctcttttggttaaattgattcaagtattacacttcaactcctatgtatgaaattctgcctagaaaatacaatttttaaagatgtgcataataaataataattcatgtgctaatcttaattttaacatatttaccggtatattttttcaatgtgaagtttttacggataagttgatttcaattacgagtttattccatttgccctttctagaaatcaataaaattaaattattccgtttctaatttttaatgtaatatctggttcactgtaactaagagagttaataatcgaacctaataaatattcttaaaacgaa

SEQ ID NO: 14229 - protein, 372 aa, DROSOPHILA
MPQRTPSPANSDVSVGSPSPPPLRSLNMKRLRLLRSPISLEHDRQKSSPVRVKSFSIADILGRGHEEDRVEKKPERIAIPNALPGVPAPLALINERLQIPLVPNCPPPAALHTFLSPALLHSYEQRLAWDYQRQLQEHFQAQAQLLRQMTLNPAIIASEDGSSERSQRSSSSNGSTECCSPTQAEKVEKRSQEDRMEVPKKSPEEQPKGASKSSGDTPLDALFQLSTKNFDEEQDPATLNIFATRSNPKKKRKSRTAFTNQQIFELEKRFLYQKYLSPADRDEIAGGLGLSNAQVITWFQNRRAKLKRDMEELKKDVQCEKMSANQSFLKNVNDLTILKTRPVSRSQSLAPQPPTLPPATPALRTHAEHRIG

SEQ ID NO: 14230 - DNA, 10072 bp, DROSOPHILA
acatatcgccatatcaactaactgcacaaataatgttatgttatatgttaataatgttaatgttaagaaacatgtgtaattatctatagctcatcccatcgtaactaatctaacttatgtgctataatgttaatacttagaaattagttttagtgtgaaaatataatataaaatgcaatgtatatgaacacaaccattttgctcaacttgcagataacatgggatcgggagggctctgaaatatcgattagcaagagctattcgcactctttgcaaaacaggttgcaatttcatgcgatccgaacttgtttatagaaaacatttttaatgggccaatttcaaacgactttagcacgaatttctttctttatccgtggcatactctagaagctgaccttagctaatataagcaatcacgttttgcttattggaacaagtgttttgagcaaattaaatttccgtgcaaaagagctacaagtgatatgaagaacattggtacatacgactaagttttgcggtatttcagtattttaaaattgttttaataaataaataaaaaattactagaaaatgtattatcaaaactaaaaaatgtttaattatttaaacattacacaatgcatttaaacaatttttcaatctacatacatatcctcctaattttacatcaccaacgcttagcatggttttcaaccaacaatgtaagatcgaatcttttctacatgaaatgtaacaaatatatgcgaaacttggctaaaataaaaagtcttgaaactcagatggatttgttatatgtataacaagaaaatcataatcagtcaattgagattaagccaataatattgtaatttttttaaaaggaaaacaagatttgttgagtttctttgcttagaaacatagaaatgttaaatgcgacatagtctttattgttcaacattaaactttttaatttattatattaaacaaggactagcaatgaaagcttactattgatattatattatttcgggtagtaaaatactggaattttatcgacccatttctttaatgaacggttcatatccgtcgagggtccgtattgccgtaccacccgttttatccagtcagcgtagctcaatagatccatgagaatgccagagttctggcactggcccttcaccctgctggcgatgcccagttgcacatagcggtctgagccattgtgccacattttgcggatctgcggagccccggagtcggtgctgcagagttgactcaaggtgttgccggcgcagatctgttcgaacgtcatattccagccatagatttcggagcacgtctctttgggttggcggtcgatgttcatggtccgaagaactttgctcgttgcgttagcggcagtttcacgccaaacggtggtcgtaaaccaggtgagctggtctatcggctcctggaaacggttgcttgcgaaaatgcaaatcggacgtatgtgatctgcatatgtgaaatgcatcgatattataaaaatgtcgtactcatatcctaactagacacacttaagtactccaccctccttccgagtcgcagcatgccgatgtcgttggtttggtcattcgcattataatacctatgcctgaagcccatatccacattgtactcctggaagggttcctggcacaggtggttgtcacagtccaccttagtcttcgtgttgtactctcccaggcgaacggttctttaagaaaatagtttaattagattcacactgagtataatcgtaatatataaatatgtttttaatgattaattacattagcaagtcgtccggaacacagtgagctgccgttaagacgaacactgaaacagagttgcattagatctgcacgacaagtatatcatatgcaaacatacagtgattaattagagtgccagagcaatggaatccttttggagtttccaaataggccatccatggattctgcgccaactttgcatttacacttcgttcagaaatgttatgcggaatcccgcaatcctcttccaggagcatttgaaatccttgcacgcgacgccacagacagcaaattactgcgattccaatgatgaagttgctcattgcttggaggttctttctgatatactgaattctcgaacagcctctgcaggttttattcgcttcacaaagtggaccccttatcgctggtgccgttctgggaattgcctacaatgtcggcaaaagatgagcaaaagaacttgaaaatataattccccattttatttttgcttatactacatcttgatctgtactcatctatcatttaattgtatgtttttttattaacaaattgataaaaaaaaaatatatatatcaaatgtaacttgcatgcccaatataaataatcaatgtatgtgtaatttattagttttagtatctgtgtttattttgaagtattttattcaccgtccataccaatccactacctttttgatccatctgccatatcgaaccacgtccgtgagaatgctaactttgctgcaattttcatacgtgaagctggcgatgcccatctggacgaagcgtttcatgccgaaaatcaatacgtatcgaccttgcggaccaccggaatcacctctacaaaggttaccatcatcatttccggcacagatctgtccgctaagaaagttttgtttaaagattctggcgcaatcatttcttggtcggcggtagagattcagttccatgagaacgcgggatgacttggtattcaaatcggtagacgtgagaccccagccagtggccttgaaccaggtgatctgatccaccaccaactgcatacgtctatggtggaaaatgcagatgggttggatatgatctgcaatcgaaagatacattataaatggaaaatctttctatatcaacgtccactcaacccacatgtgtactcaaccctcctctccagccttagcattccgatgtcattggagaagtccttgggatcgtataacctatgcttgaagagcatatccacattgtactcctgggtggcttccaagcacctgttgttctcacagtctatatcgttgtctctgttgttttcgcccaagcgagcaattcttaaataaacaagtaaagaatttaaaatcatttttgattaccatcatcacacttacaattccacatcgtcttcaatgcaatgagccgacgtcaatacaaaccctgaaagtggtatatattttaatcaaagaaaaagaaaattgaatcatgaaattattcgtaaattatgaaatttttctaattaaaaacaaaattaaaaaaaaaaaacgaacattgattaataagcgatccggcgcataaaaaataggtgggcgtgtgcagaaaggccatccacggatatcttcccaatcgcgcgggagtgccatttatgattttgtaggataaccgaggcactacaccgcaattctcctccaaaaagactgacgaagacccatgaactccaaggacgaatagagccaaataagcgataatagtcttcatttccagacaaggcatgcttaccaactgaaataactaaaaccggtccgcatttttaagaacactcaatcttatcgctgactttattccgaaaaatgtttttattgtttattaataagcgggaattgtatttcgccagcagcagtataagtcattatgtacacattttttagaattcaatttagtatagttttagtatacattttattgtagcatgaaaaaatcataggaagtttctgttccgtaaatacgctttcccgaactcagaagtttttcttaatataatcatttacaatatagctctcatttgttgaataatgattgaacagtgacaccacatcctggatccaccagtagaatttcaacacatcggtataaccctgtgactcctcgcaatccatatcgttcacagtcgcgatgccgaactgaatatgccgatatttgttcatatatctagaattctggatcagtgccgagccggtgaggccgtcgcatgacctcaaattgccctggtggccagcacaaaactgggtgtacaagtcaaggttagtgcacatcttcggcttactctggatgacaatgggtcgtaactccttggttaaggacacattgctgtcttccatccaggcatttccgatgaatcgcatagtcgatagctgctgattctgcgggttgaggacaatgcaaaccggcataatgtagtctgggaaaacaaaaaaattcggttaggaaatatttgtatattgtatacagccttaaataagcaaatacacacctgtaatttgcactcttttggttaatttcagtagaccgatgttattggctagcgattcattgttgaaaagccgatacatcagaaaatagtgcaccaaatgatcttctggcaattcattgggatatctgccaaactctcccaaacgaactttactgcgagcacaagaataagttgactttagcgaaatataaaattatattaaataacttacacggcgtttggtcgaatacagctcgctgcagtcagtatgaaaactgaaaacaaatgcattgttatttacataaatattaaatatggtatgttccatgtagtgaataccatcagttatcagcgttccggcacaaaagatactaccatccgtgtgcagtagagctgtccagggacccaaagatgttgaaaactcttctcgcataagaccgcattgctcgtaaagataatttgccgatacagaatcggaatatataacaagcatataactggcgagcaacgatatagttaatgtggcgttcattccgatcgaatcagcgcattcatactgaaatttaatgaaatcttttcgtattgagcgcatttttagtttctcttcaggccttatcagcgatttgaaacgacggcttatgaggtgattcactggaaggcacaacaacattttactgcgaatgatggcaatcgcatggtagaactttgcgaggctttgtgagcttaccgaatttatacaattaaattgtagtatacaacatatttattttcaaaaatcatgtttgctgaataaattccaaacaagtaaacattaaatcaccgataaggagtttgtcgaataaatgcgttctttattcattagatctgtagtatatataactatgcacagcatttaatttcaattaattagcattgcccttctaatccaattaatgtaatttggcacatatgtataaactccggggctttgacaatccgttggaccatagctcacgatgcccagctgcaggtagcgtttaactccatcgaaatcgaccctggtcaccagaggtccgccggagtcgccggcacaggtatcccgttcttcatggccggcgcaaatctggtttccgttcatatacgcatgaaaactccggctgcagtatgcggcgtcgtatgccctaagttccgcggtctgcagcaaatggggaaacccattttttttggtctctccccagccgaaggtctgatatgtagccacactgggcgcactagcgggatttaggagtatgcaaatgggctggatatgaactgggtaatggaatcatgttaagacaaaagaggtagctatagtcgagctacttgactatcgtatacccgttactcggagaaaactttaaaatcgttggcaaaaatgtcgatagaaattggcaaaaaaaaattgatgagtttcctgtggacgtggaaacgttctgctttctagcttttatagttcctgagatctcgacgtttatacggacggacaaacggatggccatgaaaagatcaccccgattagtgatcctttcttctcaacccttctaccatactttctacaaatgtggaatacttttttaccctacgagtaacgggtatctttattcaggaacaacttaccattgaaattaatactcctgttcaatttcagcagcgctatgtcgttgacgtggttggcagcgttataaaatcgatgggttattgccttcatgatgccatactcctcagaacggggagagcaattcgatccctggcagtcgggatccgttcttatattgtgttcgcccagtcgcaatcttctaaatcgcaaaatcaaaatcttgagtaaataatattgtgtaaaagacggaaacttacagattgggaaaaacacagtgggcggcagtaagtatgtatccttaaaaacgttaaattagccaatcagatatattatatgtacgttcatttataactaattaactaacttgagtttaggatcgatcctccacaatgcgttaatgaattgttggtcacatagaccatgaacggtgcagatctaatcacagcttcctttccgttcacgaccctcatggccgtttgggattcataggtaaccccgcacagcgggttcaggaactgtgcgtccacaatcctctgctggcggatcaggcagatggcgatgacaaaccaagctggagatgtcttcatttagtgtgactgttctatgcctactgaactgaatgcaactgacgttgatggttaagtaaactcaatgcagttcttatcagctcattaatgggaatcaatcatcatcattccaagaaatctacgtatgtacataagtatctcttaaagtctaatgccattatgagtaaacaaatgtcatgggataaaaaaaaggataccgcaaccaaagcaagaaaacttaaccaactttttactagatatcttttacttttaacagttttagaatagtttaattaatatccattcgactgcataacgtatcggatccatctaatgtaattcggaacatacgtatacactccgggactttggcacttgtcgtcgccaaagctcacgatccccaactgcaagtagcgccaaactccgtcgtagttcaccttggtgaccagaggtccacctgagtcaccggagcaggtgtccgatccctgaaatccgacgcaaagctgattaattgtgattggcatggacagcaccgagcggcagtggcggttgtcatagcgggtgagaaccgtcgtctgcaacacattggcggaatgattggtttcggtttggccccatccgaaagcctggaattcgtgcacattgggcgctgccgccggattgagaatcaggcaaatcggttgtatgtgcactgcgaatagagatggttctatttaaatatcattgagccatacgtgcatatccctacacaccattaaagcgaatgttcctgctgagcttgagcagagcaatatcattggccaggaagcgatcgaagcgcttgtacttcgtggccaaaacgatgtcaaattcttcggcagggggagaacaagatccaccctggcagtcgggatttctggtaatatcgtgttcccccagtcgcacctttctagatcggatgaaacaaaccttgtcaatttgatgtctcagtacaaatggggcatacttacagatacggcctcatacagtgagctgcagttagaatatatcctgcaattgaatgaatcttaacttaggtagtcattagatagctgcaagatacgaactactggagatgatcgttccgccgcagtggatctcggagctgtagtacaaataggccataaatggagccgatttcagcatagcttccttgccgcgaactattctcgtggccacattggactcataggatactccgcaggacggaatcaggaagttggcggccacttgctcctggagaaccaggcagacgcacatgcagatgtaaatggaagtcgatgcgagagaaatgctcattttgcgagacggtatcttggttactgaacccacaacaactggtgttaatcattaaattggaataaagctgaattaatcagttgcaattccgtgaaattaatcgcgttactcaatccacagcaaataattttttcaatcaatttttaaaattatatatttttcatttaaaaagacaacagcattgaaaatcaatcaactattgtctattttacaattaggtgtaattataaatttaagattaaatgtttggcattatgggtgcgggcacatgggtgttctgctgcaccacggttgcgatccaatcggcgtagctgtacacatccgtatagacaccgattccggagcactccctgctgccgtagctgacgactccgaattgcacgggacgcattttgtccatgtggcgcacagtctggaagagcggaccgccggagtctccgttgcacgtatcggatccaaggcgtccggcgcaaatttggttctgctgcactaacctgccaagagcttgcatgcactgggatgaattatagcgctggagctgggtgatctgcagaacacctcgtgtcctgtgtgttctagtctcgccccaaccggtggcaacaaaccattctatgctatcgactaattccctcttggaggtacccaaaatgatgcaaatgggcgagatgtgagctgcaaaacgatactgagtattttggtacgactccaatcaatcacacctttgaaagtcacaaatttggccaagcgaaggagcgcgatgtcgttcaggtttttgatctcagagaactttccatgccggaaggccatgtccacatcgtgctcctcagcccttgggatgcagatcttgctgttgcagtcctctgtcgcagtatcatcgtactcaccgagtcgcacctttctgctcaaacaaaatcaattggaaatagcttgtattgcattttatatgttaataattctaaattaaaatagagatgaccatacttacaccgcacttccttcgttaacacaatgcgctgctgttaggacaaaccctgttgaaggaatctatggtcatcgttccaatattcgactacccgcacatacttacgctgggtaatgagagttcctccgcagattaatttgacggaggaatggatgtaggccatccacggatttgagtttatgatcgcatctctgccaccaattattttaaaagcgatagtatttgcagttagcccgcacctcggttccaagtactctccattgcccagagaacagaggactccaattgccagagctgtgatcgctgcaatagcgccccacatctgtacgatctgtcagcaaactgcccgagctgacagtcgatcgtttttataagtacatttaattgttaagagccttatctctaaaattcaaaattatttgtagaggcaacacatagtcggtatacactgaaatcgtaataactttatgagtaaacccctttttctttttaaattcaaggtctagaacacatttagctatctctcagcgttttacaagaattagatttgatttaaatgtacatgtgcaattatttgaatataagtggttatacccgttacttggaaatttagagggtatggtagattcgatggaatttacattcgtaatgaatgaaacaggttgaaagaagcgtttctttattcttgttcactcaggatatgagagcgagaaactcaactatagcgttctcttttctcaaatatttaaaagtgaccaaatagaatcttgggaaaaaacacatgataagaaaaacacatgctatttttagtttctacacattaaaaattataaatcccgtgtccagtgactcgactatcagatacccgttaaaataaatattcactttttcaaaaatgattcacttctgcgttgattgattgtataacctggtttttttttatcacattaatgagtgagtggtgagtagtttctcaatagaagaggtcgcaatacaggtattttttgggggcgcgttaccctttgcggaagagggtggctgtcagttggccaaaaaacggggtcaaacacccgaccaggagccatggcaacgtggccaggacacgggcttcagtgcgggtgtggttttgactttgtttacaagcagcccaggtaaaaagtgtccggattcgtatagcaaagctgccacaatgagcacgcgaaatgtgatgataacggacctggatcagccagatccgaaccagcagcagcatcatcaaaatcccaaaaagaaccgaaaggttctccaaactctgtcgggcaattttaatcgtcggtcacgaagcgtg

SEQ ID NO: 14231 - DNA, 3578 bp, DROSOPHILA
tacagatgtggggcgctattgcagcgatcacagctctggcaattggagtcctctgttctctgggcaatggagagtacttggaaccgaggtgcgggctaactgcaaatactatcgcttttaaaataattggtggcagagatgcgatcataaactcaaatccgtggatggcctacatccattcctccgtcaaattaatctgcggaggaactctcattacccagcggtttgtcctaacagcagcgcattgtgttaacgaaggaagtgcggtaaaggtgcgactcggtgagtacgatgatactgcgacagaggactgcaacagcaagatctgcatcccaagggctgaggagcacgatgtggacatggccttccggcatggaaagttctctgagatcaaaaacctgaacgacatcgcgctccttcgcttggccaaatttgtgactttcaaagctcacatctcgcccatttgcatcattttgggtacctccaagagggaattagtcgatagcatagaatggtttgttgccaccggttggggcgagactagaacacacaggacacgaggtgttctgcagatcacccagctccagcgctataattcatcccagtgcatgcaagctcttggcaggttagtgcagcagaaccaaatttgcgccggacgccttggatccgatacgtgcaacggagactccggcggtccgctcttccagactgtgcgccacatggacaaaatgcgtcccgtgcaattcggagtcgtcagctacggcagcagggagtgctccggaatcggtgtctatacggatgtgtacagctacgccgattggatcgcaaccgtggagcaagtggccgccaacttcctgattccgtcctgcggagtatcctatgagtccaatgtggccacgagaatagttcgcggcaaggaagctatgctgaaatcggctccatttatggcctatttgtactacagctccgagatccactgcggcggaacgatcatctccagtagttcaaaggtgcgactgggggaacacgatattaccagaaatcccgactgccagggtggatcttgttctccccctgccgaagaatttgacatcgttttggccacgaagtacaagcgcttcgatcgcttcctggccaatgatattgctctgctcaagctcagcaggaacattcgctttaatgtgcacatacaaccgatttgcctgattctcaatccggcggcagcgcccaatgtgcacgaattccaggctttcggatggggccaaaccgaaaccaatcattccgccaatgtgttgcagacgacggttctcacccgctatgacaaccgccactgccgctcggtgctgtccatgccaatcacaattaatcagctttgcgtcggatttcagggatcggacacctgctccggtgactcaggtggacctctggtcaccaaggtgaactacgacggagtttggcgctacttgcagttggggatcgtgagctttggcgacgacaagtgccaaagtcccggagtgtatacaagattgcgactgggcgaacacaatataagaacggatcccgactgccagggatcgaattgctctccccgttctgaggagtatggcatcatgaaggcaataacccatcgattttataacgctgccaaccacgtcaacgacatagcgctgctgaaattgaacaggagtattaatttcaatgttcatatccagcccatttgcatactcctaaatcccgctagtgcgcccagtgtggctacatatcagaccttcggctggggagagaccaaaaaaaatgggtttccccatttgctgcagaccgcggaacttagggcatacgacgccgcatactgcagccggagttttcatgcgtatatgaacggaaaccagatttgcgccggccatgaagaacgggatacctgtgccggcgactccggcggacctctggtgaccagggtcgatttcgatggagttaaacgctacctgcagctgggcatcaatcagcagctatcgactatgcgattcatcggaaatgcctggatggaagacagcaatgtgtccttaaccaaggagttacgacccattgtcatccagagtaagccgaagatgtgcactaaccttgacttgtacacccagttttgtgctggccaccagggcaatttgaggtcatgcgacggcctcaccggctcggcactgatccagaattctagatatatgaacaaatatcggcatattcagttcggcatcgcgactgtgaacgatatggattgcgaggagtcacagggttataccgatgtgttgaaattctactggtggatccaggatgtggtgtcactaattgctcgcttgggcgaaaacaacagagacaacgatatagactgtgagaacaacaggtgcttggaagccacccaggagtacaatgtggatatgctcttcaagcataggttatacgatcccaaggacttctccaatgacatcggaatgctaaggctggagaggagggttgagtacacatatcatatccaacccatctgcattttccaccatagacgtatgcagttggtggtggatcagatcacctggttcaaggccactggctggggtctcacgtctaccgatttgaataccaagtcatcccgcgttctcatggaactgaatctctaccgccgaccaagaaatgattgcgccagaatctttaaacaaaactttcttagcggacagatctgtgccggaaatgatgatggtaacctttgtagaggtgattccggtggtccgcaaggtcgatacgtattgattttcggcatgaaacgcttcgtccagatgggcatcgccagcttcacgtatgaaaattgcagcaaagttagcattctcacggacgtggttcgatatggcagatggatcaaaaaggtagtggattggtatggacgaaccgttcgcctgggagagtacaacacgaagactaaggtggactgtgacaaccacctgtgccaggaacccttccaggagtacaatgtggatatgggcttcaggcataggtattataatgcgaatgaccaaaccaacgacatcggcatgctgcgactcggaaggagggtggagtacttaaatcacatacgtccgatttgcattttcgcaagcaaccgtttccaggagccgatagaccagctcacctggtttacgaccaccgtttggcgtgaaactgccgctaacgcaacgagcaaagttcttcggaccatgaacatcgaccgccaacccaaagagacgtgctccgaaatctatggctggaatatgacgttcgaacagatctgcgccggcaacaccttgagtcaactctgcagcaccgactccggggctccgcagatccgcaaaatgtggcacaatggctcagaccgctatgtgcaactgggcatcgccagcagggtgaagggccagtgccagaactctggcattctcatggatctattgagctacgctgactggataaaacgggtggtacggcaatacggaccctcgacggatatgaaccgttcattaaagaaatgggtcgataaaattccagtattttactacccgaaataa

SEQ ID NO: 14232 - protein, 1190 aa, DROSOPHILA
MWGAIAAITALAIGVLCSLGNGEYLEPRCGLTANTIAFKIIGGRDAIINSNPWMAYIHSSVKLICGGTLITQRFVLTAAHCVNEGSAVKVRLGEYDDTATEDCNSKICIPRAEEHDVDMAFRHGKFSEIKNLNDIALLRLAKFVTFKAHISPICIILGTSKRELVDSIEWFVATGWGETRTHRTRGVLQITQLQRYNSSQCMQALGRLVQQNQICAGRLGSDTCNGDSGGPLFQTVRHMDKMRPVQFGVVSYGSRECSGIGVYTDVYSYADWIATVEQVAANFLIPSCGVSYESNVATRIVRGKEAMLKSAPFMAYLYYSSEIHCGGTIISSSSKVRLGEHDITRNPDCQGGSCSPPAEEFDIVLATKYKRFDRFLANDIALLKLSRNIRFNVHIQPICLILNPAAAPNVHEFQAFGWGQTETNHSANVLQTTVLTRYDNRHCRSVLSMPITINQLCVGFQGSDTCSGDSGGPLVTKVNYDGVWRYLQLGIVSFGDDKCQSPGVYTRLRLGEHNIRTDPDCQGSNCSPRSEEYGIMKAITHRFYNAANHVNDIALLKLNRSINFNVHIQPICILLNPASAPSVATYQTFGWGETKKNGFPHLLQTAELRAYDAAYCSRSFHAYMNGNQICAGHEERDTCAGDSGGPLVTRVDFDGVKRYLQLGINQQLSTMRFIGNAWMEDSNVSLTKELRPIVIQSKPKMCTNLDLYTQFCAGHQGNLRSCDGLTGSALIQNSRYMNKYRHIQFGIATVNDMDCEESQGYTDVLKFYWWIQDVVSLIARLGENNRDNDIDCENNRCLEATQEYNVDMLFKHRLYDPKDFSNDIGMLRLERRVEYTYHIQPICIFHHRRMQLVVDQITWFKATGWGLTSTDLNTKSSRVLMELNLYRRPRNDCARIFKQNFLSGQICAGNDDGNLCRGDSGGPQGRYVLIFGMKRFVQMGIASFTYENCSKVSILTDVVRYGRWIKKVVDWYGRTVRLGEYNTKTKVDCDNHLCQEPFQEYNVDMGFRHRYYNANDQTNDIGMLRLGRRVEYLNHIRPICIFASNRFQEPIDQLTWFTTTVWRETAANATSKVLRTMNIDRQPKETCSEIYGWNMTFEQICAGNTLSQLCSTDSGAPQIRKMWHNGSDRYVQLGIASRVKGQCQNSGILMDLLSYADWIKRVVRQYGPSTDMNRSLKKWVDKIPVFYYPK

SEQ ID NO: 14233 - DNA, 3777 bp, DROSOPHILA
tcctgtcgataaagtcgtgtggaacaaccaggttgcccggcttgatttcctcgcgcaacgatccacatgccgtggagacaattaagtgggtgcagcccacatcgcgtagagcccagatgttggcccggtagttaacattggagggcatgatgtcgtgcttgcgtccatgacgcgccaggagtacgcactgtactccattgatctcgccttcaatcaatgcatcagacggttctccgtagggcgtctccaccacacgttcctgccgctgttccaggatatctgggtcgtcaagccccgaaccgccaataataccaatctgtgggttatttatagtttggcattgaacaaaatggggtgcttaatttttggacggactacgaactcaccttgaccggaagcgggtccagattggtgtctttacatttaatcgtaatcatggctagcggaggattgtgcttttacaagctgctgttgcggcagtctggagcagagtagaatgttcccgctgatagcgtactgataactgtgtgtctacacggtagggtgcataagccgcaaaagctcgggcatattgaaatgacactcagcacgtcgtcgtgggtgtgtaattatggtaattgaattatgtttgcaaaattttgattttaaatcttataataatagttatgacaaattaatatttataattattcattttagaacaaaactaatcatttgataaagaatcaaatcaatcaaaattaaactaacaaagcccttctaattatatttattacaacttatatccatatcagttccgaataaagaaaataggaaattggaacatggaataaattatttattgtatcatttatataacaaacttaatttgtatgcttattttgtagggtgtctaaatgtgacagccgaccctgttatcgagccgttagtcgggtaccctacccgtatgcacttcacaacactgcctgaagtgaagaagaagaaatctgaatgtaaacagctggaagtgcggcacatgtgttttggcatagaatctaaaacaaggagaaggaaaaacaatgtaccaccttggacaggatctgccaggcaacgatgtggatgatatagaggatctgatatccgccgatgatgtcaagccgcgtgagcgctacgaaaacaaaaaaaccgttacggttcgggccaagaaacgatcccaaattcgacttgaatctcaagaggaggaggaaaagccgaagcccacgatccacgagagtgtcatacccggcacccagaaagtttttgtgaaaacatggggctgcgcccacaacaattcggactcggagtacatggccgggcagttggctgcctacggatatagattgagtggaaaggaggaggcggatctgtggctgctcaatagctgcacggttaagaatccttcggaggacactttccgcaacgagattgagtcgggaatgcgaaatggcaagcacgtcgtggttgccggttgcgttccccagggagctcccaaatcggactatctgaacggtctttccgtaatcggtgtccagcaaatcgaccgagtggtggaggtcgttgaagagaccctcaagggtcacagtgtccagctgttgcaaaacaaaaagaaggtccatggtcggcgggtagctggagcaccactctcattacccaaagtccgcaaaaatccattaatagaaatcatatccatcaactctggatgcctaaatcaatgtacctactgcaagactaaacacgcccgcggtgacttggccagctatcccccggaggaggttgtagagcgcgcccgccaatcgtttgctgaaggctgctgcgagatctggcttacttccgaggatacaggagcttatggtcgagatattggaagctcattgccggaattgctctggcaactggtggaagtgatccccgagcactgcatgttgcgtgtaggcatgaccaatccaccgtatatactggagcatctcgaggaagtggccaacgtcttgcagcacccgagagtctactcctttttacatgttcctgtacaggtaaggatcgagtgtaatatatataaatatttttcgatagtcaattatttctttttatagagtggtagtgactctgtgctgggcgagatgaaacgagagtactgtcggcaggactttgagcacgttgtggatttcttaagggaacgagttcccggtgtcacgattgccacggatataatttgtggtttcccaacagagacagaagacgatttcgaggagacgatgaccctttgcgccaaatatcgctttcccagtctgttcatcaatcagttcttccctcgtccgggcacaccagctgctaagatggatcgcatccccgcaaacctggtgaagaaacgaactaaacgtctcacggatctcttctacagctatgaaccctatgcggacagagtgggtgaaatatacaccgtcttggtcacagaagtttcacacgacaagctccattacgtgggccacaacaagagctacgagcaagtactgctgcccatgcgggataaccttcttggtactcgtgtccatgtgcgaattaccagtgcgagcaagtttagcatggtgggagaaattttagacgacgaacgcgattggacgaggtgtgcaaaaaatcaggagttaccaaacgttcaagtgcaaaccaggagtcgggaaagactaatccaacgctattttggcatcgctttggtgttgggaagtcttgctttcctcatacagcttgtagttcgactcttatagccacatcaataaaacatctcgttccaaattcataatttaagtaacgttttgaacttaacctaagatacattagaaacttgatggttccatataggtatggattggcccagatctccttagtactcatcagagggttccgtgccaaagtagcgatcgccaaagttaccaatgccgggtataacataaaacttactattaatctccggatccagagcggaagtaacaattttcacctacataaagaagaacataaataaatgccggcttttggaatttagtgtcaatctcacctttgggaaggcataggcaatggagtgcacaccgatctcagccatcaaaagcgaggccaagataatgttgtcctcgggtacatcgtgatccagcagcacccgaatggccatcatggccgctgctcctgtggccacggtggcatccattagtatcaccttgtagtcttttatgtctttaggcagcctcaggtagtaaagctccggctcgccggtcttaagattggtctggatgaggatctttccgatgcgaatgtccttgcacacatcacaaacggcttgttccattgtttcaccagctcggagaattgagacgccgcatatttttcgcgattccatacgcttgccctcgtaaaggacaccttgtggagtctccactgttgttttcttaaagggaaataagcttagcgcatattcaatgactagccgtatcaggcgctttgagtaaaaaataaactcatcgcgggacgtatttcggcaacggatgaacgtgtgcaggccctttatttggggcgtgggatgcagcaagtgcagagaatgtggcattggctggtccttgtaggagttggccagagtttcgcgcagcttaaatccgcgctggaagacagacagacaaattaacaaggtgaacagcaccgcaagcaggcaattcataccagttgcagctgtgtgtgcacgtgctgaacaatgagatggatggccaccttgttgtc

SEQ ID NO: 14234 - DNA, 1717 bp, DROSOPHILA
ctggaagtgcggcacatgtgttttggcatagaatctaaaacaaggagaaggaaaaacaatgtaccaccttggacaggatctgccaggcaacgatgtggatgatatagaggatctgatatccgccgatgatgtcaagccgcgtgagcgctacgaaaacaaaaaaaccgttacggttcgggccaagaaacgatcccaaattcgacttgaatctcaagaggaggaggaaaagccgaagcccacgatccacgagagtgtcatacccggcacccagaaagtttttgtgaaaacatggggctgcgcccacaacaattcggactcggagtacatggccgggcagttggctgcctacggatatagattgagtggaaaggaggaggcggatctgtggctgctcaatagctgcacggttaagaatccttcggaggacactttccgcaacgagattgagtcgggaatgcgaaatggcaagcacgtcgtggttgccggttgcgttccccagggagctcccaaatcggactatctgaacggtctttccgtaatcggtgtccagcaaatcgaccgagtggtggaggtcgttgaagagaccctcaagggtcacagtgtccagctgttgcaaaacaaaaagaaggtccatggtcggcgggtagctggagcaccactctcattacccaaagtccgcaaaaatccattaatagaaatcatatccatcaactctggatgcctaaatcaatgtacctactgcaagactaaacacgcccgcggtgacttggccagctatcccccggaggaggttgtagagcgcgcccgccaatcgtttgctgaaggctgctgcgagatctggcttacttccgaggatacaggagcttatggtcgagatattggaagctcattgccggaattgctctggcaactggtggaagtgatccccgagcactgcatgttgcgtgtaggcatgaccaatccaccgtatatactggagcatctcgaggaagtggccaacgtcttgcagcacccgagagtctactcctttttacatgttcctgtacagagtggtagtgactctgtgctgggcgagatgaaacgagagtactgtcggcaggactttgagcacgttgtggatttcttaagggaacgagttcccggtgtcacgattgccacggatataatttgtggtttcccaacagagacagaagacgatttcgaggagacgatgaccctttgcgccaaatatcgctttcccagtctgttcatcaatcagttcttccctcgtccgggcacaccagctgctaagatggatcgcatccccgcaaacctggtgaagaaacgaactaaacgtctcacggatctcttctacagctatgaaccctatgcggacagagtgggtgaaatatacaccgtcttggtcacagaagtttcacacgacaagctccattacgtgggccacaacaagagctacgagcaagtactgctgcccatgcgggataaccttcttggtactcgtgtccatgtgcgaattaccagtgcgagcaagtttagcatggtgggagaaattttagacgacgaacgcgattggacgaggtgtgcaaaaaatcaggagttaccaaacgttcaagtgcaaaccaggagtcgggaaagactaatccaacgctattttggcatcgctttggtgttgggaagtcttgctttcctcatacagcttgtagttcgactcttatag

SEQ ID NO: 14235 - protein, 552 aa, DROSOPHILA
MYHLGQDLPGNDVDDIEDLISADDVKPRERYENKKTVTVRAKKRSQIRLESQEEEEKPKPTIHESVIPGTQKVFVKTWGCAHNNSDSEYMAGQLAAYGYRLSGKEEADLWLLNSCTVKNPSEDTFRNEIESGMRNGKHVVVAGCVPQGAPKSDYLNGLSVIGVQQIDRVVEVVEETLKGHSVQLLQNKKKVHGRRVAGAPLSLPKVRKNPLIEIISINSGCLNQCTYCKTKHARGDLASYPPEEVVERARQSFAEGCCEIWLTSEDTGAYGRDIGSSLPELLWQLVEVIPEHCMLRVGMTNPPYILEHLEEVANVLQHPRVYSFLHVPVQSGSDSVLGEMKREYCRQDFEHVVDFLRERVPGVTIATDIICGFPTETEDDFEETMTLCAKYRFPSLFINQFFPRPGTPAAKMDRIPANLVKKRTKRLTDLFYSYEPYADRVGEIYTVLVTEVSHDKLHYVGHNKSYEQVLLPMRDNLLGTRVHVRITSASKFSMVGEILDDERDWTRCAKNQELPNVQVQTRSRERLIQRYFGIALVLGSLAFLIQLVVRLL

SEQ ID NO: 14236 - DNA, 3443 bp, DROSOPHILA
atcacagctactatagatttgttcgaccattttcttattgcatatgtatccgacaaagtagaaagctttaaactctaattataggatatcagttggtaatagatagtaaatgtaattgcagcagctaaatgtaatagcagcattagcaataatactcttatcttaattggttcacagcttaattcatagaaacaaaacagtttgcacagctttcatttttgttccccctggtaattagtttaagtaactatttagcagtatttaacactcctattttgcagctctttgtaaggcgcgtatgtacatacacttcttaccattctaagctgatttaaataattttattaagcttttaagtaatcatttcttctttaccaatgcgtttatttcaggtcacgttcgccacgtcgctcccgatcgccccgcagccgcagcttctcgcgcgatcgtcgaagtcgctcggattctcgggatcgtcattaatgtttccaaaaggatatcgtttaagcagtgtcgcatcaaagaacaagccggccaaggccgtattttctgtaggaattcctatgtcgattgcgatccaagtaaatttacttcagatgacaatataaatctttcgatgcattcttgaaattccttttttttttttactaaaaaataaagacgcacaatcagcgagttttgattggtttcatatatcatcaaaaacagtttgtttccagcaaaaggggacgtgcttagtgcactgtttattatgtgagaattgacgtgctgctgtacaacttgcttagaagtatgttcgaataataatttaaacaggcgcacgagtgtaaaatattatgtatactaacaaaggtacactttaaacttaggagaagacgcaacacgaattcgttgcacatttcgcactggaataaaccttacgtctagtcattgtatgtatcctcgctgcagggctctgagccccatcccaaatggcagatcggattggttatggctgcccctagcgcatgcggtatgtgttcgactcctgaatttgagacaattcgcccttgaaattaatgtcgatgacgaagtccaggtcacggttgttccgctcgttgggcttcatctggaacgtgccagtgatctcctcgttcttctttgccgtcatgtggtcatcgaggtagaacacggtttgcttccaatgcgtgtatgtggagtctggtgacgtactgaacccaagacgcttgtggcacttggtgaactctatattaaagtaggtgactaatgcctgcacgaagtcgttgcgcttgatgcataggctgaacttggacgagaagttaagatcggccttttgcacggtatacagatccacctccttgaccatgcaagatgtggataccacttgcttgggatcgaccacgtcgaccagtggctcggtcacggccaccttacgaatgcagctcatgtcgaagccgtagacatcgtcccaccagttgatcttctcgtccttgtactgtctgtcctcgatggccgtgatatacagcgtgcccctatctgggaacatcatgccgtccttcttcagccacttgtcccgagcgtacaacactgtatccagcatggattcgtagaacaggcagtaactaaattaaggaaagaaattaaaatggttaatatgctaaatcaaatatgaccactttttaaaagcttaactacaaatgaaaacctaccccatccactcggaaataataatgtccactccctcaataccatttggaagctcaatctcctcaatcttgcccttgacaaccgtgattacatcctgcagattgttgtcaatgaccacttggcgggcaaactcaatgatgttggagcagtcgacggcaatcacctgagcagcaccggctttggcagcgaacatggagagaatgccggtaccgcaacccacgtccagtacggtctgcaaagaggagataccccggtgagaagggctacgaaaaatggggaaaccccggaagttaaccctaccttgccctgaaacagatgcttgttgtggtacatggcgttgcggtatgtgacggtgcgcacttcgtccttgagcatctcctcgtggatcccgaaatgggcataggagtcaaagtaatagtcgcgggacgtcatctcgtcggcgttggcattgggattatcaccggtggagccctccgcgggcagcttcttcgccacattgtttgagttcgcatttgaattgggcgtgatgccggtcgccgattccacagctgcctccatgggaatgtctgtgctggcctgcgaatcgggttcgtcagctactggcctgtcgattgccgtcacattttgaccaaaacttaccattttctaatttcttcggcgtctctttggtttttcacgtcgaaaaattggcgactaaatgatgggactgtttctacagcacgctagtttaaaaggtcgcttatcaacactgcccccgcacaaaagctggaaacaaatatcgccagctcgatattattggatttttctgaaattttagtatttttgagctgggaagaattggagtcagttgtctaaggcatgttccatataatcgagtaaaataatctttgtcataacatcaataagatataataaatacgttcatggtttattaactgctgcaatgcttgttgtattggtcctatttcactgctaacaaaaatacataaactgggaaacacgtttcatcgatagttgtaaataagatccgatagttttactggtaagtgctcatctctagctaccgcttgcccggtaattttggcggcaaaatattcgcacatcgcatttactaaaaaacgaaatataaagcgaagcagaagtagcgtctattacctcagttcttctttttaactttgtttaccctatcaaaatggaaggcttcgacgatgcgggtgtgttcttttcggacaatttcggcggagataaccagcaggatgcgcaaatcaacttgcaggcggtaaagaagaagtacaaggagttcatccggacatttaacgaggagaactttttctacaaataccggtaagtgaactgcatctcctcatctgaaccccatttaaggtaatccccctgcagtgacaccctgaagaggaactatcttaatggtcgctacttcttggagattgagatggaggatttggtgggcttcgatgagaccttggctgacaagctgaacaagcagccgacggagcatttggaaatcttcgaggaggctgcccgggaggtagccgacgagatcacagctccccggccggagcacgaggaacatatgcacgacatccagattcttctgagctccaatgcgaatcccaccaacatacgacagttgaagtcggactgcgtatccaagctggttaagatcgccggaatcattgtcgcagcctcaggaataagtgccaaggctacgcggatgt

SEQ ID NO: 14237 - DNA, 1225 bp, DROSOPHILA
accttttaaactagcgtgctgtagaaacagtcccatcatttagtcgccaatttttcgacgtgaaaaaccaaagagacgccgaagaaattagaaaatggccagcacagacattcccatggaggcagctgtggaatcggcgaccggcatcacgcccaattcaaatgcgaactcaaacaatgtggcgaagaagctgcccgcggagggctccaccggtgataatcccaatgccaacgccgacgagatgacgtcccgcgactattactttgactcctatgcccatttcgggatccacgaggagatgctcaaggacgaagtgcgcaccgtcacataccgcaacgccatgtaccacaacaagcatctgtttcagggcaagaccgtactggacgtgggttgcggtaccggcattctctccatgttcgctgccaaagccggtgctgctcaggtgattgccgtcgactgctccaacatcattgagtttgcccgccaagtggtcattgacaacaatctgcaggatgtaatcacggttgtcaagggcaagattgaggagattgagcttccaaatggtattgagggagtggacattattatttccgagtggatgggttactgcctgttctacgaatccatgctggatacagtgttgtacgctcgggacaagtggctgaagaaggacggcatgatgttcccagataggggcacgctgtatatcacggccatcgaggacagacagtacaaggacgagaagatcaactggtgggacgatgtctacggcttcgacatgagctgcattcgtaaggtggccgtgaccgagccactggtcgacgtggtcgatcccaagcaagtggtatccacatcttgcatggtcaaggaggtggatctgtataccgtgcaaaaggccgatcttaacttctcgtccaagttcagcctatgcatcaagcgcaacgacttcgtgcaggcattagtcacctactttaatatagagttcaccaagtgccacaagcgtcttgggttcagtacgtcaccagactccacatacacgcattggaagcaaaccgtgttctacctcgatgaccacatgacggcaaagaagaacgaggagatcactggcacgttccagatgaagcccaacgagcggaacaaccgtgacctggacttcgtcatcgacattaatttcaagggcgaattgtctcaaattcaggagtcgaacacataccgcatgcgctag

SEQ ID NO: 14238 - protein, 376 aa, DROSOPHILA
MASTDIPMEAAVESATGITPNSNANSNNVAKKLPAEGSTGDNPNANADEMTSRDYYFDSYAHFGIHEEMLKDEVRTVTYRNAMYHNKHLFQGKTVLDVGCGTGILSMFAAKAGAAQVIAVDCSNIIEFARQVVIDNNLQDVITVVKGKIEEIELPNGIEGVDIIISEWMGYCLFYESMLDTVLYARDKWLKKDGMMFPDRGTLYITAIEDRQYKDEKINWWDDVYGFDMSCIRKVAVTEPLVDVVDPKQVVSTSCMVKEVDLYTVQKADLNFSSKFSLCIKRNDFVQALVTYFNIEFTKCHKRLGFSTSPDSTYTHWKQTVFYLDDHMTAKKNEEITGTFQMKPNERNNRDLDFVIDINFKGELSQIQESNTYRMR

SEQ ID NO: 14239 - DNA, 18239 bp, DROSOPHILA
ttcccggctctcaattttgcctgccttcgttcatttccttttgcaatgaaattaaaaacagcaaggagtcgtccttgcacacacagatactcacccacacgcacacacacacacacatacatacagtggcatgctgggaacgagaaaagtttgtgctcctcgggaacctaaatgaaaatgagtaaagttcgcacccacaattttgctctcttgttgattatgcacttcgttgccatgctcatcatcatcgtttttcatcatcatcgctgtctgcgttttgcttattaacccagttctgcctgcttttcccgcttttctttttggcctggcccacagctgccggctgttgctattgccctctctctcacactctccgttagccaaggacgatgacgcttttttttcgtgtccttgttttaattttaatttttgtttggttcgctttcctttgctcgtgtcttggcctttttggtgacgtcgtcttgggttttcctcctcattttctccggcctgatgtcgtcatcgttctgtgcctgcctttgtttctaggtcaagaacaaatttttcttttccgccaacgccttgaggtttttttttttctgaagtcggaataaaagatggcattgaaattttaattggattgggaatgaaaatgagagggcaagatgctttgcaataaatatataaaacgggcaacaagggaaaatattttgagcaattgttgttgtaatattttgaatgatttaaaaatcttgtggaatatattttaaattcacatttatcaataatttttttgttagcttaagtgttgaagttaaaccaagttgccgagatgaactaaaggcattcaccacctaagatgcagatacataagacttctaagacagcagctacacatatattggagtatatagtgttagagccagcataaccacctcgaatcgcttagagatgtagatacttttcgcttagcttcttgtgccgtggatgcgcaactgtcatgcaaatgacatcacgcactatagtcatcaattttgcggagcatcagctacgctggcacaaagctgaaagcaaatcccccaagccgaaaaaagccaaagtcggggaacgggaatgtcgtgtgtttgagtttgaaatatttgcaattgcgaatcctgtcgtatttgtcacaggatgtacatatatatacactcaaatattcccatccatatacaaatatatatgtgtatattgagccaagggtatattattatgatggaatcctatttgttacaagccatgtggctgctgctacagtgccaatggcagaacgtcaggatgacaggatctaaggatgagtgccaggatacacctactcatcctgctttttcctgtgccgcagagtaaattatgctaatgtcaaaataatgcatattcgatgatgtgggtgtgtctcgaacacagagaaaactttgtcgccttcgtatcgacgatctttgtactaatacacatttaggattgatttttcgcggcgcttctgtgtggtatgtgtgtgtggtgcgtgtgtatgggtgttggaaaatctttataaatcacatttatgttcagcttcaagtgccaaaactaatgatggaaataaattcacgagagcgcaggaccagaacaaggacaatgctgactgccagaaccagtcgcagccagaaattcagtttctgtacacaggagaaaaagccagggaaaaactgggtggaaaatccaaaagggggcggccccagcacttttggggatagcaacgcactcaactgtgtgcccgtcgcctcgcgcaatttttggctgcttttgacgccgggccaatatgcagtaaatctgccagaatgtgcctctagatttggcatcgccaaccagccatcagtcgcaagtaccgttccagtttccttttttccccttcgctcttctccacccactggttttgcctggcttttcctacccattttccctttgaaatgggttacatattttatgcttaatattttgcattttattcaggaagagcggaatgggcaaaactgttaactgtacttgagcttgacttggctcggggatcgtaacgtttgctttgtgcagaaattgaaaatgtttttcctcaacagcacaattgtttgttatagttactttctttcgtttactccaagaatgcggcaaattgtttgtgctaagctttttggctagcaaatgagaatgagttgagatgtctgcactagaagttcaaacaggagttaaacaggattgtatacaaatgaaaatatttctgcttgcttgacatagttttgaattatattttcgagcttaaataagaagtaaattgctttcactttcaatacaatcacaagttatctaccaaattataattaatctcaccagatctgcttgcaaattgctagcttttggaaactatgaaaatcgataaccagatttctctctatattcgcatccgatcatccctcgaacccctcaggtcatgtgcaaccctaacaacttaagcttcatttgcatattttgccaactcgaatcgcctcgaatcctccctcttttcaaacgaaatgcaaacgtataaaaattgcaaaattgcagaatgtaaaaattgcaaaatgtcgaatgcgtacgcttgcaaatctaataaaacccaaaaaggagtttcacccgtaggtgaaagccgagtggggagtgtggaaatttatgcaaatttacttttcgcctaacacgatgcttgttattgatttgcgaaaaataaaaacttgttcgccgttaatttgcataatctgtcccgtctgccttgttaaaggattttctcggcgcgaaacctttcactctcgctctgccaaaaaaaattgatttgccatcactgcattgttgactttgacagacgcatttggttgtctgtctctctgtctgtctgtttgctcctctggttgtgtgttttatgtatatatctctgtttagtcaagcaaatattttgccaatgagtggcccgacagccaagaaaaaaccaagtgaaaatatttgaaaattggttttgtcggcccacctgacaaaggcaaacattcaacgaactgcgaggctgggaaaaatgcaaattcgaattgaaagtactcttcaaaatttgtgaaaaagtatttggatagttgtcacttagattatcgaatgtctggttaggatgatatgatttccatatgagcctaatgtattagaaattggttttagaggataagttttggaggtggatagttgaaatagaaataattgcttaaatatgataaataaaatattgccttatacaattgtatttgcgtgcctttatgatccattttatttgattttccatttttcaagtgtatactttttgcacttcagctgaaggaaacttcatgtatgtacgtctggctataattcaattcccttcaaaacccgcgacagttggacagagaaatggatggcaacggagtaacagagaaaggatagagacatccagtggtgcgttggaggggggaggggggcgtcagcgaggagtgcttgtcgtcctgtcagttattttcaacattttgatatgtattttcctctcgtagtttattttttcacgcagcgttcgcttttcgctaaaaaggattactctaacacaaagcagagagcagggcaaggagccacaaaggaaaaaagcagaggcggtgtaaaagggggcgggagagggcctggggttttccaggagccaaagagactcgacggccgcagatacaatatttggtttatttcgctggcgctgtctctcattttttttttttgtaccgattttatactttttgcacatgccaatatggaaacacggagcactcaaccatccccttttggaaaagcagccaccccccgaaacttcatgtgtgtgtcccacgcttttctatttaggttttttttttcgtttttggtttttgcgttattcaccctcacaattttcatgtgtctgtggttgttgtttgtatttgtattggtacagcaaccatcaacatttactcatgtgtcgcgttgaagaaaacgctccaaattcgaacatgtgtgcgtgcgtgtgtgctttgccaaagccaaaagaaaatggcagttttccgtctgacatgtgcggagtatgcgtgtgtgtgtgtatttggtgggtggcaatttcccatttagtttcagcgggtggaaagcgttttagatttgaactatgggtgcgttgtcataaatagccattccagtcttatctaaaacgatttggcatctcgattgatggcgaaacgaaatcgcaaaacgcgctagataaagccgagcaaaaaggaaatcgatttgtggggtggagttgattttccatgggggggcttaaggtctttttgacagccctcagatatgtgatttttgaaaatggtgtgtgggtgttaaaaaaggtggaggtatatgcaaatacattctttttgatttattagaagaattaaatataaatattaaatattgataaaaatagggaaatgcatttaagttagatttttaatttaaaagtaaactagttgcttaaatgcacgtttttcctcacttgaaatagcatttgcagatctaaatcacttgctgattgacaccaaacaatccctcctttatcccctttatagatactgattccgtttacccccaaagcatttcttgttagtaattcagttctaagctcataattggcaaagtagacaacccctaccagccagaaatccgaattcaatccgaacaactaacgacaagcactcaagcaattcgcatccgtcgaaatcaattcggtaattgacagcggagttgcccgcggaacatgatttgcaaataatgcacttgaatttgcataaagaatttgcgagtgcaaaaaaaaaacaaaatgcgagtaaattcgcaaaaatttatgcaaattagccggcgtgtgttgtgatcgatgtattgcaattaaatcccggctgcagctgcagcagcccctaaaaacgaaaaaaaaccaggccctcaggtatgagctcgaaaaaagctcatttgcatataaaaaaaaaagaggtacgcatggggttgtatccttcagctcattaacataacccgaaaaaagtacaaaattctgatgctgtctaacagctgcgctcgtcctgatttcctgattttccagccagccaggttcaacggccgtttgtctcactaacccaaattaaaattatgttaatgaacggtggctgcgacggggagaggaaaaaggcggcggcacgaacaggaccaaaatcacggccaaggacaacgagtcctgcgcttctcatttgagtaatgagcagagtctgggcggagcagcgacgtcgacgccgcctgcggcagagaggtcctggcaaagtcctggctgcctttgctcctgttactcattaatttcgcccatcgcatttttgcatatttttccgcctgcaaattttctcctcttgtttaattctctcgctctctctctctgtctctctcttttaatttcgtcctgtttcatttttcattttgtccctcgctcatttaatgacgtcacaatcggcgagtgaggtgagagagccaaaagagcgggccggagtagcgctctctgttttgtgtgtcctggcataattaagattttaatttatgcaattatttcgccggctgcccttgttttcgttttcgtttgcattttctggctctgattttgatttcgcaggatgtgaagttattttggcgcgttggctcgttgagtgcggttgtgtttttttggccgcgttgcgatcgagaaaagtgatcttaacttattctatatggtgatgataatcactcgatatatgaaaggaatttatctttaattatacaagttatccaaaatgtgttgtgacttttgtgatttgtgatttttataaactgtttcaaaatacaattttgaaccaataaaattaaaaaaaagaacattattagcattgaaagatgcatcagtgatcaagaattattttaaacattttacttttctttttaacactcgtgatcatacaaacactaaaactgaaataatgattttatttcaaaattttccctaatgacatcaaattatgtttcgtctaactcttattaaaattcgaactttacaaaattgccttcgtgttaacttgcagttattttcttaatgtcagattagagtgtgcttttgaaaatacaatgtaaacttttcttaacagagggattctgtttttgaaaatgtataaaaaattaaaacagattattacgctcaaaaactctcttaaaatggacttcttttcgattacatttttttaaaatgttagtgacttcggtaattcacaaattgaacgaagttaacatttaaaaaaaaaatactcataaagaacaacttcaaagtggtcatatttcttgaagtatctgatatactgctttcataaaatattaaaaattgatatcttcaaagttaccaagaatttcaatgtaattattttgccaaactttacatgaacactttagaacagtttccattattttttgggtcactctcttaccttaatagtgatattttatgaattcgaaaatgctctgcttcttgagtttcctaagcctcacaatccatcagaaaaatatttctcaattcgagtgtcattttctgtaataaatcatcgtaggttgttcaagttcaccgcgatgtcacaatgttaatccacggatatgcccagcgaatctaagtattttttgtatttttgaaatggggatctatgaacacaaccgcaccgacacgcgtcgcgttaaggaatgatttcgcctgcgactccaataagatactttggctgtggtcctcgagtttcgagacttcgactttcttatcgcacgcacacgaattggagtaatcgcgaggcgtcggcgtcaggaattcaagggggattcaccgggggtgttccaaggaccgaagaccgatgaccgaagaacgaagacttgccgggcgtaaggcccgccagctactgcccacagaacttctggctggcatttgtttttgtggtccgctcacacacacacacacaagcatggcgaaacgcaactcacatacaccctcataggcgttacccatacagtcgcacaactggaagtccatattgccacccccaaaaatactatggtattgagggagaaacgtcaagtgtgtgacgctggcagcgctgctttttttgcccaatttacagcgcagtcgcacttgcaatcatttctctctccgcagagaccccttatagccctctctttttgcccgaacaacccctctctttctaccctcaggtgttgggcctttctccttcacaaaaaatgcaaagaaaaaaaaagaagtgaaaaaacagtctagtaaaactggagaaaagagaaaacttccaggcagcacacgtaccccttagacgaagtactcaccacgctttcgaaaccttttctggccatttgttgagcgggctttaagggcagtactagccacgttatcagccaaatgccagccacgcattttgtcaaattcaaaggcaaacaaggcgaaggcagccgggtatgaggagcaaaataacaaaaaaaaaaaaagaaaatatatctaaaatgggaactgggggcctgctaaactgagcagcgactgaagtagaaatgcttatacgctggggatttgagctttacaagcgtaacaaaatatgtaaaaagaaataaagaaaagccgcggcatgagaggttctcaacccccaggataagaaaggaattcctcctcccaccgccagaaaccctcagatatagatgcgttgtatctgtatctgagcgtgcaggttggcgtgtatctatgaagttccttccgttcgccgcccgatgaatgatagatggattatgattttgtttggcgtaaattgaattttaccgcctcgcacagccctcgacccccacgccctttgttgccaaatatttaaactttaaacacgctccgatcgcttgaagctgtcaacttttttttgcgactgcattcatttggcggcggaaatcaagttaacgaagtaaaaatacaaaatgcagcagcaacatgccaacaacaatcgccaacaaggaaatgtcctcgggtaaatggcagtggcttgatgatggggttacccttttcactattttatagataaggggagacacacggattcgtggcgctgaatcgataatggagcttctgcacaaccaataaataaacaaaccaatcgaatcgggttgccaaagagttggagaagtttaaagaagtgcttgatatgtaagagctgtaaatcacacgaaggataaatccaaatgaagaatcataaagcgagatttgaagatgaactgacctctatttcaatttaagacggttgcctatgtaaattaataaaaaatctatttaaagagctgtaaattctcgttaaaaattctcagttctttccgttttattgacaatttagaaactaacagaaatgcaataaattaaattccacaaattttgaatgttattctgcagtgttactcgaattaagccaatttccataaataacaaatttattttatatactttttggagcttggcttaaagtttaatatgtagcactttggattttaacattacattttcagctatatctatttatgcagaatattaaaattcatcggagtatttatgaagttatttaaaattttttcaatttcctattggtaaaaacataaagttttaatactatttattggcattccagtttgaaattccttctcgattgcaacttatctcccgaatgcatttgtttgttttatttacagaaattttcactttaagctaatccaaattgcattccggggcaaatatttccccatctccactggctgctcctcaattctgtgcacatttttatagattttatgttagttggatttttacttcgctttttttatgagccacaagctgtaagtagtagtactcgagatattgttgttgttgctgctgctgctgctgctgcttctgctgtcgggctgtatgcaacatattttcatggatcagctgcaacttcaattcaaagggatgccagaggcggtggcaaaggggggcttgaaaattctgcgggaacgtagagagctgggcttttggatggctgtgattttctcgagccatgtctgtcagcctcggctgccatgccatgcttattgccaaagcttttgttatgccgtctcacacaaactcgcatccaactatggtactatgttatataaaagttgaaatccgctcggatgtgtttttttaccaactgtttgtgtgtgtatgtgtgtgtgtgtgggtatagttaccgacttttataagcagcaaatttttatttcccccatacttttgcttaccactcgcatgcgtcataactcaataaccagcttaaaaagggggttgaggcttctcaggggggttggcaaaactgtaagctaactgtaatcctaatgaaactacaacacacacacactcgcaagttctctgcatttacatgcaacaatttggcaaaaaaaaaaaggaaagagaaaaaataggatggcaaaagtttccttcttcccattgaatccctttcgcttctcgtcatccacaactcgcctgcccgtactggaatttattataagatccctttcttcatatatgaatgcgagaaacttgtagttgccgcccatgttgttgttgttggttgttgctgttgcatgttgctgctgttgtgatggcagcaacatgaatatttcgacaacatcaaaaaggcatttcgagctatttggctttcgcaaaatattttttattataatttccctagttaactggtgcatgtgtgggtttcaacagcaggggataacaatgaaattacctacattttattcagttatgtgccttatttcaatttggtttctacacgtttgccataacaatgcgatatttctaaattacaataatttttttaatttacgatttttcttgattatttcctaaaatcgccttcttttaatttgttcttaaaaataagtgattgtaagtgatatgtaacttctactattttgaagcgaattgtagcaaacccatatgcttgcatacatttgcaactcttggaatttaataaaggcaaattcctcctgagcagcgactaatgaccatcgcttgaagctaatcaggctggcatgaggtcggtttcgttttgattttggggatggggtttccttggcccctctctgtacttttccctgcgaaatcattaatctgccacactcgctcagacatcagacgtcagtggcaggcatccaccagaggtttcccacatcttccccctcatctagccccaaaaaggaacattaatttcctctggtgcgctgcttaggagacattatatagagtacctggtcgatcgaattctgtgatagctttagctgattgcacacaaaacggatttgcctagctgcacatcgcaaaaaccgcgccccgaaaatcgtaccaagaataacacaaacgagacgaatctttcgattcctttgtggcaatgtctgcaattcgcattacgcatacgccgcgtgagcctgcgaatgcttgtttgatgtttccaactctgctatcagtgtacaagtgtttatgcttgtgtgggtgtgcggtttaatgtgtgtgtgctaagtgtgtgtgtgcgtgcttgtgttgctttatgatgacatgccaaacatttatgcaaaatgctaatttaaatccaagtcgtgagctaaggaagttgttcaacttgctggtacagtggtagtaggtataaaatagagagatacatttataaattagagagatactttttaactatacaaaaaaaaaatgtattgaatgtattatcccataatctgttaagcttatgaattattgaatactttttatattccggtacatgtataaatgcgattctgggttattaaattgtatttatttaattaattatacatctgaataagattttaaacccaatatttaagactcttaatgatatttatccactgtactggtgtcttaggcgtaaacgcctcttcatcagcataactcgtcaggcatgacattccagcccctgtacttggcatcgagttctggttgtgctaatgcctgaatgtccgacttaccgaatgaatatgaatagttaaatagccggggaatgatggactatcttggccacacctttcgctgcattttggccatcttcgttccacttcgccccattggcgtggaaatacgaaaatggctgcgacaggaaattacggcagatctaaagccgatatctcgcatggatatctaactggtgcaaatcttgaggggaaattagctgcgaaaatgcttaaaattggaaatttaaatgtgagcagagcgattgtagttgttgttgctcattgtaatttgctaaagtatttgtggaatatgaattgcgagcatttgcataaatgaaatgtgtatgtaaatgtcgagctcgtaatgccaatcaatcaccccaaaaaagggaactcacgcacacacatgcggagcagctcctcccacacgcatacaggcacacaaaaccaataaactaaattcgcaaggagcgaaaaaaaaaacggaagaaggatgagaaactcgagcagaaatcgtcaacaacatacatgatgcagtggggagggtcctttgtacgtacatatgtgtgtgcgtgtttgtgtgagtgtgccaacccttatccttggcaggatattacatgcttcaacaatgttgtagcattcccaataacaacaactccgctcagagcattcctgccgaaaatgaaattctgttttgcattttatgtcgacatctcctgaacccaaaatgtataaaaaaaaaagaaaataatacatatagaaagacgaacccgccaaagaataaagcagaaggagctaaaaggagcaggagcaacaaggacatacagcagaaaaaaatgaaatctaaacaaaatgcgttcgagcgtgtgtgttcaattacaatgtgtgtgattgcttggctcgctaggcagccgaaaagggggcgcagggggtgtggcaggaccccggacacacacacacacccacacacccgctttagcataaaaatttacaatgcgaaataagcaagcgaaacgaacgaacacaaaacgctttttatttcaatgttcttattttttttctggctgctggttttcaggacctccgcaggacctttaggaccacgagcacggcatccttatgcaaataacatccacactggcacataaaaataaaataataacaatacaatatttttttgatgacagccgccgccccagaagagcgttggcacaacaatgcaaataccccacgcatcccatctatatatatcttcgaattgcgatttgggttcaaggtctgcccatcaaagaaaggtttaatcgatagcgaaattcttggtctgggttctctcttagtgtaaatttcgaagatattccttcgacatcatgaatcatgatgtggtgccatcaaattttgtttcatttttaatgctgcctggagttatgaactgagatgatgcggcggttaatgggatcagtaggatgggaaaagaatccaatttttgagtttattagtatttcatttgctaatattttttagataaaatttcttcaggatttcagcaattgaagatctgatgaaaatacttgaatatataacgaatacatctaccatttaacattatctttaacaatatacaaaataatataccaggtgaaatcagatatatgaatgctcatcgggaaataaatttcaagagataaataaaattcaagagataaataaatatcaagaattaagtctgagcaaaatattatgtccagatttgatgtcgttttcaatttgtatcaatcatcgttccgggaacaattaaaaattctaaaatttccatcagcataactcggctaactctctcctgcccttcgaatgcaacaatataaataattatttttgcatacacaatgtaaggcaaacaacacgataaacacaggctggcgcaaaggatgcatgggaatgcgagtgcgaggagaataaggagcgaaatcacatttgaataacaatcatcatgcgagttatttcaattgacaaggggggcggggccgatcgggggggcgctgaagatattgaaaatatgaaaagacacgagagttggaaagaaaaaacacacgcgaaatcacaaagaattcataataagcgtcattgtcgatggcagcgagcgggaaatgaataaaaatcaaagtacattgaggagtcctgtgtgttgacaaaggtgaaaaagggtatgagtggggggcggggagatcgaaggacgaatggagagggagtattactgaagggcacgtataggaatgtggaattgaatgtgtcgcacaggatgtgtgcttttttattgttgtatgtgcactacacgggtagaaataatttaaaaatttaatttttaacaataaaatgttgtcataagtgaggggtggtcctgttggaaatgattatcactcgtcactcaggcaattcaatattctaactaccgactttccattttaaattccacccactttaatttttgctgacctttaaaatggccggccgtaaatatgaatcacccaatttttttttttcgacgtgttgaagacattcccgaagcctgccaccatctgcatgtgtgagtcgagtcgagagccagccaaaggatgtcgtagcctggcaggatcctccgcctgcgtggcctgcatgaattttgaatgacaatttgcaggcggcaggagcagcagcaaccaatccccagaattcaggccattgttcgcttattgaaatttcagccaaaggaaaacggaacgagccacttgaattcgcaggatgtgagtgagaaaataaggacatagtgccgttgctgttccgctatgatgtgatgatgccagttgacaaattgtggcagccagcaagtggcatttcattttcatagccaccagttgcgctgccatttgctcatcctcaacataattgatttcattaaatgcgagggcaaacaagccgagcaacaagttgccacaggaaaatgagtgaagtacggaaaaaccacccactctgccaatgcccgactgaaagtaaaaacaaattaagctctcacgacggcgacggcgaaataattgggggaatttccgcaaaacgccccagacaagcgcagcaagatgaagaagaggaggactgagaaaaactgagccagacactttgacataatttccccgccagcagactctgccacccaccaccccctcaaggacacgaccataaccaaccccaacaaagttttaattaattgcgcccgaaccacacacacacacacaaatgcctgctgctaaaagcggggggaaaatgaaaatgagtcaagctgcgaaaagttgggcgttcattttcacgtacacgagcttctcttgggtttcctgaattttccaaagacacagcagcagttaaatggcaaagaaaagtaagtgtgtgtgtgtgtgtgtttgtgtgtgtgtgtggggtgtgggccaacgaggtcgaaggagcagcacaatgtggcttaatttcattatgtcgcttaagatgttgttgctgctgctcctgtggatgttgtccttgcttgtttgctggatgctgctcctgcaactgaaagttctcttcgtctgttgctcctgggattccaaatgttgctgctgtaactgcagttgcaatttttatggttcctttttttttgtggctaaagtttcttttgcacgaagtgctgtcaaaatttgtgcaacaaagttaagttttactttacattacttttgcgtcctagctagtttgtgtaaacgctaattaatataaccaattttatatgaatatgtatcgaattgcctttatgtgttttaaggatatgcttctaaaaaccaatgttcaaaaaccaatttaatatcaatagctcctctctcattaaccaatccaaggggactgtcaagtgcgttacttgcaaaacctgtaacaagtaaaaagtttccagagcgcagtaaattacaagggaagagaaaatctctcgagatataaatacattatatttccggcgggcaacttccggttccgcgctgaatgcggagaagctgcgtaaaattattgaatgcaaagcataaaatcctcaatcaaattcatgatgcgtgaagacgaaagacaaaagcgtttcgaattcgcttcaggtagccaaggaaacgatgccctacatgcgggcctagattttggattttatatgcagatgagagattcgtcgggatgtgaaaacccatcccacatcagccatctgagcatgaaatgtgtattgaaagtttggcataaaagtctaattaagtgcggaccagatatctaaaaaaaaaaatcgcagtaaccgataccaaccgcaaacactcgaaacgtatagagttcaatgtttttgcgtggcgagcgatggaaagtcaggtattgcggtgtttatatttttactacccctattgtcaataaaatcgggagtaggcaaacaggagataggatgctctcgaaacccttttttttattattcgcccttcgggccgcacccattgtctgaaggcgatttattgccgatttgcccctttggatcgcagaaagtgcttttttttttggccagagagatagagcatttatctgatctaacccctttgtgatctgccattgtccccctggctttcgggcattattataaatttgccttttaatttacgttacgccgatttcagacaatgcccggctatgaatattcataatgccgaatcacaaccgaactgacaatcgcatgttaatgggctggcatatgttgaggattcccctttcccatttggcgagtgaatggggttagtgctctgatatctctggcaattgcataaaaattgttgatttatgcccgccgatttcgatttttcgcaatgccaatatttctttatgtcgccgtcgcatttaacaacacatttacatgctgttttgcgtgtcctctattttattatttttagattttcaattttacgggtagaaatgatgggtgaaagggtttcgtcattgaattgcccatgaaatttcaagtgtttttctcgatgtcaccgagaattgggtgactctttggtatgttcatcgaatggttaaagtggtttgctaacaaaaaaccggaagacttgtgatattttgagtaaacaaaataataggtaataggcaattgaggattaacaaaagactatttatccatggcacaatttatttaatagacataagaaggagtaaatggaatatccctttatgatatattactaaaattatgatttggcaaataggttatctgctttatgactaacggaaactagatgaatgttgtacattttatatagactggttttcatttttttttaaactcaaaattatggcctgcaaaactcagatttgcctcatttgactaccccatggagcttgagcaatgtgcatgttctaacccatcatcaatacaaaagattcagcgaaagcaaaaagcagcgaaccttaagccgccacaaaattcagacgccagctcatcaatcaaatgacaggcagcatttaccaaatttgtcagtttataagccgaataaaataaccaaatgccacggcgaaaatccccagcagaacgccttctagaaaaggagagacgaaggacagattgatgtgggcattacgtgaccagttctccagttcccgaaaaggggtttgatctgctgattttgaaggcctctcgctgggtaatttatgcgccggcgtaaacgcctcagcgaaaaagtaaaaagtgaaaaagaactgagggcccaggaggctgttctacctggtcggaggatatgcgcatatagctatggctatggatatgggcataggacaaccctctccatagcgattgcccttcgctgatccgcgctgaataaattagaatttatgcgcgatttgcatgactgaggcagcgaacccttcacagctgttctgcgattccgaagatcctcagtttgtgcgtgaagctcgggcgtgttggttgccacatcgaaatggtgatggttcagatggacagagatatacgaaagccggttttggcactgcgaaaaattcctgagactttgagtagcagatcaaagtattcatatggtgaaaaaaacacaggatgctgcttatacaaatgtgtgcacatttcattgactttaaaacattttcataataaatataatactaaagtatcgaaagatattcaaagcagtgaattttctcccagtgattaatcccctatggaaatagcattggactgcacgcatgcgtgactcctttacggtcaagtggcatggcttcgagagggttaatgttggaaaagttgggaatttccctcctcaggttgttcaatagcagtagctgaaaagtagtggctgctcctccactggtggccacttcacatgagccgactcctcaagaccaagttaataatatgaaagaaatcacttggcagctttggtgcattgttaaaagtttttaagccgcgcctcaaacagaaaaaaaaaaatgaaataagaaagggaaaagcgccgcctcatatgtggcaaacaaagttatttgtggtagtgcttttgtggtgccccttttcccatttcccctccccgccctcaccaatttttcccgacaaaggtagttctcatcgggcgccagcaaactttgctgtttgcgaaacttttttctcgtcgcttttcctgcattttttacacaatttctttgttggaccatggggctttttggggggtgtggacggaaaatacgcagtagctgcggcagccgctgcgtaaaacttttcactttgactcgactttattgtatttctaatactttgcctttcagccaagttagtgacttcgacggcagcatgtgaacaatgtaagcggccaacggttgccaaactgtaagcgtccataaaaatgtttggtctctggccactcgagcagattgtggagaaaaggggatatcccagggtcttcccggggatccccccattagttcactggggttcaagtggagccaagacagcaatctcacacacacatacagacacacacactctttcgcacacagat

SEQ ID NO: 14240 - DNA, 1032 bp, DROSOPHILA
atgcaaatgacatcacgcactatagtcatcaattttgcggagcatcagctacgctggcacaaagctgaaagcaaatcccccaagccgaaaaaagccaaagtcggggaacgggaatgtcgtgtgtttgagtttgaaatatttgcaattgcgaatcctgtccttcaagtgccaaaactaatgatggaaataaattcacgagagcgcaggaccagaacaaggacaatgctgactgccagaaccagtcgcagccagaaattcagtttctgtacacaggagaaaaagccagggaaaaactgggtggaaaatccaaaagggggcggccccagcacttttggggatagcaacgcactcaactgtgtgcccgtcgcctcgcgcaatttttggctgcttttgacgccgggccaatatgcagtaaatctgccagaatgtgcctctagatttggcatcgccaaccagccatcagtcgcaactgaaggaaacttcatgtatgtacgtctggctataattcaattcccttcaaaacccgcgacagttggacagagaaatggatggcaacggagtaacagagaaaggatagagacatccagtgatactttggctgtggtcctcgagtttcgagacttcgactttcttatcgcacgcacacgaattggagtaatcgcgaggcgtcggcgtcaggaattcaagggggattcaccgggggtgttccaaggaccgaagaccgatgaccgaagaacgaagacttgccgggcgcggcaggagcagcagcaaccaatccccagaattcaggccattgttcgcttattgaaatttcagccaaaggaaaacggaacgagccacttgaattcgcaggataatttatgcgcgatttgcatgactgaggcagcgaacccttcacagctgttctgcgattccgaagatcctcagtttgtgcgtgaagctcgggcgtgttggttgccacatcgaaatggtgatggttcagatggacagagatatacgaaagccggttttggcactgcgaaaaattcctga

SEQ ID NO: 14241 - protein, 341 aa, DROSOPHILA
MTSRTIVINFAEHQLRWHKAESKSPKPKKAKVGERECRVFEFEIFAIANPVLQVPKLMMEINSRERRTRTRTMLTARTSRSQKFSFCTQEKKPGKNWVENPKGGGPSTFGDSNALNCVPVASRNFWLLLTPGQYAVNLPECASRFGIANQPSVATEGNFMYVRLAIIQFPSKPATVGQRNGWQRSNRERIETSSDTLAVVLEFRDFDFLIARTRIGVIARRRRQEFKGDSPGVFQGPKTDDRRTKTCRARQEQQQPIPRIQAIVRLLKFQPKENGTSHLNSQDNLCAICMTEAANPSQLFCDSEDPQFVREARACWLPHRNGDGSDGQRYTKAGFGTAKNS

SEQ ID NO: 14242 - DNA, 3016 bp, DROSOPHILA
cattgtgggctactccacaccagatcccgaccagcatgcgatctacacggaagttttcacccagaagcaggtgatgaaggcacttcttgagctgcccgtttcgttctgggagcaatatatcgttatagatccgacaagaacaccggccacagttatcaagcgggtgccaagcaacaaaaatgacttactctcgctatatggtgagttatttatgagctaatttttttaattattctaattatctctccttcacagcaactcccttcaaaggaggcaccattaagaagcggaagttttacggcacaccgccggcatctgcgcacaagaaataacgagactttccttgttggaaagcatttgacgtgttacttaagtttacttcaagtattttgcaagttttttgtttccggccagccaaccccgagctgtatttgtacccaacccaaccataagcttttctttataatttatgcgttcgattataaactaaagcacgttattatcgtactaacataagtatactcaccagagaaataaactaaaatatgcatttgaaaagcaataagaacaatgaacaaatatataaataaacgataaaagaatataacaagtttttattcaagttcaaatatttttgaatctgtttagtgaacttacttttttatattcttgatggcaaattattggaggcatgttagtaaccaaaagtatattaaacatttccggatttggatttggaaacgggaatgtttcgccacaaaacgtgcatcacaactaatggcaaactcgatacaactttggaatatccctttgataggattatctaaaaacgtgataagctcggtcattgaaaatactgactgccgctcagaaaaccccatgactgataattgtgcacagctagagccgtatcatcatcaaactggtttggacaactctcgtaataatacccttaactgcgccatggaaccgtcagtctgtcgattggaacccatttagaatgttcggagcgcatcagaatctctcaattcagctggtgatttttctctccttagccgtcaccatttgcttgggatcccaaaatgccacaagctgcgggcatcgctgtggaggaggcgactgtatccaactggaccagctgtgcgatgggagcgccaactgcttggatggttccgatgagacggtcgccatgtgtgagaaggtctggtgtccgggttatgcatttcgctgcagctacggtgcgtgcatagccagcacagcggtttgcgatggcgtccaggactgcgtggatggttcggatgagcagggttggctgtgccgggcgcagatgcagcaggctaactgcgacaactgggaaatgtactgctcctctggccaatgcatgacctattccaaattgtgtgatggcatccgtgactgccgagatggagacgatgagctggagtccctttgcgagggcgttaccataccaacgactacagtcagttcaacgacaagtacaactacggaaagtagtatccataggataactcccactgttcctgtaacaaggaaggcgtcacgaccaaatcctcttcaggagaacggggagtgcgtggttccccaactgccaaacgttatggttaagcacttcacagatgcaatcctcactgtaggatcaagggtagccaatggcacccgtatctactacgactgcccggcggagcacagactgaaaggcgagaaccagaacatttgccaggacgcattgtgggctaggaagtttccttactgtgaaagtaagttgtgtatttatcaaaagtttcttcattaatactaatttatttacttttagcaccccaagcgtatgttttcagcttggttatagtaatattctgcttcctaatcgtggtattggtgtttctaatttggcgggtgcgtcgagaaaatggctcaagaaggcaacgagaggagcacatttggctggtggagaccagcagtaatcttccccagacatcttcaataccaaaggtctaggaattaatttttacaaagctaaacatgtgatcacgcatacttacttatttaccagccaagttgttgataaaaagtactgttaatttcaaactatctaggcttatcttatgtaaataatgttatttcaagttctccataaaaattaaaagcttaaatacgaatgtatatttatttttagagtaaaacgtgagaagtagtattatattgtaaatatattaaaacagatttaagaacataataattgtgttattaggttgcacattttaatttcggctgttaacaatacttttgcgttaacagctgtaatgctagaaccacttgttgctgcgacccaaactgtgactgaaacagtgactggaaatagtggcatttctggtgggagcgaacgcggtcacacctgccccactagtgcgccaatattgctccagtgcttcgcagcgtaagtatcccaagttctagagtggctccatgccagataccgccacagattagataacgaattgcacttgcagccggctcagagttccttcaattgaaaatggccaacattgctaagatcttcgctagccgcgcccagtgcgtcctgcaggcagccgcccgtcagccacaggtggccacccgtttcagcagctcctgtaagtagatggttgattgcgagggatcaaagtccacgcgattgatgcccagctccaacctaagccggaatatcaagatatcaagtgccgccggtttcttggcgacatcttttgtacttttccaggcaaataaacattgattgcgtaacattcgcgcacatacgatcacctcatttatgatgccatctcttttcagccaccaacaacaactgggagtacatcaagaccgaagtggccggcgagggcaagaacgtaggcgtgatcaccctgaaccgccccaaggccctgaatgccctctgcaatggcctgatgaaggagctgtccaccgcattgcagcaattcagcaaggataagaccatctccgc

SEQ ID NO: 14243 - DNA, 960 bp, DROSOPHILA
atgttcggagcgcatcagaatctctcaattcagctggtgatttttctctccttagccgtcaccatttgcttgggatcccaaaatgccacaagctgcgggcatcgctgtggaggaggcgactgtatccaactggaccagctgtgcgatgggagcgccaactgcttggatggttccgatgagacggtcgccatgtgtgagaaggtctggtgtccgggttatgcatttcgctgcagctacggtgcgtgcatagccagcacagcggtttgcgatggcgtccaggactgcgtggatggttcggatgagcagggttggctgtgccgggcgcagatgcagcaggctaactgcgacaactgggaaatgtactgctcctctggccaatgcatgacctattccaaattgtgtgatggcatccgtgactgccgagatggagacgatgagctggagtccctttgcgagggcgttaccataccaacgactacagtcagttcaacgacaagtacaactacggaaagtagtatccataggataactcccactgttcctgtaacaaggaaggcgtcacgaccaaatcctcttcaggagaacggggagtgcgtggttccccaactgccaaacgttatggttaagcacttcacagatgcaatcctcactgtaggatcaagggtagccaatggcacccgtatctactacgactgcccggcggagcacagactgaaaggcgagaaccagaacatttgccaggacgcattgtgggctaggaagtttccttactgtgaaacaccccaagcgtatgttttcagcttggttatagtaatattctgcttcctaatcgtggtattggtgtttctaatttggcgggtgcgtcgagaaaatggctcaagaaggcaacgagaggagcacatttggctggtggagaccagcagtaatcttccccagacatcttcaataccaaaggtctag

SEQ ID NO: 14244 - protein, 319 aa, DROSOPHILA
MFGAHQNLSIQLVIFLSLAVTICLGSQNATSCGHRCGGGDCIQLDQLCDGSANCLDGSDETVAMCEKVWCPGYAFRCSYGACIASTAVCDGVQDCVDGSDEQGWLCRAQMQQANCDNWEMYCSSGQCMTYSKLCDGIRDCRDGDDELESLCEGVTIPTTTVSSTTSTTTESSIHRITPTVPVTRKASRPNPLQENGECVVPQLPNVMVKHFTDAILTVGSRVANGTRIYYDCPAEHRLKGENQNICQDALWARKFPYCETPQAYVFSLVIVIFCFLIVVLVFLIWRVRRENGSRRQREEHIWLVETSSNLPQTSSIPKV

SEQ ID NO: 14245 - DNA, 7635 bp, DROSOPHILA
tgcggcattaaaaagtcgttcgttacctgtcggagctagcggaactcgatgggttgtagaacttgatttgtttcgtctgggtcacagacatttcgacaagagaatagtgattgcagcagccagttgcagcgattagaaaaaaacacgcggtgatttacttcgtcgtgcctctccctctccgagcaagtgactgattcgtttctgaaggcattgcgttggaaaaacgtgcgccgccttcgtatacatacatatgtatacatctacccgagcttgaatggtcaagtaaagtgctaattgtcagctggggaaaggcactggagcggagggacgctcattgccttgtttatctccatttgatgctgtcattgaggcatttatttatatgttttggggcaattcaattccattcgcaaggcgctcagctgtttgattggggcggcgacagtgttgcgaagcgctgttggctgttgggttgcagtaaattcgaatgtgaatggctaaatccgaagcggggtttttaaatgtttgataattattacttcgagcttgtgtcaatataagtgaatattttacataaaactttgtggtttctaaaagattagcttacaacatgatctttaggtactaacaaataaaaggttgtaaatagcggtagtgctcggaaaatatatcaacatgagacaattaccaattcgattattttttgttggtcctctatcgataactgttactcttactctcttgcactgcaagccaaattcatattaattaagactataaaaataaacacatacagaaacatgtggctgtttcctggctatcttggatggagaaagtagtatgtagtagtatcataatttatagttttctttcctcttgttctgtcccttaaagaaactttgaataaattgcattttgttcagttttaaaatgcattaaataatcgattgccacgctagttcgatagtatttaacgagcaccgagtattgttcgagctctaaaagatggtcactccggaccagagagacgcaacaatatagcaattctgaacttggttcgagtgtttttgcagcacgaattgataatatgccgtaggtgcggcccagcgcggatcatcagcagcagcagcgatggcctacatcaacatcgccgagtggacgcccgaccaggtcaccgactggataaaaggtaatgctcgaggtcaaggaaagcgcagctgagaaaaaaaaaactgcatctcgcagccactgccccaaaaagcagcagcaacaacaagtgcaacaagaatttccgctttgttcaaggtttcaacaggcacatcataataattatgttttcctgattctcgcaggtctggatgagtctatgaaggggtatttgtacgagttctccaagcaggagatcggcggacgggcgttgctcaacatacggccatacgagctggagaatctgggcatgctgcgcattggccatcaggagatcgtgctggaggcggtggagaacttaagaaacttcgtgagaccccaaacaaatattgtgacatacaaacccgttaattgagcttgatattccagcattatcacctgaaaaacgacaatctgcagttcatggccttgcatgtggccacggcagctaagaatctgcatcgcgaactggccaggaatcatgcggagagcactaagatcgatacccggatactgcacgatattaccaggacgatagctactctaaagccattggtgggcagcctggagcgaacaccgttccgtaagcaggagatgtaccgcgagtattgtggcaatgtgctcaaatgcggcctggagctggccacaattgcccaccgtgatcgttttgccctgcagccggtgccagcgattcgacagtcagcggaacggctcgagaatcttgccaactttgtaatccaggacatatctgatcccatggtactgcagccagcctctctgaaccttgtcacccttaaaaaacgcgaatccgagttgggtttcaacatagagtccagttataatggcattcaccgtgtcacggatatcaagtacaactcgccagctcacaattccggaaaaatcgaagatggcgacgagattgtgcagatcaactaccagaccgttgtgggctggcagcatcgcacagtactggagcatctgagggaagcacttccagatgtggtgctgacggtgaagaaacggccgaagcacacaaagatgtttggacagatctatatgcagccgtacaggttgcccagcaagaagaggaatatggccgcccgctgggcggcacagatgccaagtccccgtgctgcatttttaaccctggacacggagcaactggcaacaggaggaacaggaagcgcggtgccagatcccagtaaatccctaagcagtgagaagagggaggtacttaccaaggccaatccagtgtcctctgcctccgactctgattccagttgcagtgatattccaacaccaacggatcccaagctagccgcacgggagatccgtttgtattacccaaagccaagagctttgctccaacgaagaaacactatttgtggatgcgagtatcttagcctgaaaaactcggatctagtcgttccatcgtggcacgaaagaaagccaggaattggttcgcccaccaattgcgaccctggctcgcccagtatacgggataagtcgatatccttcggttatggcctagagatggcagcaaggccgaccacttgcattgggattgcgggcgatacctccacggacaaggccaggcgaatgtttcatgaggcgcgaaaactaaagcagctgacggaggactcgcagcgcgaattcctcgtggatcgttacaagccgggtgtcagcaaagtagttcggttcgacgccaaggaagattatgtgatgaagaatgaaaaatttatctgtaacgttgagaacaccatactggagacctttgaaccgattccctttgcggatgagggagacgaggacgccttggaaacgctgcgcaactgcaaaacagaaaacgcagaggagctcctagaggcaattaatctggctacaaaaggtcaggacttgcccctggccgaggccattaacatgcctttgttgcagcaaggtcgaaggggccgattagacaagagtcatagtactccggcatacgataattcgggtgaagaatcggatacgccgccagcgattgagccaagaaaggagttcctgcttgtcacaccgccagcaccgccaccgcgaccccgcaagcaaagggaaatgacgccaccggcggtgcctccacctccaccaaaaccagccagcatgcagccggctagtagtatcaccagtatctccattcccgtgccagtacctgtaccagccgcagttgatccatcggagatcagtgagcttcatacgcccagcaaatcccggacactgacccttaaaaagaagcacagcttaatggccaagcggcggaacacaaatctcaagctgttggggactggggatatccaaggtcatctgtacaggcgcaagaaaaatcatcgcggagtgacttactgggcgagaatctatttcgtgatgctggatacgatactgtacggatttcgcagtaagcagagtaccagcgccagcttggtaatatttttaccgggctttacggtttcattggcaaaagaagtgcactccaaaccgcatgcctttaaagtttaccacacggccaagagcttctactttgcggccgagtcgctggacgcacttaaccaatgggtggacttcttgcgccaggcttcgctcaaagtgccgcctagtacgggttcaaaaggcggtggtgacgcaaaggatttgtattcggagaacgatagctcaggcgaggaatgcgatgcccttgtgatccagaatttaagcacgccctcgccgcaaggcaacaaggagtcaatgtccatgtcgatgacactatctggcggaacaccaccttcctctgcacccattaagcatgaacgcggctacttggactcgtttcgcaaatttacgaatacattcaagagcagtgcagcgaaaccgtcgagcgacatccctgtgccaacggagcaataccgcagctataggaaggtgccaggcggaagttttggcattcagattggtgccaatacaccgggctaccatgatcccgcaatgccgccgacacagattccacctttggtgggtcctaaactgtcgcgtagctcaagtaggagttcggtggtcagtggaaccgagtctgccgtatcattatctgcttcgattctgggtccgcccgcgtcgccagcgccaacgcccacgcctacagccactcccacatcgctgcagcatcagagctccgaggagagtccaagtcagagccagagccagagtcccagtagcaagtcgagtttgaagaaggcaccattcaacttcttgcacgcctcaaatccgaatttggtggaattcgatttccatacctcgaaaacactactccccaagatgagtgtgggtaatacactcgaccatggccataatatacagggctttgtgacgcttaaggatctgatgctgcgcaaacaggaggaggaggcccaggaaatgtacaacaatcgagtgcacttgggtgtggagaagcacaagcacgcacggacggaatccacggccagtcagcagagcgccatgagcagcagcgtgacaaagccgctggaaaagttgcccaagatccagagcgtgagtctgcccaaaacacccgactacgagatcagttttaagcctgacgacgagagtattaagagaaccagaactaaggaaggtcagaagttgcgcgactttggttacgagctgatatgtggggatgagccgagcactagctccatcagccggcaagagcaccaccatcatcatcatcatcaccagcaccacctgcagcatgtgcaacagcagcagcagctacaacatcagcagacgcagcagcaacatagcagcaaggccaagcacttcttgcgctcacagcagttacagctctccagtttcctgcacaagaacagcagcggcggcagcggcaagagttccggatccggtgcggatcaaaagaagtccaaaggaaagtctagcggcgatcgtcggtttcccttttccaagcactcaactggctccgcgggcagtggctgtgggccgggtcatgcgatgactatgacgctgccgctgaacaagaagtccaaatcgaatcacgccttggatggagccgtaggcaatggagtcaccataatcggcagcggcagcagcatcaagaaaagccagacgtacaatcaggatctgcgagacaagatagtgggcaccaagtacgatgcgcatcgcaagaactcggccccgataccaatcttttcgaaactctccatatcgggtggcacgccggcgaagccctccaaggagaatcgtttcctgggctcaccgctgctgcatcgcacgctgttcgggcaccatcaccatcagcagcaggcagtaacgccaccaagcagtgcggatcccgattgcgatcaggagatcttctcccaaatcaccctgcccacgcacaatcaggcgggatatcgaagttaccgtggacctggcatactaaccacctcgaccactaatttgtgctcgtcggagggcttgcagccgccgttgcccccagcgccaccgcctcccgtcaacaccagcaggcagagagaggaggagcaagcggaggcaacgatatcagagtgtgcggccaccccaaaagtgtccagttcgggatctgtggattcgaaggcggcaacgccggactatccaaatatggagtgtccgcctgtctttgagccggaaatctactcgctcagcgataccagcttgtcccgcatcgtgatgcggacgcccagcagcagtggtgccaccagtgccaccgccagcaccaccaccaccaacaacaacaacaacaataataacaccaataacaacaccaacaccaacagcagtcccagtggcggcgaacaccatcagacctagatgtgtgatgaaaactattgtgaatgctcgcggggattagcccccgtttacttatgtatttatacacacgcatatagatatatatatatatattatatatagcgatattctcgtacgatttaggtatacaacttgttcattttgatcgtcttccctgtctgtccaccagaaacaaacacacgcatacctgcaatcccttcgattcgaaacccacttagatgtaaatgtttaatctgccttatttgcattgtatttcggttctaggcaaaatgttttacacatgtagtcacgcaagcaaaacaatgaattatagcgaaaatggagaataactttagaagtctgtgcatcgaacaaagacggttctttatgatttgcctttgtacgcgattaaccaagttaatccgagctgtttgatttgctcaacagtttgtgtctagattgcgtgtaatatacatatattattatgcgaaatgagatattattgtaatggcatccagcgacgccaatggagccagaaatgttgtagcggaatgcaagaaatatatatatacacaattacacgaaatatacatgcatacgaataaagtcaactgtacataatagaataacgatctttttattttgggatttttcaagaaacaggttgtttcattagaggaggattgaaaatctttttatgcacgcaacttattcaaagacctaagaaatgagaatctctggacagaagtgctgaaccctgcttctttttactaatgtaaccaaatcaacttgatcaaaacgagtattaccttctattattagttcgatttagaatccctttctttattcacattacatttgaaattagatcaatttaaaaccactgccgcttacgcaatgttcttaatgtgctgctccacctcctccttggtgaacatgtagaactctctttctttcgtcatggtcatcacctccacattggtggagtttagtttctcctccataacctgtttaagtgtgttgagcgaaatgtcgatagcctcatcgagagtcaaatcgggtctaaataagtcctgcagattctgctgagcaccttcgctgcccgagccaatggccttggctccgtggcgcacgaatgtgccggagggatccatgtgccacaactggggttgtcccgcctcgatgccggcaaatagaatggccacaccaaagggacgactcatggcggcggcaccatcgctgtcgccactatcaccgaactggatggccaaagtggacacagcctgggcgcaggactcgatggacatgcgctcgttgtagacgaaccagtggttctggcactccacgcgtgccctctcgatcagagtcctggcatcggccatcaagccggaggtggcgcaaccaatgtgcttgtccacctccacaatcttctccacagtactgggtaccattagcggcgaagtgatgcgcttctccaccgccaaaaccactcctggaatgcaattttaccattagatctccgcgtgtacttatggcagcaaagaacataccttctggcgtgcaaattccaattgctgtggagcccaatttgatggcctcaatggcatattccacttggaagaggcggcc

SEQ ID NO: 14246 - DNA, 5413 bp, DROSOPHILA
aaaagatggtcactccggaccagagagacgcaacaatatagcaattctgaacttggttcgagtgtttttgcagcacgaattgataatatgccgtaggtgcggcccagcgcggatcatcagcagcagcagcgatggcctacatcaacatcgccgagtggacgcccgaccaggtcaccgactggataaaaggtctggatgagtctatgaaggggtatttgtacgagttctccaagcaggagatcggcggacgggcgttgctcaacatacggccatacgagctggagaatctgggcatgctgcgcattggccatcaggagatcgtgctggaggcggtggagaacttaagaaacttccattatcacctgaaaaacgacaatctgcagttcatggccttgcatgtggccacggcagctaagaatctgcatcgcgaactggccaggaatcatgcggagagcactaagatcgatacccggatactgcacgatattaccaggacgatagctactctaaagccattggtgggcagcctggagcgaacaccgttccgtaagcaggagatgtaccgcgagtattgtggcaatgtgctcaaatgcggcctggagctggccacaattgcccaccgtgatcgttttgccctgcagccggtgccagcgattcgacagtcagcggaacggctcgagaatcttgccaactttgtaatccaggacatatctgatcccatggtactgcagccagcctctctgaaccttgtcacccttaaaaaacgcgaatccgagttgggtttcaacatagagtccagttataatggcattcaccgtgtcacggatatcaagtacaactcgccagctcacaattccggaaaaatcgaagatggcgacgagattgtgcagatcaactaccagaccgttgtgggctggcagcatcgcacagtactggagcatctgagggaagcacttccagatgtggtgctgacggtgaagaaacggccgaagcacacaaagatgtttggacagatctatatgcagccgtacaggttgcccagcaagaagaggaatatggccgcccgctgggcggcacagatgccaagtccccgtgctgcatttttaaccctggacacggagcaactggcaacaggaggaacaggaagcgcggtgccagatcccagtaaatccctaagcagtgagaagagggaggtacttaccaaggccaatccagtgtcctctgcctccgactctgattccagttgcagtgatattccaacaccaacggatcccaagctagccgcacgggagatccgtttgtattacccaaagccaagagctttgctccaacgaagaaacactatttgtggatgcgagtatcttagcctgaaaaactcggatctagtcgttccatcgtggcacgaaagaaagccaggaattggttcgcccaccaattgcgaccctggctcgcccagtatacgggataagtcgatatccttcggttatggcctagagatggcagcaaggccgaccacttgcattgggattgcgggcgatacctccacggacaaggccaggcgaatgtttcatgaggcgcgaaaactaaagcagctgacggaggactcgcagcgcgaattcctcgtggatcgttacaagccgggtgtcagcaaagtagttcggttcgacgccaaggaagattatgtgatgaagaatgaaaaatttatctgtaacgttgagaacaccatactggagacctttgaaccgattccctttgcggatgagggagacgaggacgccttggaaacgctgcgcaactgcaaaacagaaaacgcagaggagctcctagaggcaattaatctggctacaaaaggtcaggacttgcccctggccgaggccattaacatgcctttgttgcagcaaggtcgaaggggccgattagacaagagtcatagtactccggcatacgataattcgggtgaagaatcggatacgccgccagcgattgagccaagaaaggagttcctgcttgtcacaccgccagcaccgccaccgcgaccccgcaagcaaagggaaatgacgccaccggcggtgcctccacctccaccaaaaccagccagcatgcagccggctagtagtatcaccagtatctccattcccgtgccagtacctgtaccagccgcagttgatccatcggagatcagtgagcttcatacgcccagcaaatcccggacactgacccttaaaaagaagcacagcttaatggccaagcggcggaacacaaatctcaagctgttggggactggggatatccaaggtcatctgtacaggcgcaagaaaaatcatcgcggagtgacttactgggcgagaatctatttcgtgatgctggatacgatactgtacggatttcgcagtaagcagagtaccagcgccagcttggtaatatttttaccgggctttacggtttcattggcaaaagaagtgcactccaaaccgcatgcctttaaagtttaccacacggccaagagcttctactttgcggccgagtcgctggacgcacttaaccaatgggtggacttcttgcgccaggcttcgctcaaagtgccgcctagtacgggttcaaaaggcggtggtgacgcaaaggatttgtattcggagaacgatagctcaggcgaggaatgcgatgcccttgtgatccagaatttaagcacgccctcgccgcaaggcaacaaggagtcaatgtccatgtcgatgacactatctggcggaacaccaccttcctctgcacccattaagcatgaacgcggctacttggactcgtttcgcaaatttacgaatacattcaagagcagtgcagcgaaaccgtcgagcgacatccctgtgccaacggagcaataccgcagctataggaaggtgccaggcggaagttttggcattcagattggtgccaatacaccgggctaccatgatcccgcaatgccgccgacacagattccacctttggtgggtcctaaactgtcgcgtagctcaagtaggagttcggtggtcagtggaaccgagtctgccgtatcattatctgcttcgattctgggtccgcccgcgtcgccagcgccaacgcccacgcctacagccactcccacatcgctgcagcatcagagctccgaggagagtccaagtcagagccagagccagagtcccagtagcaagtcgagtttgaagaaggcaccattcaacttcttgcacgcctcaaatccgaatttggtggaattcgatttccatacctcgaaaacactactccccaagatgagtgtgggtaatacactcgaccatggccataatatacagggctttgtgacgcttaaggatctgatgctgcgcaaacaggaggaggaggcccaggaaatgtacaacaatcgagtgcacttgggtgtggagaagcacaagcacgcacggacggaatccacggccagtcagcagagcgccatgagcagcagcgtgacaaagccgctggaaaagttgcccaagatccagagcgtgagtctgcccaaaacacccgactacgagatcagttttaagcctgacgacgagagtattaagagaaccagaactaaggaaggtcagaagttgcgcgactttggttacgagctgatatgtggggatgagccgagcactagctccatcagccggcaagagcaccaccatcatcatcatcatcaccagcaccacctgcagcatgtgcaacagcagcagcagctacaacatcagcagacgcagcagcaacatagcagcaaggccaagcacttcttgcgctcacagcagttacagctctccagtttcctgcacaagaacagcagcggcggcagcggcaagagttccggatccggtgcggatcaaaagaagtccaaaggaaagtctagcggcgatcgtcggtttcccttttccaagcactcaactggctccgcgggcagtggctgtgggccgggtcatgcgatgactatgacgctgccgctgaacaagaagtccaaatcgaatcacgccttggatggagccgtaggcaatggagtcaccataatcggcagcggcagcagcatcaagaaaagccagacgtacaatcaggatctgcgagacaagatagtgggcaccaagtacgatgcgcatcgcaagaactcggccccgataccaatcttttcgaaactctccatatcgggtggcacgccggcgaagccctccaaggagaatcgtttcctgggctcaccgctgctgcatcgcacgctgttcgggcaccatcaccatcagcagcaggcagtaacgccaccaagcagtgcggatcccgattgcgatcaggagatcttctcccaaatcaccctgcccacgcacaatcaggcgggatatcgaagttaccgtggacctggcatactaaccacctcgaccactaatttgtgctcgtcggagggcttgcagccgccgttgcccccagcgccaccgcctcccgtcaacaccagcaggcagagagaggaggagcaagcggaggcaacgatatcagagtgtgcggccaccccaaaagtgtccagttcgggatctgtggattcgaaggcggcaacgccggactatccaaatatggagtgtccgcctgtctttgagccggaaatctactcgctcagcgataccagcttgtcccgcatcgtgatgcggacgcccagcagcagtggtgccaccagtgccaccgccagcaccaccaccaccaacaacaacaacaacaataataacaccaataacaacaccaacaccaacagcagtcccagtggcggcgaacaccatcagacctagatgtgtgatgaaaactattgtgaatgctcgcggggattagcccccgtttacttatgtatttatacacacgcatatagatatatatatatatattatatatagcgatattctcgtacgatttaggtatacaacttgttcattttgatcgtcttccctgtctgtccaccagaaacaaacacacgcatacctgcaatcccttcgattcgaaacccacttagatgtaaatgtttaatctgccttatttgcattgtatttcggttctaggcaaaatgttttacacatgtagtcacgcaagcaaaacaatgaattatagcgaaaatggagaataactttagaagtctgtgcatcgaacaaagacggttctttatgatttgcctttgtacgcgattaaccaagttaatccgagctgtttgatttgctcaacagtttgtgtctagattgcgtgtaatatacatatattattatgcgaaatgagatattattgtaatggcatccagcgacgccaatggagccagaaatgttgtagcggaatgcaagaaatatatatatacacaattacacgaaatatacatgcatacgaataaagtcaactgtacataatagaataa

SEQ ID NO: 14247 - protein, 1557 aa, DROSOPHILA
MAYINIAEWTPDQVTDWIKGLDESMKGYLYEFSKQEIGGRALLNIRPYELENLGMLRIGHQEIVLEAVENLRNFHYHLKNDNLQFMALHVATAAKNLHRELARNHAESTKIDTRILHDITRTIATLKPLVGSLERTPFRKQEMYREYCGNVLKCGLELATIAHRDRFALQPVPAIRQSAERLENLANFVIQDISDPMVLQPASLNLVTLKKRESELGFNIESSYNGIHRVTDIKYNSPAHNSGKIEDGDEIVQINYQTVVGWQHRTVLEHLREALPDVVLTVKKRPKHTKMFGQIYMQPYRLPSKKRNMAARWAAQMPSPRAAFLTLDTEQLATGGTGSAVPDPSKSLSSEKREVLTKANPVSSASDSDSSCSDIPTPTDPKLAAREIRLYYPKPRALLQRRNTICGCEYLSLKNSDLVVPSWHERKPGIGSPTNCDPGSPSIRDKSISFGYGLEMAARPTTCIGIAGDTSTDKARRMFHEARKLKQLTEDSQREFLVDRYKPGVSKVVRFDAKEDYVMKNEKFICNVENTILETFEPIPFADEGDEDALETLRNCKTENAEELLEAINLATKGQDLPLAEAINMPLLQQGRRGRLDKSHSTPAYDNSGEESDTPPAIEPRKEFLLVTPPAPPPRPRKQREMTPPAVPPPPPKPASMQPASSITSISIPVPVPVPAAVDPSEISELHTPSKSRTLTLKKKHSLMAKRRNTNLKLLGTGDIQGHLYRRKKNHRGVTYWARIYFVMLDTILYGFRSKQSTSASLVIFLPGFTVSLAKEVHSKPHAFKVYHTAKSFYFAAESLDALNQWVDFLRQASLKVPPSTGSKGGGDAKDLYSENDSSGEECDALVIQNLSTPSPQGNKESMSMSMTLSGGTPPSSAPIKHERGYLDSFRKFTNTFKSSAAKPSSDIPVPTEQYRSYRKVPGGSFGIQIGANTPGYHDPAMPPTQIPPLVGPKLSRSSSRSSVVSGTESAVSLSASILGPPASPAPTPTPTATPTSLQHQSSEESPSQSQSQSPSSKSSLKKAPFNFLHASNPNLVEFDFHTSKTLLPKMSVGNTLDHGHNIQGFVTLKDLMLRKQEEEAQEMYNNRVHLGVEKHKHARTESTASQQSAMSSSVTKPLEKLPKIQSVSLPKTPDYEISFKPDDESIKRTRTKEGQKLRDFGYELICGDEPSTSSISRQEHHHHHHHHQHHLQHVQQQQQLQHQQTQQQHSSKAKHFLRSQQLQLSSFLHKNSSGGSGKSSGSGADQKKSKGKSSGDRRFPFSKHSTGSAGSGCGPGHAMTMTLPLNKKSKSNHALDGAVGNGVTIIGSGSSIKKSQTYNQDLRDKIVGTKYDAHRKNSAPIPIFSKLSISGGTPAKPSKENRFLGSPLLHRTLFGHHHHQQQAVTPPSSADPDCDQEIFSQITLPTHNQAGYRSYRGPGILTTSTTNLCSSEGLQPPLPPAPPPPVNTSRQREEEQAEATISECAATPKVSSSGSVDSKAATPDYPNMECPPVFEPEIYSLSDTSLSRIVMRTPSSSGATSATASTTTTNNNNNNNNTNNNTNTNSSPSGGEHHQT

SEQ ID NO: 14248 - DNA, 4357 bp, DROSOPHILA
ccagccaattgactggctttcccaattcgaacgcaaatcctggcaatgaacagcagccgggcaatcagccaccaccgagcacctagaagtggatagaatcccgatccccgatccctgcctggatcggcggcacacagattaagttgttaagctgaaactataaatgtatttataatgtttaaatggcttctattacgcatacatacatacatacatatacatttttatccaatggaaataaataaatgaccgtgcaaattgccgctgttccaatcgaattttcaatgaatattaaatatatatattataatgcctcatatatttttctagttgcccgtcgttaacaaaattaaacaagtatatcacacagtgcatgtaatttaatgttgcttttattgaattcaagaaatgtatgctaggggttttttttttgctgatttgcatctctaaatggtacaattgttaatttgatattacatgtcaaataaaaactaatgggtttaaaacaaatgccgatctgtcgcaaacagtttgtcgcttgaaaatcattatcttcaaagcggtcaacttgaaagtaggttttatattgatattcgttcacttggttattggtataatcttatatttatgcgtttgacagaattgaaggtaaaaacaggagtgatataaatttcaaacaatgccagcgcctttcttttgggaaatgtatgaaaagaaggcgtggcgtgttttggaaaattgcacaagtactttagcgaaaacaaatgttataacgaaaataataaaagcaatgcgtgagtgtatgagtaaaatggatgtaaaaatgttgcatttaatttccatgaaaatatgttgcgctgaaaggagacaaaggggagaaagttaaatgaaaattgcacggaatactcaccactttcgttttgtttcctttaaaattgcttggctgcagcatcgcaacagttgtgtttattctgctcgcatccaatatcttgtttttgttttttttttttttgtatgtctacggactagggacaaaccattcaagtgaagtgttctttgctgctcttctgcctcacgattgattctttacttagtacttgttgaatcgcctgtttctgtagcctccaccgctgccgccaccgccgccgccgccacgttgtctcgtgcgattgttgtttccgtagctctggttgaccttgttggagtattttccagatggcggcgagtaaaacttctgatcgttggatggccgcgatttcttctctggctcctgatccttatccttgccgttagcagcggctttctccccaaaagtgatgggtgcatgacgcttgcccagcttgttctgaacgcacaagaatattgcattgtttataaatatatcagctgtaagagataacttgtgtgcttacattttttggcacaatccaggagagcacaatgtcatgtttgaatatgggcggtgaatgaaatagatcccggatcagaatgttgatgtttgatgtcgtcttcagtgccgtctgcttcagttggttctcctccgttttgagctcctctcccgtcttgcctttgagcgactcctccagtttcttaatataactacaaggcaagtattataaaataaattatgtaaacagaataaaatttttgcaagaacctacccctgtgttccccttgcaagatattgcaatctagctcgaaagtcttttagtttctctgcatcctcgacgaaacttaaactatttggatgattttttccaagagtgtgcaatgcgtacagtaagcactcggcgtgcgaaaactgaaacgagggcggtgtatctcccagatcctcgtcactcagctttggcaaaggcatgtattcctggaaattgtttacatgttattcgctcaatttcgaatgtaccaagtacacttaccagcaatacattgtagactgcattaatccgttcgctggcattgtccagcttgtctgtgttggttatcatctcggcgaatacctttagtaatctaagttggatttgatcttgcgaaactgcagtggcgatcatgttccaggtcttgatgggcaacagtttatcgcaaacgtgagccacgaaggccgtggatttgatggttttctataggaatggcaagagattcgatttaaatgctcgccaggggttcgatttcatgtgcagctattggaaacttaccgaaaagtaaggagccgcagcagaggcgcactgaatgaatcgctccaccacctcgtcgtcgacggctatgatgtccgcgtctgtgttatttagctccgcctgctccgtggccagcttgacgagctcggcgtgtcccgtgatggtgcttcccagtttggtggctcccagaattgtcatgcacagatgaaactcatcggcagtgacatcctgcaaagcctttttgatctcctccacgatatagtcctcgatttccttggtaataactgtgggacccatggtcagcagcttggtggcaatgaacttgaggcagcgctcccttgtcgtttcatccccagtggagatttgctgaaacaatccggcgatggagctcttggtgtccaattttatgatggccagcagtgagttgttgacctgctggagttctgtgggatcgtccaggattaacagctgggccagagtatcacccactcggatggtagcatctgcgtttccctggcacagtttcggcagatctttgatggcctggcggcggatctacaaggatgataaagatatttagtttgtggaatatgtgggatatcttaagctgtcaagatacggagcaggattacaggggatttcgatttatttacacacatcagctgcatacaggccaaaaattccgagcctattgtatcagctgggtaactttatggcacccactcacctgtgtgtcgtcatcctcgcacaaatcaaactgcgcgtctatggctgtgtcggccaaatccggaaagtgtttgaagaagttaccaatgaactgcgatgccaggcgcttctccttcgacgtgcccttcacggccttgagtatctctttatattcatccacatgctgcaattcgaaaaaaacatgcatatatatattagaccatgtatcatataccgtttttttttcggcacgttttgcaatggcggcatacttcggatattttatcgcccgcctcggacagaatctcgtagcatttgtacagtcgctctatgttgtccatcttcttggccagtggtacgcactatatttgcagaggtttcaagcgtctatagtttactttacacagttttcgttgcagttaaattggatgacagcgtttctcaaatgagagtttttcacgttgcaaacaaaatggtgagcacgggggagtgaccagatctcgagacagtaaaaacccagatggatatcgatataccgttgggaaaaatttgtactaccgttattcagaatacacatcgatagttagaacaagttattagtaccgttattctgaatacgcatcgatagtttaaaaaagttattactaccgttgttttgaatgcctatttcaaatcgatataaatgtgaaaaatatataaataccgatattccggaggaactatttccaaacgatgtagtgatatatttttatttgaaatcctcttaatgttaatgacgaataagtaagaattattcttttaatacgaaacatcttccaaaatgtgtcttttgagtaagtaccagtatcatttatattaaccatggaattccatttattcatatagcgccagccaaaactgcctaccaaaattaatttaatcaaatgacaatatgacacaacctcgcataatttcaattttaagcctctagcctcaagttctcactgctatcattattccactcaataagttattctaagaaactcattagcttcatttagcggaaggaactgagtacaatgatttaatagaaggatgccatgcatatgtttattccaaacatattcgtgctcttacatacatacatacatagttctagatacataatacattagacatttatggaagtgcctttaaggcctgttcaaaataatctaccatcatggggtaaacttcgtcgtactgctgaatgttctttcgcctggcattgtcccgataccgttgcagtgcccccgagatcagctctagtttctcccgttcagccgtgtgcccatccagccattcgatcagccgctcattggaccagttggccgtcgtgtgtggcgactgcagatctgctccagcgtgtccgaagagcagcaacagcactatgtaactgggcactagagagtcctcgccgattgtctgcttgaccagctcctcggccgtttggacgatca

SEQ ID NO: 14249 - DNA, 1838 bp, DROSOPHILA
caccattttgtttgcaacgtgaaaaactctcatttgagaaacgctgtcatccaatttaactgcaacgaaaactgtgtaaagtaaactatagacgcttgaaacctctgcaaatatagtgcgtaccactggccaagaagatggacaacatagagcgactgtacaaatgctacgagattctgtccgaggcgggcgataaaatatccgaacatgtggatgaatataaagagatactcaaggccgtgaagggcacgtcgaaggagaagcgcctggcatcgcagttcattggtaacttcttcaaacactttccggatttggccgacacagccatagacgcgcagtttgatttgtgcgaggatgacgacacacagatccgccgccaggccatcaaagatctgccgaaactgtgccagggaaacgcagatgctaccatccgagtgggtgatactctggcccagctgttaatcctggacgatcccacagaactccagcaggtcaacaactcactgctggccatcataaaattggacaccaagagctccatcgccggattgtttcagcaaatctccactggggatgaaacgacaagggagcgctgcctcaagttcattgccaccaagctgctgaccatgggtcccacagttattaccaaggaaatcgaggactatatcgtggaggagatcaaaaaggctttgcaggatgtcactgccgatgagtttcatctgtgcatgacaattctgggagccaccaaactgggaagcaccatcacgggacacgccgagctcgtcaagctggccacggagcaggcggagctaaataacacagacgcggacatcatagccgtcgacgacgaggtggtggagcgattcattcagtgcgcctctgctgcggctccttacttttcgaaaaccatcaaatccacggccttcgtggctcacgtttgcgataaactgttgcccatcaagacctggaacatgatcgccactgcagtttcgcaagatcaaatccaacttagattactaaaggtattcgccgagatgataaccaacacagacaagctggacaatgccagcgaacggattaatgcagtctacaatgtattgctggaatacatgcctttgccaaagctgagtgacgaggatctgggagatacaccgccctcgtttcagttttcgcacgccgagtgcttactgtacgcattgcacactcttggaaaaaatcatccaaatagtttaagtttcgtcgaggatgcagagaaactaaaagactttcgagctagattgcaatatcttgcaaggggaacacagggttatattaagaaactggaggagtcgctcaaaggcaagacgggagaggagctcaaaacggaggagaaccaactgaagcagacggcactgaagacgacatcaaacatcaacattctgatccgggatctatttcattcaccgcccatattcaaacatgacattgtgctctcctggattgtgccaaaaaataacaagctgggcaagcgtcatgcacccatcacttttggggagaaagccgctgctaacggcaaggataaggatcaggagccagagaagaaatcgcggccatccaacgatcagaagttttactcgccgccatctggaaaatactccaacaaggtcaaccagagctacggaaacaacaatcgcacgagacaacgtggcggcggcggcggtggcggcagcggtggaggctacagaaacaggcgattcaacaagtactaagtaaagaatcaatcgtgaggcagaagagcagcaaagaacacttcacttgaatggtttgtccctagtccgtagacatacaaaaaaaaaaaa

SEQ ID NO: 14250 - protein, 536 aa, DROSOPHILA
MDNIERLYKCYEILSEAGDKISEHVDEYKEILKAVKGTSKEKRLASQFIGNFFKHFPDLADTAIDAQFDLCEDDDTQIRRQAIKDLPKLCQGNADATIRVGDTLAQLLILDDPTELQQVNNSLLAIIKLDTKSSIAGLFQQISTGDETTRERCLKFIATKLLTMGPTVITKEIEDYIVEEIKKALQDVTADEFHLCMTILGATKLGSTITGHAELVKLATEQAELNNTDADIIAVDDEVVERFIQCASAAAPYFSKTIKSTAFVAHVCDKLLPIKTWNMIATAVSQDQIQLRLLKVFAEMITNTDKLDNASERINAVYNVLLEYMPLPKLSDEDLGDTPPSFQFSHAECLLYALHTLGKNHPNSLSFVEDAEKLKDFRARLQYLARGTQGYIKKLEESLKGKTGEELKTEENQLKQTALKTTSNINILIRDLFHSPPIFKHDIVLSWIVPKNNKLGKRHAPITFGEKAAANGKDKDQEPEKKSRPSNDQKFYSPPSGKYSNKVNQSYGNNNRTRQRGGGGGGGSGGGYRNRRFNKY

SEQ ID NO: 14251 - DNA, 3636 bp, DROSOPHILA
gcacctgctgctgcaaaggagttcccgatgaagaaccgctaagatagcgctctcgccgcgtgggcgtggctggcgactgatagtcgccctcataatcactggccatgggtgagcccacgaagctgttgcgtcgctggccaaataccggagtgggtcgcacacgctgacgggcttgagccttgctgggcgacatagggaagccattggtggtcttctgcaagtccatctgaatgacattgtcctcgaggtccgagtggaatacctcttccagctgcccagccgagcttgcgggcatcttgaaggcgattgcatcagcctctagttccaattccgcagcaggggtcgatgcaacgggcggggactcagcctctgcttccaccaccaccgcctcctcctcctcatcctcctttttcgccgttgggagctcctccctgcgtggcttgcgtttgataagcgacaggttggccggagccttgatgcgctggcgccgcatggacatcctgcctgggtactcttaggcttcttccaggctcaaccgcagtttcacacatcaaatcgaatcaaaatctgcgcaacaaaaacaatgcggccgcaaccacgagtttcccaagtatagtgttggctaacgccaaagagcattcacagtgtcctggccatgtaagaaagtagacaaccaatttatttaaagtttcaaaatggctataaaaaacttgcagtacccaaaagattttttaacaaataaaaaaaaaacgagataactgcgttattagaaagcatgtcaagtaaatttattcgcagtgtcaaaaataaattggtataaattatggcacacttcaccagattcacgtcaaaaatttgtacacagtaaaagtttggttgaatttaatattatttgtgtttcagtgttgcagaaaagtgtgatcactgatcgtagctgtcacctctcagcaggcggtttgcgattttccaacactgctgcctgtaacggcacaacaacaggaacaacaacagcggaataacaacagaagcagcagacaaattgcaagttgcacgttttttctaatcgggcaaacatgataagtccgcccagatcctaaccaagctctcgtgcagtaacgcttccggcaaacctatcgggtgtgtcctggctagaagtactaaattcccaaagttttctggcgacaaatgtgccaagtgtgcgggggcacagtaatagcgaaggagcattaagaagtcgccgcacttttgagtaggttgttatgcaagcgggcggccgacggacaaattgaattagccggcatgctgttcaatcgatttgtactggccatcaagaaccagtcccgagaaacgctgcgtgcctggagctaccaatgcgagtcgattttcgcccagcgctcgcgtcgcgttcagcagttgttcagtttctaccagtcggtgtatggaactcagggtctgaagcagctatggcgcgcctactaccgccgggagctgcagcctccgctgcggggaatggtgatgagtgcagtgggtctcgtcgggctgaatatcaagcgaatgggtagcgatggcttcgattggaacaaggagcgcctggccttgtccaactttgatctgtgccgccgggatattgagtttatcaacgccctgcccaacaatcagctgtgcgaccgctgccaggccaagaagatgaaatactgctactgtcagctgggcaaccagcgctgcaaaaagggccaatcccagccgtccaccagcaaagaggcggagacggatccggacaccagcatcagcaattgtctgcgaccgttggatctggacgtgcgcaatgcaccggccggaacggtacgcattcaggcccaggacgaccaaaaatgggagccgtactttagcaaaaacgaattcagcatttggcggcggcaggagcgctcctccttatactcatacaaggtaagaggccatctaaaagttttttagggctcacttttatgccgcctttccgtttgcaggtttatgctcgattcgacgacatcacagcggacgacttcctccacgttcaaacggatttggattaccgtcgccagtgggacgacacggccctaagacttgagctcatcagcgaggatcccgtcccgggcagcaactcgcatctgatatactgggagatgcagtggccacgactgttcgccaatcgcgactacgtctattgtcgccgctacataaaagacgacaacaagaagctgatattcatttgcaaccgcggagccacgcacaacacctatccggcgttgtctggaaaagttcgcgtcactgactattggagcctgatggtcatcaagccctttcgcggtttccatgagccaggcctccactttgtcctcacgtacttcgacgatccgggcatacccataccgcagaatattaagtcctgggttactcagaaacaaatgcccgagttcctcaccaagatgtacgtggccaccaagaactacgcctgctcacgggccatcaagatgaaggacatgtttcacggattcgcgcttatcaatgacgaatatacggctaatgagcaacgcggcagttggttgggcagtttgagccggcgcaaggtcaatagtaaacccgaagcaggtcgttaactcctttaccattatatacctggctgctcccgctcccatgagacctccctgcccaacagagccacgtatcaaaccatccgaaagcccagttccatcttatgttcatcccttcgatcggctttaaaattcaggcgagagaaatcgaaaccattgaacatcagagcaagtgtgcaataggtggaagttttgctcttaacatgagtgccactttgatgagaaacttaaaaataaatatatacctatattagctatatggctaaaccaaaatattttaagtttagaaattgttttaaacgcaaatagaaattattgaaattaattgtacaataaaagaaacgaaaatagacacccagagactgaagtctacaaaaaagcaatgtcttgcataactattgatattttacggcattaattttcattcatgcataacattatctacaccagatagtaacactcgtgcttatcaaataattggtcaagcattatcttgaattaccttttttcaattacaatttctcacccgaacttcggctattcttatcgtgcactgtatacaaatcaaattggcttaagaggattacactaatctgatatggtatttaacatactaatttatatttttaattaaattttattattttattatagagggataagcgcagtaaaaatgaaattatactattagttataacataatttattagtatgctatatagttacaaaatgcgcatacattctataaaatattcgatagtctagacgacattcaagctgattgtaaactgaacggaacgaatacagtttatggtaatacaaaaagtgagattgcaaagtgttgtgggagaagcatcgttatactttgcaacagcgtatcacagctctgtgcggtccgctgaggtaggcgggttgttcatataggcgataaagtccttgctggtgcgtccgccattgtaatccagcttggttttgaggtaagagaagtacagaatggtgggatatc

SEQ ID NO: 14252 - DNA, 1577 bp, DROSOPHILA
aacaacaacagcggaataacaacagaagcagcagacaaattgcaagttgcacgttttttctaatcgggcaaacatgataagtccgcccagatcctaaccaagctctcgtgcagtaacgcttccggcaaacctatcgggtgtgtcctggctagaagtactaaattcccaaagttttctggcgacaaatgtgccaagtgtgcgggggcacagtaatagcgaaggagcattaagaagtcgccgcacttttgagtaggttgttatgcaagcgggcggccgacggacaaattgaattagccggcatgctgttcaatcgatttgtactggccatcaagaaccagtcccgagaaacgctgcgtgcctggagctaccaatgcgagtcgattttcgcccagcgctcgcgtcgcgttcagcagttgttcagtttctaccagtcggtgtatggaactcagggtctgaagcagctatggcgcgcctactaccgccgggagctgcagcctccgctgcggggaatggtgatgagtgcagtgggtctcgtcgggctgaatatcaagcgaatgggtagcgatggcttcgattggaacaaggagcgcctggccttgtccaactttgatctgtgccgccgggatattgagtttatcaacgccctgcccaacaatcagctgtgcgaccgctgccaggccaagaagatgaaatactgctactgtcagctgggcaaccagcgctgcaaaaagggccaatcccagccgtccaccagcaaagaggcggagacggatccggacaccagcatcagcaattgtctgcgaccgttggatctggacgtgcgcaatgcaccggccggaacggtacgcattcaggcccaggacgaccaaaaatgggagccgtactttagcaaaaacgaattcagcatttggcggcggcaggagcgctcctccttatactcatacaaggtttatgctcgattcgacgacatcacagcggacgacttcctccacgttcaaacggatttggattaccgtcgccagtgggacgacacggccctaagacttgagctcatcagcgaggatcccgtcccgggcagcaactcgcatctgatatactgggagatgcagtggccacgactgttcgccaatcgcgactacgtctattgtcgccgctacataaaagacgacaacaagaagctgatattcatttgcaaccgcggagccacgcacaacacctatccggcgttgtctggaaaagttcgcgtcactgactattggagcctgatggtcatcaagccctttcgcggtttccatgagccaggcctccactttgtcctcacgtacttcgacgatccgggcatacccataccgcagaatattaagtcctgggttactcagaaacaaatgcccgagttcctcaccaagatgtacgtggccaccaagaactacgcctgctcacgggccatcaagatgaaggacatgtttcacggattcgcgcttatcaatgacgaatatacggctaatgagcaacgcggcagttggttgggcagtttgagccggcgcaaggtcaatagtaaacccgaagcaggtcgttaa

SEQ ID NO: 14253 - protein, 425 aa, DROSOPHILA
MLFNRFVLAIKNQSRETLRAWSYQCESIFAQRSRRVQQLFSFYQSVYGTQGLKQLWRAYYRRELQPPLRGMVMSAVGLVGLNIKRMGSDGFDWNKERLALSNFDLCRRDIEFINALPNNQLCDRCQAKKMKYCYCQLGNQRCKKGQSQPSTSKEAETDPDTSISNCLRPLDLDVRNAPAGTVRIQAQDDQKWEPYFSKNEFSIWRRQERSSLYSYKVYARFDDITADDFLHVQTDLDYRRQWDDTALRLELISEDPVPGSNSHLIYWEMQWPRLFANRDYVYCRRYIKDDNKKLIFICNRGATHNTYPALSGKVRVTDYWSLMVIKPFRGFHEPGLHFVLTYFDDPGIPIPQNIKSWVTQKQMPEFLTKMYVATKNYACSRAIKMKDMFHGFALINDEYTANEQRGSWLGSLSRRKVNSKPEAGR

SEQ ID NO: 14254 - DNA, 3469 bp, DROSOPHILA
tcacgatcggccagggagccaccaaattgccagttgtggcagccatgtgtcaggggtttcgttgcggaccaccaatgcatccccttgcccatgcaactagaaaatccattgacccaatgctgctccaatgatgccaaaaagtgaaccacactatgcactggaaaagatgcggaataggactcctaagctaagaaaatataggaaaacatgagataaactcaaaacttcgaacacatctagaagattcatagtttgaagaagatgccagtttttacggtgtatatcttttgtgggcccactcaccaagctgagatgctgtggatgaccccataaagctctataagacgatatgaaatacagatatgtgaaatatatcgaatatccgaacgcattgtgctacatttaaccttcttattgtctccgccacttaccacattgggcttatgttttggctattggatttcggtgagttgggtttgcaacaaagttgaagtcaatagccgcaggcatttgcataatcccagccactcgaatctatatatcatatgtccaggtgtgggaccaacaagaaaacggaagcctcggccaccaattggctatggtttttggccaacaaatcaaagccaccgccgatttttgatgtgggtctgtgtaccactgatttccacttcctagctattgtctggtaggataacgacccggttaccttgttgtaatatctcgagtgcaggagtcgtgcctccagtggcgtacattcattccctccctaccaccccgctggtggaaaatgaaaccgaaacttgttttcatataacaccgttcccccgactgacttttcattactaagccaaaatccccaacaacaacatcaacagcgggcagcaaaagagttgcgaatgcgccgcaccgtcgacttgcgttgcgagatatagaaagacaagacagtccaatttttcggtgtatataagctgagtgcagcggctcagcgattcagtcccagcttggatctcgttacccgtgcagcacagcgaattgtggagtaattgttcccccgtgagacgtcgaatcagcagctcaacaatgcgaatggtaatggattgtggatagtttgcggaagtgcagaatcccagcgaggatctagtgattcccagtgatcagagtgtgaaccgtgcctatatcttgtacatccattgcagttcgtacttccttgtctcgccgtgtgcgtggcattggcccattgtggcggagccgttgaggataagaaggccgagggcgatggcaagacggtggagaagagaggactccatctgggcgactaccaccactaccagccccaccacgagcacatcaagacggtgaccatcgagaagaagattcccgtcccatacacggtcaccaagcacgtgccctacaccgtcgagaaaaaggtgagtccttaaccatcaaagtcaggcattgatgatgtagttttgaatccaaatattcttagccccgtgccctataacatttatcttgaaactctgtgaaaggagatcactatatgagtccatgtaacataactttcataatctttgaaatagatcccctacgaggtgaaagtggatgtgcctcagccttacattgttgagaagaaggtgcctgtccatgtcaaggagtacgtgaaagtacccgtccatgtgcccaaaccctatgaggtgatcaagaagatcccctatgaggttaaggtgccagtcgacaagccgtatgaggttaaggtgcccgtgccccagccctacgaagtgatcaagaagattccctatgaggtcaaggtaccagtgccccagccctacgaagtgatcaagaaggtgccccatgaggttaaggttgaggtcccggttcccaagccatacgaggtgatcaagaaggtgccctatgaagtcaaatacgaggtggagaagccatacgatgtggaagtgcccaagccctacgatgtggaggtcgagaagccgtacaccgttgtcgtagagaagaaggtgccctatgaggtcaaggttcccgtcgacaagccctacaaggttgaggtgagtgaggatcaattaaaaaacgtataaatcgaaaataaatcaatacaatcttaataaaaccatcataggtttcatgaaattccatcaaatatcacccacaactgtttaaacttaacatttctcgcaattttcaaaccaggtggagaaaccctacccagtccatgtgaaggtgcccgtgccccagccttacaccgtcgagaagaaggttccttataccgtcgagaagcccgtgccctatgaggtcaaggtgcccatcgagaagcccattcccgtctacacggaggtgaaggtgcccatccacaaggagattccagtgccggagaagtaccacgtcgaggtgccaatcttcaagcaccaccaggaggaccatcacgactaccacagccacggccatggacactactagggatcgtccgctgatatcaagagccagacgcacagaaagcgagcacaagaagaaggaggacgaacagggaggagtacgaggagcagcaggcgtgacactgacagccagtccatctgtgtctctcagatgcatccacgcagcaacgttgagctggacgttgaacgggtgacacgagcgggaggaaatgtagccgatgagaggcctaaagaattcgctgagttctttggccaggaggaggatgaggagaagatgatgatgatgaagaagaagaggagccagagcagaagagggagagccagcggggagtagcagtcagaggacaaactaactagctactcccattgagatctggcggaaaccggcgtaaacggtttccgcatcagttttaagccaaatgtgttagtacttttatcatcgtgttagaccctacgatttctatttaaattataagctaaagaaacaccgaccagctggcgtaaattaatgggttttcgggtgcaatgatggggaagtgaaagtgaaaattaaccagcgagccatggccgaatccccatgcgaaagacacgtaacgctcgtggcggaaaatgaaaatgaatgcgaatgaaaaccagttaccacttactgtcagtgcagattgtgtattcttggggccagttcattatgcaaggagcgatccgttgcgtcatcggactgccaaattaattgcaggaagcactcgccaacactcgctgaaatcttggcaacattttcgcaattaaggcgggctgtcataatggcataaaagattgagatggaaaacaaattcatagatagcgaacaaattgatggttacactgctagaaaatttttttttagatttagtagcatactttaaagaaatatgcagttatatcctaataggattagttattaagctccgttttttttttgttctctttaaaagttttagtttttttagatataaataatggcgttctttgtacacatttttctctgtgca

SEQ ID NO: 14255 - DNA, 1067 bp, DROSOPHILA
cttggatctcgttacccgtgcagcacagcgaattgtggagtaattgttcccccgtgagacgtcgaatcagcagctcaacaatgcgaatgttcgtacttccttgtctcgccgtgtgcgtggcattggcccattgtggcggagccgttgaggataagaaggccgagggcgatggcaagacggtggagaagagaggactccatctgggcgactaccaccactaccagccccaccacgagcacatcaagacggtgaccatcgagaagaagattcccgtcccatacacggtcaccaagcacgtgccctacaccgtcgagaaaaagatcccctacgaggtgaaagtggatgtgcctcagccttacattgttgagaagaaggtgcctgtccatgtcaaggagtacgtgaaagtacccgtccatgtgcccaaaccctatgaggtgatcaagaagatcccctatgaggttaaggtgccagtcgacaagccgtatgaggttaaggtgcccgtgccccagccctacgaagtgatcaagaagattccctatgaggtcaaggtaccagtgccccagccctacgaagtgatcaagaaggtgccccatgaggttaaggttgaggtcccggttcccaagccatacgaggtgatcaagaaggtgccctatgaagtcaaatacgaggtggagaagccatacgatgtggaagtgcccaagccctacgatgtggaggtcgagaagccgtacaccgttgtcgtagagaagaaggtgccctatgaggtcaaggttcccgtcgacaagccctacaaggttgaggtggagaaaccctacccagtccatgtgaaggtgcccgtgccccagccttacaccgtcgagaagaaggttccttataccgtcgagaagcccgtgccctatgaggtcaaggtgcccatcgagaagcccattcccgtctacacggaggtgaaggtgcccatccacaaggagattccagtgccggagaagtaccacgtcgaggtgccaatcttcaagcaccaccaggaggaccatcacgactaccacagccacggccatggacactactag

SEQ ID NO: 14256 - protein, 328 aa, DROSOPHILA
MRMFVLPCLAVCVALAHCGGAVEDKKAEGDGKTVEKRGLHLGDYHHYQPHHEHIKTVTIEKKIPVPYTVTKHVPYTVEKKIPYEVKVDVPQPYIVEKKVPVHVKEYVKVPVHVPKPYEVIKKIPYEVKVPVDKPYEVKVPVPQPYEVIKKIPYEVKVPVPQPYEVIKKVPHEVKVEVPVPKPYEVIKKVPYEVKYEVEKPYDVEVPKPYDVEVEKPYTVVVEKKVPYEVKVPVDKPYKVEVEKPYPVHVKVPVPQPYTVEKKVPYTVEKPVPYEVKVPIEKPIPVYTEVKVPIHKEIPVPEKYHVEVPIFKHHQEDHHDYHSHGHGHY

SEQ ID NO: 14257 - DNA, 3462 bp, DROSOPHILA
acaataaaaaatattcagtatatcaaatattttgtttattttatacagcttttttatcacttttcctttggcttcagctcacttagttccgtcgcgctcggccagcagatccagcatcacctcgatcttaagattacacatattgttctcctcctcgagggcacgaaacttcttgttcagccggagcatatcatctacgtcaccctttcgggtcgaatgcatccagatgccgtccgcaaaacgcagctccttgttgcccagcgttagggaaatctggcggaagtcatccagatcctcggtggccaccggatgtcctatattgcaacgtccctgacgcactggaatcggcttcgactcgaacttcttgttgaagagcggcattgcaaacaactgaaacggaaagttgaccacatttcgattacatccccatttgtttgccactgccccgttgcccaggacaacagacacttgtcaggggatcagcgttcgcggcaggactcgtgccaggtttttaatggctagtaagaccgtatccatatgtacctgcttgaagggtagcggctggctgtcagagattgacgaggggcagcaaaaggttgccagttgcataaaatcggtgaaatacagagaactccttgctgcacgcggggatacggatggatttctaagccaaactgccttcaacaggattttaaatgcctgataatttaaaagacaaagcttgcttcatcgcagaaactcgtctcatgtcaaacataaacattttgtttggttcattgatgaaattctatacaaacacacaataaacccgatacacaactctgctgtgaaaaataatatgattccaaacacacaacaaatatgacacaacacgaaaatcagcaagccattctcaggtaggagagcaaaggaaaatttgtcaactaaagttagtcaacgcgcagccaattcaccatttagcaactttgtgctggaaatgtgtgaaggagtggatcgactgatgcgggatcaggccgaactgaaggttcacctcaacgaaattctaaatgagaaccgccggctggacatcgaattggccaaatgcaggagcatcttggttagcggcgattaccaggagctcaagcatcgccttcaactcagcaacaaggctttggacgcgtccaagaagcaggtggatgagcttatcaaggaacggaacagcctgaaaaccatgcatgacctctccaaacagaccatcgaaaccatggagatggatcttaagaattatcgcgtccaattgaaaatgtctggagatgaccaggtattattgcacttcatcattccaatcccgtattgattatcatattatagtaagctttgaccaaatcgtatgttttagggaccagagactaatggaaaaatcctaaagtaaacttcaacgttttcggaattcaattttaggtcatacagcggtactcgaagatcgtcaaagtgctggaggcaaaagttgaggaccagcagaaggagatacgcacgcaggcggagaccataaaggccctgcacgatcacaagcagcacagcggattgcaactccagcagctgcatgctcaactgcaggatagcgagcagagtcaatccaaggtgtccatcctgcagaagcagcttaaggagtacgaactatcgctgagccacacccacaatttgctcatggagagcacaagacgggaaaccgccgccatgcgcaagctcgaggaggctatcatactcagcgaagaggcaaacaaggagaaaatagatgccacaaagctggccgagacctacaaggaggagatgacccacctagcctccaatatcggtaccataatggatgaggcctccacacgcgtcgacgttgaagtgggccatctgaagaatatgctcaagcaaaaggacattataattaccaccataaaggagaaggtaaaagtctatattcgtataataattatcacttatagttacacttacaaattttagctgaaaaaactggctgtcgatcataagtcggtggtgcacatgctggagacccggagcaatcgcctggagcaaaagtacaaggaggtgctgaagcagaacgataagctggaggccgagttggaggcaacttgccggcgacttggcgaactggagcgatccgttactgaagcttacggtggggatgccgaagatgccaggatgtgagtatacaacatagacaattaatgacaaacatgattataaatcataacgcttttagaaaaatgtactataagtctcaaatggatcgctgcataatggatcacaagaaaatgaaggagaaataccgcgagggcatggaggacatcacgcaacgcttcgaatcggaaatttacaagttaagggaggagaactccgtgctgctggcggaaaacgaactgcttaagagcggtgccgcaggcgatagctccaagcagacttcacgctgattttacggttgtacaaatatatattttatgataactctcgtacataataaattagttctacgagatcacactatgtggcggccgttgtctgtgcgtttcgaccgggaaacaaactgggaaaccaataggctggctcatcgcccgcctgcttgtcaatccaacagagaccttcgccgagcaccttgtccagtgactgttgagcacgatagtcggtccagctgagaacggataacacggaaatcaaagggatattcagttgaaagtacaagtgaaattcttaccccaaatccttgatcagctgactctgcgtaacacagccttgttcggtattggatgcggcattcagtatgttggtctcctccatgctcagctctccgggaatggactgaactatgtacttgcccttgcccagcttgtgaaccacaaagctgaaggtacgttatggaaaacgagaaacttgtgatattgaatgcaagcagaggtaatgacccatacccgttgccaaaaatgctcaatttcttagcggccattaggatgtcctccttggtgatctcctggtgcactgaactctgacctctggcggcgattagccgacgtcgcagatcgtccagctccataagtccaccggttttgtgattggcagctagacaaacctccaccacctggacgcccagttcgtagtagaaatcgcccattcccagaacgctccagaatcctttaccggtggccagcggatccacgccgatggcggcgcacatttcctgaaactgtttgcggaactgcgaattcttgcgtatgtcctccttgtgtttcatcgcaaattcctcgagtttcacccggaatacctccatttgcttggtcatctgttcgagttggttttcctgcagatcggtgcccttgtccttgtacttctccgcagccagcttctgctgctgtatggctcccaggcctacacgtcgtcgcatagctgttccttaagtttatatttgttagtaaacaa

SEQ ID NO: 14258 - DNA, 1206 bp, DROSOPHILA
atgcgggatcaggccgaactgaaggttcacctcaacgaaattctaaatgagaaccgccggctggacatcgaattggccaaatgcaggagcatcttggttagcggcgattaccaggagctcaagcatcgccttcaactcagcaacaaggctttggacgcgtccaagaagcaggtggatgagcttatcaaggaacggaacagcctgaaaaccatgcatgacctctccaaacagaccatcgaaaccatggagatggatcttaagaattatcgcgtccaattgaaaatgtctggagatgaccaggtcatacagcggtactcgaagatcgtcaaagtgctggaggcaaaagttgaggaccagcagaaggagatacgcacgcaggcggagaccataaaggccctgcacgatcacaagcagcacagcggattgcaactccagcagctgcatgctcaactgcaggatagcgagcagagtcaatccaaggtgtccatcctgcagaagcagcttaaggagtacgaactatcgctgagccacacccacaatttgctcatggagagcacaagacgggaaaccgccgccatgcgcaagctcgaggaggctatcatactcagcgaagaggcaaacaaggagaaaatagatgccacaaagctggccgagacctacaaggaggagatgacccacctagcctccaatatcggtaccataatggatgaggcctccacacgcgtcgacgttgaagtgggccatctgaagaatatgctcaagcaaaaggacattataattaccaccataaaggagaagctgaaaaaactggctgtcgatcataagtcggtggtgcacatgctggagacccggagcaatcgcctggagcaaaagtacaaggaggtgctgaagcagaacgataagctggaggccgagttggaggcaacttgccggcgacttggcgaactggagcgatccgttactgaagcttacggtggggatgccgaagatgccaggataaaaatgtactataagtctcaaatggatcgctgcataatggatcacaagaaaatgaaggagaaataccgcgagggcatggaggacatcacgcaacgcttcgaatcggaaatttacaagttaagggaggagaactccgtgctgctggcggaaaacgaactgcttaagagcggtgccgcaggcgatagctccaagcagacttcacgctga

SEQ ID NO: 14259 - protein, 401 aa, DROSOPHILA
MRDQAELKVHLNEILNENRRLDIELAKCRSILVSGDYQELKHRLQLSNKALDASKKQVDELIKERNSLKTMHDLSKQTIETMEMDLKNYRVQLKMSGDDQVIQRYSKIVKVLEAKVEDQQKEIRTQAETIKALHDHKQHSGLQLQQLHAQLQDSEQSQSKVSILQKQLKEYELSLSHTHNLLMESTRRETAAMRKLEEAIILSEEANKEKIDATKLAETYKEEMTHLASNIGTIMDEASTRVDVEVGHLKNMLKQKDIIITTIKEKLKKLAVDHKSVVHMLETRSNRLEQKYKEVLKQNDKLEAELEATCRRLGELERSVTEAYGGDAEDARIKMYYKSQMDRCIMDHKKMKEKYREGMEDITQRFESEIYKLREENSVLLAENELLKSGAAGDSSKQTSR

SEQ ID NO: 14260 - DNA, 3479 bp, DROSOPHILA
gctgtcataatggcataaaagattgagatggaaaacaaattcatagatagcgaacaaattgatggttacactgctagaaaatttttttttagatttagtagcatactttaaagaaatatgcagttatatcctaataggattagttattaagctccgttttttttttgttctctttaaaagttttagtttttttagatataaataatggcgttctttgtacacatttttctctgtgcacattaaacggctctatttgcaattgaactgcaatagtaacagtcacgaaaggcagtcaaaaacaaagaaaaacggcacttcaagtgcgcaatggcctcatttttgggggcagtaaatgtagcgcgtagccaaattgctctgcatttcgaaatatcagacattgcaattatctatcgagtattcactaaatgtagttaattttgtaagctttggctttcgagctttcaaaattggcgcgtacttttaacagtaactgttagcagtgtactgttaagtctgcatgcgatctggcagctcagttatagaattatttttggccaaaccagagtaactcatttcgctcttggattgaagatgtttttaaggccgctttaatggcgttgacaattacaaaatttcgaacttcgagggggatggtggtggccgtacagcccacagtggtgttgagccccaaaataccagattcccaggataacgaaaaggtaatcaaaaatctgtcaaatgtataaactctcatcctatttgttacaattcggcgttgccaaatcgtgaaaaggtgctattgaccagctgttttgtgaaatacgtgatacgtacgggctgagcacaatttgtttaaaatttaaatcatgataaagtaggtaattatatttacttatttgcacagaaaccgttttcaaaatcggagccgggaaatgcaactgtgagagttaatgcaggtggtatagttcttaacaaaataccagcgattataaggccaagtatgaagagagcagcaacaacaaagatgactggagccacggctgcgggagcaacaacaacaacatcgtcaacaggtgcagtgggatgtgagtaacaaccaatcgaacactaatatgaaatataaacaaatggtttttaaatattgttcttatactttagatcccgttctcaaaacacccaagtatgtggttcagactagtccgagtggatcctctggccatcagctccagatgctggcgaggaaggacactcaaagtctgggagtggccatcaattcactgccgcccaacacaatcatcaaagcaaccacaagaccttcacaaacagcgcctttgacaccaaactcagcggctgtcacgccaagcacgccgagcagtagcaggaattccactcagtccacaccaactgtggtacctgatgcgagagtttcctccgccgtgcgccaagctgtgttcatcaagagggagctaccccagccgcagaggagcatgcgaaatatgacacttggtttggtggaacaggcgccactgcttcatttgggtgttgcgccacagcacctgtcactgctgaaacgccatatctgccgcaatgctaatgtcacccacttggactgttgcttgactctaaggaaactcaaacaaaacgagcacttcgccctgttggccgagcactttgagctgagcgaatcagatgtcgaggacacatttaagcgcacccttatcaagctggcccgttacctccgtccactgattcgttggccagatgcacggcatcacaacgagcgcttcaaacataccccactgaactaccgagccaacctgttgcatgtacgctcgttgatcgagtgtgtggaaacggacgtgccgatagatctgggattgggcagcggcagctataagttcatattgtgcatcaatacaaatggtagtttttagcgtaaacagcgtactttcattaacacttccctcgcttttcaggcatcatcagctatgtgtctagcgcctttcctggtagttgcgatgatcttcaattgtttgaggccagcagatttcgggatgtcattcccaattacctaacactatgcgcggaaccaggcaaagcagtacgccgtgctcgcaggtcgggcttcggagatcctcacgactcagcggatgaggatgaggcggcggcggaaccaaagcgatcacttaccaaattcgaggcacagcgtttgagtggccagctagcaagccagcaatccctatccgttgtagacggagcactgacttccaagcgggctccagcgattcaactacccacattcaacgcacaagaacccgcctgtagagcccaaatgagagatatgatagattatttaagggaattccgcatgctggataattcggctattaagcaaaagtcattgctgggttatcttgatgaaatgatcgtggtggctgcgggtctatgcaaccttaagcgccaagagttggaatcttaaataagaagtgccatccgcgaaggtctgtttaaaggccaaccagatgttattgtcctagttattttaagaatttaatttaatgtattgttaatgcaatgtagaaactgactattaacaagtacgattaaaagggtatattttaaagtatttcaaagaataaacactacgtggtcattcaagaggtttttgcttttatctggaaacatactcaagtgccttattttcgaaaacattattagtttctcgatttccacagtcgtacttgtcctcttgtttgttcagcttccccatagttaaacacttgcagttgtatttcttttatatttttgctttatttactttacaaaaatacaagcaaaactaagtacatattcaatgaaagttgttcaatgaaccagggcaacattgccaatcggagtttgcaatatttgaatttgaagaatacgcgtatgtcgtacaatgtatagatattccaagggtaggtgctccatcatatccgtttactctaccatcgttggtcgctctttctcttagggggtaataattaaaaacttgcttagttaataagtgactcttcgtactaatagctaaacatattgtatattgtgtggtgtggtgtatgcctgacaaaaccagctctagctcctcatcctgacattataacaagtagttggttgggctacccttttcgtctcagagcttctgaatgatgtcgaacttcttcttgaggtccacactctcgttcttgggatcgtacttcttcttggatgccaatttggcgcgcatttcggcggccgtcattggtaaatgcaaggtgcccgccttatagccactggtcggtgggggtggtgtagtgggtgtggtcatgccatttgtaccatttccattggtgttataaacactgccattgttgttgatgccagccttagtagcggacggcggtggcggtgtgctcatcaaagtgttattattaatcggcgatgagggtttacttccattt

SEQ ID NO: 14261 - DNA, 1353 bp, DROSOPHILA
atgaagagagcagcaacaacaaagatgactggagccacggctgcgggagcaacaacaacaacatcgtcaacaggtgcagtgggatatcccgttctcaaaacacccaagtatgtggttcagactagtccgagtggatcctctggccatcagctccagatgctggcgaggaaggacactcaaagtctgggagtggccatcaattcactgccgcccaacacaatcatcaaagcaaccacaagaccttcacaaacagcgcctttgacaccaaactcagcggctgtcacgccaagcacgccgagcagtagcaggaattccactcagtccacaccaactgtggtacctgatgcgagagtttcctccgccgtgcgccaagctgtgttcatcaagagggagctaccccagccgcagaggagcatgcgaaatatgacacttggtttggtggaacaggcgccactgcttcatttgggtgttgcgccacagcacctgtcactgctgaaacgccatatctgccgcaatgctaatgtcacccacttggactgttgcttgactctaaggaaactcaaacaaaacgagcacttcgccctgttggccgagcactttgagctgagcgaatcagatgtcgaggacacatttaagcgcacccttatcaagctggcccgttacctccgtccactgattcgttggccagatgcacggcatcacaacgagcgcttcaaacataccccactgaactaccgagccaacctgttgcatgtacgctcgttgatcgagtgtgtggaaacggacgtgccgatagatctgggattgggcagcggcagctataagttcatattgtgcatcaatacaaatggcatcatcagctatgtgtctagcgcctttcctggtagttgcgatgatcttcaattgtttgaggccagcagatttcgggatgtcattcccaattacctaacactatgcgcggaaccaggcaaagcagtacgccgtgctcgcaggtcgggcttcggagatcctcacgactcagcggatgaggatgaggcggcggcggaaccaaagcgatcacttaccaaattcgaggcacagcgtttgagtggccagctagcaagccagcaatccctatccgttgtagacggagcactgacttccaagcgggctccagcgattcaactacccacattcaacgcacaagaacccgcctgtagagcccaaatgagagatatgatagattatttaagggaattccgcatgctggataattcggctattaagcaaaagtcattgctgggttatcttgatgaaatgatcgtggtggctgcgggtctatgcaaccttaagcgccaagagttggaatcttaa

SEQ ID NO: 14262 - protein, 450 aa, DROSOPHILA
MKRAATTKMTGATAAGATTTTSSTGAVGYPVLKTPKYVVQTSPSGSSGHQLQMLARKDTQSLGVAINSLPPNTIIKATTRPSQTAPLTPNSAAVTPSTPSSSRNSTQSTPTVVPDARVSSAVRQAVFIKRELPQPQRSMRNMTLGLVEQAPLLHLGVAPQHLSLLKRHICRNANVTHLDCCLTLRKLKQNEHFALLAEHFELSESDVEDTFKRTLIKLARYLRPLIRWPDARHHNERFKHTPLNYRANLLHVRSLIECVETDVPIDLGLGSGSYKFILCINTNGIISYVSSAFPGSCDDLQLFEASRFRDVIPNYLTLCAEPGKAVRRARRSGFGDPHDSADEDEAAAEPKRSLTKFEAQRLSGQLASQQSLSVVDGALTSKRAPAIQLPTFNAQEPACRAQMRDMIDYLREFRMLDNSAIKQKSLLGYLDEMIVVAAGLCNLKRQELES

SEQ ID NO: 14263 - DNA, 4969 bp, DROSOPHILA
ggcgccggccatcaaggcctttctggagcacggcatgaaacggcccacgtttctgggtggaccaatacacccctggctgtatattgaggaggctgccacccgggaggtggagaaggattttgagtcggtgtacagccgtcttgtgctctgcaaaacgtatcgactggatgaggatggcaaggtactaacgcccgaggagctactctatcgctgcgttcaggccatcaatcagacgcacgatgatgcgcacgcacaaatggatgttaagttacgctcgctgatctgtttgggcctcaacgaacaggttcttcacctctggttggaggtgctgtgcgcctgccaggaggtcgtacagaagtggtatcattcctggagctttattgactcacccggttgggtgcagatcaagtgcgagctgcgcattctctcgcagttcgccttcaatctgaaccccgactgggaactgccgccgaagcgcggcaaggagtcgcaaccgctcaaggacggagtaagggacatgctggtgaagcaccatctcttctcatgggatctgtgaggcttgctgccgccttgtaaggagctccacaatcgttggcaatcaactgcgtatccaatatctcattgcccccttctctgttctttcatttctaagtgcaatcgcaattctttgaatcgaagctatcgcttttttaagtacttctttgttgtcgtacacctaacttaagtgctttaccataacgatctgtagctgtaactatacctttaaaacgccctatgtatagctcgagccgtttgtttacttaatgtccatccattattataaatcctagaccacaccaatctactaaattacaaatgtaacgtacctttaattgaaatcaaatcttataaagtacagacatatttattactatatacacatagatgtttaactgtctaaatgcatttcattaaagtttaatatatatatatatataaattgtacgcaaaacgattgaatttagttggacaccaatcccaagtagtcgtccatcaaagtgccaattgcaaactagaaatattagagtattaacttgcgaaaagtacttatatttatggagcgtcttacaattccagtggcatctactcgtgtgcccacaatcttcagccgaatcttatcctctccggagataaccacatcctcatctttactcttatagcagggcggattcccattcgggcagaactgcatgtcggcgggaatagactaaaaaagaatcgcccgttaaaaagtgttaccttagatccctcagacttaacatacatgatgcgaaatgaagcaggacagcgggccgatctctgcaaacatgcccactttgttgatctgcttgaccactgcgtccagaacttcgcccttaaatggccgaaagacgatagctttgtacttgaccggatacaccacaaatccctggcccggctggatgacacccgatccgatttgatctatcgtcgtcaccgctatcacgaatccgtactttcccgtgcaggtgccctccacttcggagtagagtttctgcttcacggtctccagcagttgcgggccaaagtaacgtggatgaagcagaatctcttgctccagcgatatctacggcgcaaggggttggcatttatttttgctctattcggagaatgaaatactcacgtggtaaaacattgttaattaaatttaaggtaaaaaactaaagtaaacagccggaacccaaaagatgctgccgcaagtgtgaccagattcggaaatgtaaaaaaaacagaagcgcgtaatttaccgccaataattataacgatctgtttagaaagaaaaataaaataattaattaattaaatacgataatttatggaggtgttcgattttcaagtcattcaacatttcttatatgatcaacatgaactacagcccgttcattaaatatggttaaaatataaactcaacattccttttacaacaattactttgcatatttattgataatttacctactgaaacacaacactatctaatcgtccttcaagcccagggcaaagtcttgggcttccccgccattcctgaaaatccgcacatacgcggacttcgggccaaacttccaaatggcgacgtagggcaagtaataggtgaatatgtccaccagccagacgcggaagttcaagtaccatcgcaccagggcatacctgtgcagatatgtgacgaggaacaggccgtagctgactatgaatcggtcccaccatcccatgtcgtagtagtgcagcttctgctggggatcctgcgccactccgttctcatgatcgaaactgtagtactcgtatcccttaacgcaggccaatcgcttggcaaagaatatgttggcattcaccgacagcatggtgtttatgtgccacaagccattaatcagggcctcggtcattcgtttgaaatcctccccagtgtttgccagagctggttcgtataccttacgcatcacaatgtccaggcggagctttgactccgcccagttcctaccgcagatgttgtactcatccttgatgcccagcagatagccgagaacgcgccacatatgcgtagtggcctccaggaagtcctgatctttcagctttatgcgatgtgcgcccatcgttatgaagccaatgaaaccgaactgcgtgagcgccaaatccttctgggtgatctgtccagctccttggcgggcgcacgcatgactggagcggctgtgggcccgcctcacggccgcaatgctggtccagaacctgctgccacggtccgcgatgttgtggttataccaggcttgcgtgtggaatatagtacgcacatagcgacggtaggcggtgaacgctgtcgaggattggcgtgtgcacgacagcacccggagaatggatggaatagccagcacggcaataagaccagccagcattccggcgttcattacaaagcgatacgtgctaaagtagctctgaccactgcaaggaaaaggaataaagaatcaattaagtaattcgaatgcagttatattatttaaattaaaatatacatatacatacatgtacatatacatatatattgttaaaagtaaatgtatgtcgccttttgttattaatatgtaagcccgtaggtacaaaattggaataatgagcacagataaagataagtattatatgctgccttttcgcattattattcacatagcaaactgctacataactccaagcttataaataacccatgtgtatatggatattgtaattatcacaattatttctactgtggttactgggctaatatgcaatcagtgaacaattagtcacgcaacttaccgcctgaatagctgctcatcgtaccacgaaggtagctccaaatcagcaccgctgtcgccctcctgactgccctccttcattaggtgctccaagtagtcctcgggctcctggtgatcctgaagcagttttgaagcccccgctgcattatgaccatctttggaatgcgatgacgactgcattttcccactgatccctggaaagtgacgtgcgatgtagaaaacgagcttgaggtccaaattcggattacacaagtgaaagaaagaaaagacaaacaaaatcgtcggcgcgccaagagagaaagtttttcattcaacccgccaacaagtccactgtgcacttacacgtttcacgcttcgcgggatgggggatctcggatgagctgctggtacaaccatcaacctgcatgtcggccaaattattgcttgttaaactatttagcaaactcaatagttcagctcgttacgtgcaaaaacattttgcatacacaattggaaaaaaagcgttgaggatgaatcacggctgcccaccgtcgttgcggttggggaacttaactgcaactggcacgttaggctcgtcaaataagaatggaaagccggtcattggcgcgtaaactggtttcgaatcattcgcactgataacgaattaagtagtaaactttgtttatgcactttagtgtgcccgcaactgcaaccgttaaaatataccttttaaaaccccaaatatatcgatgtaaaccacaaaatactaaaatcatgacgcaggaacgtaacaagtataaaaataccgcgcagtgtcatctccataactctgttatcgttatcgtaatcgaatatggcagtcgtctcgacaatctttagcattgcatctctatcatcgacgacgcgcttgcaaaaaaacgaaggaaattagccaatttctattttgccctgacgttacgccgtttaaagtgtaagttcccggccaggattcgactcaatccctgccacaacgactttcggtcaagtgttcgttgcgagagctttaactacgtagcgaactttcgtagtttttctgcacacgttttgccgcttcggcttttgttttggcgcccgattttttcggctgccgacttttgacgcagactgagaaattgcgtgcctaaaagcctcgaaatggtggatcgcagcgataatggtaagtccggttagaagttaatcgccgcaatgtgtaaccatcgacctttagcagcggaatccttcgacgacgccgtcgaggagcgcgtgatcaatgaggagtataagatttggaaaaagaacacgccgttcctgtacgatctggtcatgacgcatgccctggaatggccctcgttgactgcccagtggctgccggacgtgaccaagcaggatggcaaggactactcggtacatcgtcttatactgggcacacacacatctgacgagcagaaccatctactcatcgccagcgttcagttgcccagcgaggatgcccagttcgatggttcgcactacgataacgagaagggcgagtttggaggctttggatcggtgtgcggcaaaatcgaaatcgagattaagatcaaccacgagggcgaagtgaacagggcccgctacatgccccagaacgcctg

SEQ ID NO: 14264 - DNA, 1881 bp, DROSOPHILA
aatgattcgaaaccagtttacgcgccaatgaccggctttccattcttatttgacgagcctaacgtgccagttgcagttaagttccccaaccgcaacgacggtgggcagccgtgattcatcctcaacgctttttttccaattgtgtatgcaaaatgtttttgcacgtaacgagctgaactattgagtttgctaaatagtttaacaagcaataatttggccgacatgcaggttgatggttgtaccagcagctcatccgagatcccccatcccgcgaagcgtgaaacgtggatcagtgggaaaatgcagtcgtcatcgcattccaaagatggtcataatgcagcgggggcttcaaaactgcttcaggatcaccaggagcccgaggactacttggagcacctaatgaaggagggcagtcaggagggcgacagcggtgctgatttggagctaccttcgtggtacgatgagcagctattcaggcgtggtcagagctactttagcacgtatcgctttgtaatgaacgccggaatgctggctggtcttattgccgtgctggctattccatccattctccgggtgctgtcgtgcacacgccaatcctcgacagcgttcaccgcctaccgtcgctatgtgcgtactatattccacacgcaagcctggtataaccacaacatcgcggaccgtggcagcaggttctggaccagcattgcggccgtgaggcgggcccacagccgctccagtcatgcgtgcgcccgccaaggagctggacagatcacccagaaggatttggcgctcacgcagttcggtttcattggcttcataacgatgggcgcacatcgcataaagctgaaagatcaggacttcctggaggccactacgcatatgtggcgcgttctcggctatctgctgggcatcaaggatgagtacaacatctgcggtaggaactgggcggagtcaaagctccgcctggacattgtgatgcgtaaggtatacgaaccagctctggcaaacactggggaggatttcaaacgaatgaccgaggccctgattaatggcttgtggcacataaacaccatgctgtcggtgaatgccaacatattctttgccaagcgattggcctgcgttaagggatacgagtactacagtttcgatcatgagaacggagtggcgcaggatccccagcagaagctgcactactacgacatgggatggtgggaccgattcatagtcagctacggcctgttcctcgtcacatatctgcacaggtatgccctggtgcgatggtacttgaacttccgcgtctggctggtggacatattcacctattacttgccctacgtcgccatttggaagtttggcccgaagtccgcgtatatatcgctggagcaagagattctgcttcatccacgttactttggcccgcaactgctggagaccgtgaagcagaaactctactccgaagtggagggcacctgcacgggaaagtacggattcgtgatagcggtgacgacgatagatcaaatcggatcgggtgtcatccagccgggccagggatttgtggtgtatccggtcaagtacaaagctatcgtctttcggccatttaagggcgaagttctggacgcagtggtcaagcagatcaacaaagtgggcatgtttgcagagatcggcccgctgtcctgcttcatttcgcatcattctattcccgccgacatgcagttctgcccgaatgggaatccgccctgctataagagtaaagatgaggatgtggttatctccggagaggataagattcggctgaagattgtgggcacacgagtagatgccactggaatttttgcaattggcactttgatggacgactacttgggattggtgtccaactaa

SEQ ID NO: 14265 - protein, 552 aa, DROSOPHILA
MQVDGCTSSSSEIPHPAKRETWISGKMQSSSHSKDGHNAAGASKLLQDHQEPEDYLEHLMKEGSQEGDSGADLELPSWYDEQLFRRGQSYFSTYRFVMNAGMLAGLIAVLAIPSILRVLSCTRQSSTAFTAYRRYVRTIFHTQAWYNHNIADRGSRFWTSIAAVRRAHSRSSHACARQGAGQITQKDLALTQFGFIGFITMGAHRIKLKDQDFLEATTHMWRVLGYLLGIKDEYNICGRNWAESKLRLDIVMRKVYEPALANTGEDFKRMTEALINGLWHINTMLSVNANIFFAKRLACVKGYEYYSFDHENGVAQDPQQKLHYYDMGWWDRFIVSYGLFLVTYLHRYALVRWYLNFRVWLVDIFTYYLPYVAIWKFGPKSAYISLEQEILLHPRYFGPQLLETVKQKLYSEVEGTCTGKYGFVIAVTTIDQIGSGVIQPGQGFVVYPVKYKAIVFRPFKGEVLDAVVKQINKVGMFAEIGPLSCFISHHSIPADMQFCPNGNPPCYKSKDEDVVISGEDKIRLKIVGTRVDATGIFAIGTLMDDYLGLVSN

SEQ ID NO: 14266 - DNA, 2769 bp, DROSOPHILA
caggtgcatgtccacgatcttgcagcgctcggtgctgtcgcggtaaaagtggcaaacaatgttgggcgactttttcgacatctcgaagaactctttttcgtcggccagctcggtgtaggtgccatgaccctggaaaagattagcaattttggggattaatgagattgttgcgctaacaaggttttctttgaaagttaatttttacatatatatttaagttttgagctatttaagctggtagcccaatttgaaaactaatttgaattaatcgaagcaagtgtcgcgaatgtcttaaaagtcgcatgttgaataccatttggtcatataccacttagagaacaatctcgaagtatcttcaataattgagtgttgtaagagatgatcacctacgtttctgagccactcctgcttcttgttgttcaggtccttcatttcgcggagccgctgctcccgcaggacctttaggtcatccgaatcgaggttgtccaggcggtcgagctgctggtccagctgctgctcgatggtcttggcggccgtgaacagttggttctccaggatgttggccatgttgtcctcttccagttgctgctcctctgcgtgtcttgatgtttctccgttatttgcactctgcgtgtggtgtgttcgtgttggcgtcaatggttgcgcgtgtgtgcgtgtggatccggcacaaatggaaaggcgtagtcatggagccgcagatgcgtcatgttttgtggaaaattcagttaagtaaggcatgttttggggaaagcgcagcgcatttcgatggaggcgcccacaaatcgattatttagacggtactcaccttttattttcacttatttcattgattttactccttaaaagtttatttagacgtatggattcgtgtgaccgtttgactttacattggaaaatacaaaaggctccttaatgttcaaaataccatgacagtattatttcccgtcagctgtttctttacgaacccctggccacactgccgccctttgatggttattccgatagtgcaatatatttagttgatcaaaggtgaattaaagatgaagccagccttgacaacggtcaatgccactggcaaacacacagcctccgtgatattcttccacggatccggcgacaccggccccaatgttctggaatgggtgcgcttccttatcggccggaatctggagtacccgcacataaagataatatatcccacggctcccaaacagaagtacaccccgctggacggggaactatccaacgtgtggtttgaccgcaagtccgtgaacattgccgcatcggaaagcaagaagagcatgtcccagtgttatgatgcggtcaatcagctgatcgacgaggaggtggccagcggcataccgctgaacaggatcgttgtgggcggattctcgatgggcggagccttggctctgcacacgggctaccatttgagacgcagcttggccggcgtattcgcacattcctcgttcctgaaccgcggctccgttgtctatgattccctggccaacggcaaagacgaatcttttcccgagctgcgaatgtatcacggggaacgcgatactctggtacctaaggactggggtctggaaaccttcgagaacctaacgaaactgggtgtcaagggcacatttcatccattgaggaacacactgcacgaactgaaaactgcctccatcacggatctgcagcaatggatttatgaaaaactacctccgctggaaaaccaagtacagaacaaactctgagtggcaagtacttacatatacttaggtaaactttaatagtaatttatttattcttctatttcagtatttggcatgaaacccgtgcattttgaagcaccacagaggcaagtctttccacctgtcatctttttatactgcccttctccgccataatgaaagcataactcctccttggccgcaatatcccttgctgcgaaaatacctaaaaaattacacatgacgagagaagtcggatcagaattagcaataaaacttgcctatttttggtatgggacagtctattcgtacagctgctatatgacagttcggttcgcagctgtggttcaggtagcgtccgatgtttccacgtcttgatggatcaacgatggtcacctgttgcttcttgtcgctagtgtattcattaagcaccaggatatagttcatcaggcctagtttttcattatcatgcaagcggcttcttgcctcgggaaccgttaaaagttctccggcatattcgcaaatgtatcctccttttgtaattttcgctgtagtccgtagtcctttggatccgtacacgggcgaatcgaatatttccaaatgtttcctcgggcctgagtacacaagccgattggagcacgtgtttctacagcatttgcacatgtcattgcactcaatgacaggatttgcggaattccgaagaattaattcgctgccatcttctgtgaactcatattggcctccatgtgcacagacttcgctgttttcgcaggctcctttgcagtgacaggggttcaaaagaacagaattgtactcgtccgccaagaatttgaattctttacttccatcgctgggcatcaacacagattccaatatgtaatcgagtccatctgggtgctcatagtcgtcattcggagctgtttcagattcgtccatttttaaagtttgtttacattacattctagtacgagaattgattccccatttaatggatgttgcgctttctgaagaatattacacttta

SEQ ID NO: 14267 - DNA, 769 bp, DROSOPHILA
ccgccctttgatggttattccgatagtgcaatatatttagttgatcaaaggtgaattaaagatgaagccagccttgacaacggtcaatgccactggcaaacacacagcctccgtgatattcttccacggatccggcgacaccggccccaatgttctggaatgggtgcgcttccttatcggccggaatctggagtacccgcacataaagataatatatcccacggctcccaaacagaagtacaccccgctggacggggaactatccaacgtgtggtttgaccgcaagtccgtgaacattgccgcatcggaaagcaagaagagcatgtcccagtgttatgatgcggtcaatcagctgatcgacgaggaggtggccagcggcataccgctgaacaggatcgttgtgggcggattctcgatgggcggagccttggctctgcacacgggctaccatttgagacgcagcttggccggcgtattcgcacattcctcgttcctgaaccgcggctccgttgtctatgattccctggccaacggcaaagacgaatcttttcccgagctgcgaatgtatcacggggaacgcgatactctggtacctaaggactggggtctggaaaccttcgagaacctaacgaaactgggtgtcaagggcacatttcatccattgaggaacacactgcacgaactgaaaactgcctccatcacggatctgcagcaatggatttatgaaaaactacctccgctggaaaaccaagtacagaacaaactctga

SEQ ID NO: 14268 - protein, 235 aa, DROSOPHILA
MKPALTTVNATGKHTASVIFFHGSGDTGPNVLEWVRFLIGRNLEYPHIKIIYPTAPKQKYTPLDGELSNVWFDRKSVNIAASESKKSMSQCYDAVNQLIDEEVASGIPLNRIVVGGFSMGGALALHTGYHLRRSLAGVFAHSSFLNRGSVVYDSLANGKDESFPELRMYHGERDTLVPKDWGLETFENLTKLGVKGTFHPLRNTLHELKTASITDLQQWIYEKLPPLENQVQNKL

SEQ ID NO: 14269 - DNA, 4190 bp, DROSOPHILA
aactgatgtggacctggtccgctccagagcacggttttgttcctacacaaatgctagaaagcaaaaaaaaaaaaaaatatataaaaacacaagagaaaatcgaatggtggtaatgggaggccatttccattctggcctcccatcgcgagctatcgatttagcgataagttagtagttatccgcccgtgggaggagcacatccggataccggctagagccgggctggacaaggagcagagcagccggaagctgtgaccaacgcacagaggactgcaaccaattctattctttcacccccaagaagctgtgttcaactaattgtaattaaatcctagttaatacgccctagttaggttcgattatacagctaatgtcaatgtttttatagttattaagttatattattactaccgctaatgctaagataccgctatgtctacagccagcaggccgattaagtttagttagctaacgttcttgtttatccgtagtattagtgctagcttaatgtccaaacaacaaacaacaaaacaaactgtggtttagtcttacaagcacacatcaaaataggcaaacgattcgaaaataaagaaaaatttgtggaaaaaaccttgaaaatgaactgggctatatttatttcataatgttttttaatatagctcgcaaattgttatttttgcctttgaaattttactaagccaaaccactcactactaaaatcatataaaactttctagaaattcttactctcatttgacatttttcttattcattcaaccattttaaaatcttatactaacattcggcactataattaaactttacatatagaatgtattttaattatttattaaatatgcaaatggaaatgccttcaaaaagtgatttgcccattaaaaaaaacgcattaaatagaccaccattcactaaaaagtataatgtaattgtaagggatacaaaaaaaaatcggatacaataagatgcactcaggatgcacaacctaatcctgcaccacagctccgtcgggtgcatggcgcatctccaccgccggcagcttggtgaatcgcagcatgtgcggagtgggggtcagggtgatgccgctctcacccgccatgtccacctcagtgcccgagggcagttccaagtggaagcgcctgaggatgcgacccgtaaagagcgtgagtatcatgcgagccatctcttcgccgggacacattcgatagccggacgagaatgggatgaactgtggcggcgcctggtaggctccatcggcggtcaagaagcgctccggacggaactcctccggttccgggaaggccactgggtccatgtggatagcccactccgagcaaacgatcatcgaaccacccttgataaaataatcgcccacgacgaagttctctttgcatccgtgcggaatgcccagtgggacaacgctgcgtatgcgcatcgtctcggaaatgcaagcccttaggtaggccagcggctccagttcctccaaagtgggagacggacccagcggcaggaggagctcatgcaggcgccgctggcagcgttgttcgcgggccaagtagagcaggaaccagcgcagggtggccagcgaggtgtccaccccggctccaaagagatcggccagcagatggcgcagctggtcgtcgcagtagagctgcgaatccgtgtctcgaacggctaggaagtgctccaggatgcactccggctcgtacgtgtcctcctcatcgctctcctcgtcatcctcgtctgcctcactctgctcctggcttggatccgcttcctttgactgcctgagctgctccttctctagctgcctttgcagccgcttctgctcctggagctccttgaacaccttctgcttctccttcagccgctggccacaggcctccacaatgcggtcgtagatggcgtgcgtcttggccttgccctccagcaggaagcggatgttgcgcacgttggcgggcaggtgacgcagccagggcaaaaagttgaccaccccggagacgccaatcagcttgacgccctcctcctgcagccgctgcaggtacagccagtcggggtcgtcgcgcttgtaggtgatcccgaagaccaggtcgttgattatgttgcccagcgagtgatggagcgccggcagcggattcacttccgacgcacagctcttctttgcctcagtatcgaaaagctgcaggggaaaatgaagaaagttgctacaatttaatgcaaatctatttaatactatactaagtttgcgttttgcgaatacgtgctgtctagaaaatgtgacaactttaaattgtcttaacatttgatatgccaaattaagctcatgtagattgctaaatgattaaatttgagtgtttaaaatgaaataaacgtagatcctgaaaccatacgaatttctgtattacgtatacaacaaattattccatgcgcgcattcaatcgttcagtgtaaatacgcgccaaagaaaaatctttaaggcaaatgcaaaatttatgcaatgtcgtgctattttcggctgctgacccacgcgaagagttggtggaagtggaaccacttacccgtacgcactcgtcgactccgcgggctatgcgccgctccagccgcgcgcgcagttcccccggccgacgggtcatgcccaaggcctttagccaatcgatagtctcgcgccgtgcatgtcgccaaatgtcctcctgggcgcagatgatgcctgtcgtagagcaaaggatatgaagggaaggggggattaaaccatcagagagccggaaaagcccggaagcttaagagatcgcttaccaaatccacccatgatgccgtgggtgaggtagagcggcgcacggccagtcatcacatcgcgccgaaagaaatcccgcaccaaggcggcatccgagaggactacggtcggcaccctgcccattttcagctcgaaaattccaccataccgcttggccagcttctggagtgacttgtgcggcgcacgggcgtccaggaagggcaggtaacccagaaagggcaggccccagggacccggcggtggggcacccatgaggtcattgcactggcgctcgcacaggtagagaatcaccaggacgagcgcacccggaaccagcagaatactcaggctctgcaccgagggcatccaaccggtgtggccaatatcgacgatgtccgccgacatcactttcgatttcctcctgctctcacttttttcgcttcaccctcgtcacctccttcccgttagaggtgttcgcgaattcttggatactaagttcctcgggtagtagtcgtcggcttgtcgacttgtcagcttcttggtttcccagattctcggatcccgacgtccagtcgccagcagagctctgcgattactggaatttctttagaatttgaaacgagtctctcggacagaaatgcaaacagggcagcggcgagctgtcaacgtgtgtctacgtcagcaacgggaacggaggaagagcggccgccgaaggccgttcagacaatggtaacatcagttaccataccatatacccatatgccatatgccatatgccacaccatatataccatatactaccacacactatagcatacagggtttcggcatcgaagaaggagagtgcgaaagtaaaatttgaaaatgaaattgcccgtttatcgtatgcacattcattacacccactcggcggcggactaagctggtcgagatcgacatgcagatcgaatgggcaagttacgcaccgtaggaatcgtagaaatctgggatcagttcgaagagctcatagaaagggtatccagttgccgtgatagcccatcctgagtacctagcgtcggcggtctgcggacggacatacattttattcaatcgaccgtctacctttccatttctatttctgccacatttgcacttttcttgtgtactccttaatttggcggctgctgaattggtttcgatttgggtttacctgagccacaggcaaaacaacagcagacccataaaatatgccgggattttcccctgcacagcgagaaaacttgcatatgaacccaaaaactagccgtagcatattttcaagaatgtcaatttattatcgatgttctttttggccaggcattttggccatacgggcaatacaagcagccctctgtagaaatgcctgtgcctggggatttccagctga

SEQ ID NO: 14270 - DNA, 1725 bp, DROSOPHILA
atgtcggcggacatcgtcgatattggccacaccggttggatgccctcggtgcagagcctgagtattctgctggttccgggtgcgctcgtcctggtgattctctacctgtgcgagcgccagtgcaatgacctcatgggtgccccaccgccgggtccctggggcctgccctttctgggttacctgcccttcctggacgcccgtgcgccgcacaagtcactccagaagctggccaagcggtatggtggaattttcgagctgaaaatgggcagggtgccgaccgtagtcctctcggatgccgccttggtgcgggatttctttcggcgcgatgtgatgactggccgtgcgccgctctacctcacccacggcatcatgggtggatttggcatcatctgcgcccaggaggacatttggcgacatgcacggcgcgagactatcgattggctaaaggccttgggcatgacccgtcggccgggggaactgcgcgcgcggctggagcggcgcatagcccgcggagtcgacgagtgcgtacggcttttcgatactgaggcaaagaagagctgtgcgtcggaagtgaatccgctgccggcgctccatcactcgctgggcaacataatcaacgacctggtcttcgggatcacctacaagcgcgacgaccccgactggctgtacctgcagcggctgcaggaggagggcgtcaagctgattggcgtctccggggtggtcaactttttgccctggctgcgtcacctgcccgccaacgtgcgcaacatccgcttcctgctggagggcaaggccaagacgcacgccatctacgaccgcattgtggaggcctgtggccagcggctgaaggagaagcagaaggtgttcaaggagctccaggagcagaagcggctgcaaaggcagctagagaaggagcagctcaggcagtcaaaggaagcggatccaagccaggagcagagtgaggcagacgaggatgacgaggagagcgatgaggaggacacgtacgagccggagtgcatcctggagcacttcctagccgttcgagacacggattcgcagctctactgcgacgaccagctgcgccatctgctggccgatctctttggagccggggtggacacctcgctggccaccctgcgctggttcctgctctacttggcccgcgaacaacgctgccagcggcgcctgcatgagctcctcctgccgctgggtccgtctcccactttggaggaactggagccgctggcctacctaagggcttgcatttccgagacgatgcgcatacgcagcgttgtcccactgggcattccgcacggatgcaaagagaacttcgtcgtgggcgattattttatcaagggtggttcgatgatcgtttgctcggagtgggctatccacatggacccagtggccttcccggaaccggaggagttccgtccggagcgcttcttgaccgccgatggagcctaccaggcgccgccacagttcatcccattctcgtccggctatcgaatgtgtcccggcgaagagatggctcgcatgatactcacgctctttacgggtcgcatcctcaggcgcttccacttggaactgccctcgggcactgaggtggacatggcgggtgagagcggcatcaccctgacccccactccgcacatgctgcgattcaccaagctgccggcggtggagatgcgccatgcacccgacggagctgtggtgcaggattag

SEQ ID NO: 14271 - protein, 574 aa, DROSOPHILA
MSADIVDIGHTGWMPSVQSLSILLVPGALVLVILYLCERQCNDLMGAPPPGPWGLPFLGYLPFLDARAPHKSLQKLAKRYGGIFELKMGRVPTVVLSDAALVRDFFRRDVMTGRAPLYLTHGIMGGFGIICAQEDIWRHARRETIDWLKALGMTRRPGELRARLERRIARGVDECVRLFDTEAKKSCASEVNPLPALHHSLGNIINDLVFGITYKRDDPDWLYLQRLQEEGVKLIGVSGVVNFLPWLRHLPANVRNIRFLLEGKAKTHAIYDRIVEACGQRLKEKQKVFKELQEQKRLQRQLEKEQLRQSKEADPSQEQSEADEDDEESDEEDTYEPECILEHFLAVRDTDSQLYCDDQLRHLLADLFGAGVDTSLATLRWFLLYLAREQRCQRRLHELLLPLGPSPTLEELEPLAYLRACISETMRIRSVVPLGIPHGCKENFVVGDYFIKGGSMIVCSEWAIHMDPVAFPEPEEFRPERFLTADGAYQAPPQFIPFSSGYRMCPGEEMARMILTLFTGRILRRFHLELPSGTEVDMAGESGITLTPTPHMLRFTKLPAVEMRHAPDGAVVQD

SEQ ID NO: 14272 - DNA, 5063 bp, DROSOPHILA
tttgttacaagtgcttcgtcattgtgttcattttgtttaatttgtatttttttgtttcattttttagctcttttttaaatgatttttttgtttgttatttttttattgtattttattttttttgcaatttacgctttgaatgcattataaatttaccccatctgtcttttctaatttccttcttggggtcaattacactttaattttacgatattacgttatagatttcttatgacttgtgttttttgggggttgaaaacagccgatgtcgtactggatcgcattattacaagtacatatatagtcgtaaatatacgttgaattcattacaacattgaacagagtactagagtgtgaaatagaagaggactcatgctttgcttttggttttgtttttttttttttgtccgtaggttacacgattgttgttagtaggttgcttggttgtcgggcggggattggattggattggattatacaaacgaaaccattttgggtaacttgcgtccggctgcatcgctccggatcgctgcctgcctgcctgggcataatacttgtaattgaatgtggcggcctttagcactagaatgttgcgacgttagtcgtagaatgcaaaatacacaaaagtgtacacttgtacgataaacagtgtttgtgtctgtgtttgttgcgctgctgtttacaaatattttattacttgcttatttttgtttcgatttttttttctatatttcgtgtgagtttcacatgcacttaatgggtctggggccgctgctttcctttcgtctgggcgggggattaaaagggggtaacattatctgcctcgtcgctgacatcagcagagagcacacagtgccgctcaaaagcgttcgccttaaggtagattttcaattcgggtttatttttgtctatataaacatacttttcagggttctccttaaaatcgtgtgtgcgtgcttgcctgtatgtgtgtgtttgtgtaatgcaaacagttaaaaaatattcacaatatttgtttattttaatatttttggtgtaaacaattcaagcttttgtagcttgcaactaaaattgctttcctcgttttaaaactaagtaaacatgtatcgatgtcaaatattacaaaaataaatcgtgcttcgagtacatacatatgtaatatgtagtaacctcaactcacatttaaaagcattctcgtacagtttaattaacataaaatttaacattgttaccatttgctaatattcccttagatacgcaaaaaaaaaaaacaaggaagaagggaagtgtggttaaagacctttgccaaaggtgccgccaggatcggcatacataattaaaatgctgtgcgagttggaaatgcaaattaaaatacaaccggtgcgtgcacttatggtacctactgtacggatgatctgagcatgtgtatgtgtgtgtgtgtgtgtgagtgtgtgggttttgcgcaaggaaatattataacaaaattaatacattaggagataaaatattcttgcttatgcagtgtcttacactaccattagtttgaactaaagtgtctcgatttgtgttttctggtttcttaatttcatttcattcgtttcgttttccttatttgtttttgtttttttttccttttcaaatgaaagataggctaatttgtgtagattcatattccccatataacgttgctcacgattcgattacacgtttatgataaaaacaaactctctgcgctttccgttgaatgtggacacacggattctcctttctgttttccctatttgtgttttgtgtgtgtggccgtttgtagttgctgttgttgttgtgcttcgttcgaggtgtgcagtgtttattttttcttgtttttattgttagctccgcgtggcggtgtcaaaggacgtcctgagctgccaaagttgggataaacaaatcgtcgcttgtcggcgggtttcaatatctggaaggagcacatcaatgtgtcgtccacggacatcatggcacctgtaaacgtaatcaataatgattaatcaattcattagaagcgggtgtcgtgcataggtagtttcattctcggtattgattattgattatttttaaatgcgcattttccgagttgaatttaaatctggttgccagctttcacttgccgacagcttatcggcaggcaaaatcaccgagtacaagggtgcaacgtggttgttctccaaataaacaaggtttatctccgactaaagtccccgaacaatgatcacttacccgcgttgtcgaattccccgcagtagttgggcgccgagaagagcgtcaccagctgacgtttggcgaagaactcataaccgtcctccactacctgatgagcccgacagatcaggtcaaattcgtgcttctgtaaaaatttacccacaacctgcaagagcgaatgcataaacaacattgtggcgaacagtgtaatgcgaagaacccacctctgctccaaatgtgaagctcacgccgcgatcattctcgccccagcccatggtatccttatccggatccgaccacagcagatcgcacagcagtccctgatcgggcacgtctgtgggacgcatgatgcgtcgtatctgctccatggacgacagatctggactcaggccaccgtggcagcagaagatcttctcatccacgatggcggccaccggcaggcagttgaagcagtccgtgaaagttttccacagcttgatggtgtagcgacgtttacattcgtcatagaacctgccaattaagtgcaattagttgagtaattttatggattattgctatagaatgtggcatttactttatgtatttgaagtatggctaatttaattgtaatggatatcgttgtgtgcgtcaataaactagaaagtattaataagcttggaagcataagtagacatcaatatgtctgggaaatttttaaagctcacgtaaacaataaacaactataagttctatagcatgtataaaagtacatagtcatcagaagtaaatacgagtcgtaagaataatataaattgtaatcaaatgagtttcagtaatctaagcaggaaagcaaattgtttcggtgctgaactgaacagattgctaaccatttcatcaagcttcatcctgtttttggagccgcctccccacttacccgtagatgcgattgatgctggcgcactcatggttgccgcgcagcaagaagaagttctccgcgtacttgatcttgtaggccagcagcaggcatatcgtctccagggattgcttgccgcgatcgacatagtcgcccaggaacaggtagtttgactcgggcggaaagccgccgtattcgaacaggcgcaagaggtcataatattgtccgtgtatgtcgccgcagatcttcagcggtgcctccagctccaggagtatgggctgcgacaggaatatctcgcgggacttgaggcacaggctgcggatctcgctctctgatagctgaacattctttcccggtcgtgcaccgcgcactgcaatggaaaaccaagcagggaaaatttacgttaaggtgatgagagtgggcggtggttgggtggcaaggcatgtggggaatgggtgatgatgggtgggggcaaggtaatcaaaagttggagccctaacacctaccctccagcaggcgcgagatgatactgtcgatgttcatgatatccgacatctttgtgggcccgcttgctcagcttcctgaagttcgcttatccgccgattgcagcaactgctatttcccgtaacccgtgtattttcggtatacgttcgttatgtatgttatttcatcgatgggcacgggctgcgtgtgcctgtgtgtgtgtgcgccgtgtccgtgtgcggatggaaactcggtgctgggctaatctcgccctttggtcagctggatgcacggattcgcggattcactgcctcggttgctcacccctctgaggttggctgacttcaatcgttccgatccttagccagctgcccttttattgcatttaatgcacgttttactcgcgacgtactaaaaaattttcatctacgttggttagtgacgtcgattgtttacagcgcgagtcgattgcctatcgattgcctatccattgcacggcgcgcagctatcggtaaaaggtagtgtgaccggaatatgcaaattcatttaaaaaacaatattttttagttaagtacggtacattgaacaggtgataggtactcataaaggaatataattatcttatgatatattggctattaaacgtatcgttgacatttatacccaaagtattataatatcatctttattgactcattttaggttatcatcgctgtcattgaagctcttcccgtcctccgtggtgttgaacatcacccgcttcctgggcagcggaactggcctcgaactcagggacgacttggaagctcctcgaatagtggccgccggcttgaccaggatctcctccagacgagccttgaaatcgcgactaactagtctttgaggactggggcttcgagtttgctgttcgctgctatccgtttgctcatccgtctgctcttcgccttgagagctggctatatcctcttcagacttttcagagatcgcagacctcgggatccctttgcctggaacctccattggcttgagtggactcttgtgcttcagcaacatttccgcgcgttccgagaacttggcggagcacagtttttcgacaaacttgcggatgcgatttcgagtggcgtaaaaatgtggatgttgctaaagggtattccagaattgtcaaaagttcattagtttttggcagttataggcttaccagtttcagtttgttgcggtgctctgtcagctcggagttcactctcttcaaagagttatgcgaaatacctttggacttcatatcgaagccgtgagacatcaacttccggttgaccatcttccgggcatccttgcgagtaagtggtttttgagggctccttaaaacatgtggattattattactctaagaaagcttaacatcgaaacactcacttgatgattcttccagaaggcttgattgtttttggcgttg

SEQ ID NO: 14273 - DNA, 2211 bp, DROSOPHILA
aatcgacgtcactaaccaacgtagatgaaaattttttagtacgtcgcgagtaaaacgtgcattaaatgcaataaaagggcagctggctaaggatcggaacgattgaagtcagccaacctcagaggggtgagcaaccgaggcagtgaatccgcgaatccgtgcatccagctgaccaaagggcgagattagcccagcaccgagtttccatccgcacacggacacggcgcacacacacacaggcacacgcagcccgtgcccatcgatgaaataacatacataacgaacgtataccgaaaatacacgggttacgggaaatagcagttgctgcaatcggcggataagcgaacttcaggaagctgagcaagcgggcccacaaagatgtcggatatcatgaacatcgacagtatcatctcgcgcctgctggaggtgcgcggtgcacgaccgggaaagaatgttcagctatcagagagcgagatccgcagcctgtgcctcaagtcccgcgagatattcctgtcgcagcccatactcctggagctggaggcaccgctgaagatctgcggcgacatacacggacaatattatgacctcttgcgcctgttcgaatacggcggctttccgcccgagtcaaactacctgttcctgggcgactatgtcgatcgcggcaagcaatccctggagacgatatgcctgctgctggcctacaagatcaagtacgcggagaacttcttcttgctgcgcggcaaccatgagtgcgccagcatcaatcgcatctacgggttctatgacgaatgtaaacgtcgctacaccatcaagctgtggaaaactttcacggactgcttcaactgcctgccggtggccgccatcgtggatgagaagatcttctgctgccacggtggcctgagtccagatctgtcgtccatggagcagatacgacgcatcatgcgtcccacagacgtgcccgatcagggactgctgtgcgatctgctgtggtcggatccggataaggataccatgggctggggcgagaatgatcgcggcgtgagcttcacatttggagcagaggttgtgggtaaatttttacagaagcacgaatttgacctgatctgtcgggctcatcaggtagtggaggacggttatgagttcttcgccaaacgtcagctggtgacgctcttctcggcgcccaactactgcggggaattcgacaacgcgggtgccatgatgtccgtggacgacacattgatgtgctccttccagatattgaaacccgccgacaagcgacgatttgtttatcccaactttggcagctcaggacgtcctttgacaccgccacgcggagctaacaataaaaacaagaaaaaataaacactgcacacctcgaacgaagcacaacaacaacagcaactacaaacggccacacacacaaaacacaaatagggaaaacagaaaggagaatccgtgtgtccacattcaacggaaagcgcagagagtttgtttttatcataaacgtgtaatcgaatcgtgagcaacgttatatggggaatatgaatctacacaaattagcctatctttcatttgaaaaggaaaaaaaaacaaaaacaaataaggaaaacgaaacgaatgaaatgaaattaagaaaccagaaaacacaaatcgagacactttagttcaaactaatggtagtgtaagacactgcataagcaagaatattttatctcctaatgtattaattttgttataatatttccttgcgcaaaacccacacactcacacacacacacacacatacacatgctcagatcatccgtacagtaggtaccataagtgcacgcaccggttgtattttaatttgcatttccaactcgcacagcattttaattatgtatgccgatcctggcggcacctttggcaaaggtctttaaccacacttcccttcttccttgttttttttttttgcgtatctaagggaatattagcaaatggtaacaatgttaaattttatgttaattaaactgtacgagaatgcttttaaatgtgagttgaggttactacatattacatatgtatgtactcgaagcacgatttatttttgtaatatttgacatcgatacatgtttacttagttttaaaacgaggaaagcaattttagttgcaagctacaaaagcttgaattgtttacaccaaaaatattaaaataaacaaatattgtgaata

SEQ ID NO: 14274 - protein, 327 aa, DROSOPHILA
MSDIMNIDSIISRLLEVRGARPGKNVQLSESEIRSLCLKSREIFLSQPILLELEAPLKICGDIHGQYYDLLRLFEYGGFPPESNYLFLGDYVDRGKQSLETICLLLAYKIKYAENFFLLRGNHECASINRIYGFYDECKRRYTIKLWKTFTDCFNCLPVAAIVDEKIFCCHGGLSPDLSSMEQIRRIMRPTDVPDQGLLCDLLWSDPDKDTMGWGENDRGVSFTFGAEVVGKFLQKHEFDLICRAHQVVEDGYEFFAKRQLVTLFSAPNYCGEFDNAGAMMSVDDTLMCSFQILKPADKRRFVYPNFGSSGRPLTPPRGANNKNKKK

SEQ ID NO: 14275 - DNA, 2951 bp, DROSOPHILA
cccaaacccctcggaatgacttgacattccaggaatttaagttctccgtcagcctccaattggaagatatcaaaaatggctccactggccggccattaggacaaagttattatgcccccgatcccaaggcgctcgtctagtggccagggaggcgggctaggggggcgtggccgagagctatgtccgctggccaaagtttattatgtaaactcggagcgggcagtgtttgaattactcgcccagccgccacttgaggccctgcaggggatgcatattgaggtcagccggaggacagcaattctgaaatggcaggggttaagggtttccgggggaggtgggtgttcaagggggcaaggggaccgtggaaggggtgaacactgcctctgtctcggtctcgacacttgagtaaattatttagccgcttgctcgctcgcacaaaagcatatttcgttcaatttttgcagcccttaaacttttttgcccactcacactcactcactttggctcttttctcttgcaggttttggcttcgttacatttcaaagcgaagatgtggtagacaaagtttgcgaaattcatttccacgagataaacaacaaaatggtaagtgaagcgtggcggtctgaatcgcagcccaagaggcttagccatccatccagccatcaactaactcggcccttagtttatatttggccatacggcgaaaaatactgccctaaatcggcaatcaatttcggaattttatttaaatgcttgagtctgagacttcctgccactgtgaaataatatatgtgtatttaagaatattttcttaaagcatgttcagaaatatattaagttttatactccattttcccttggtgtaatgaaagcctttctaaattaaatgaagtgaagaatctttcgtttttagacagttttaaaatatttaaaatcggaccaagaacttaacttaatttcatataaatagctacatgtagttatatctattaatgacttcatgtcctttcaggtcgagtgcaagaaggcgcagccgaaggaagtgatgctgccggccaatctggccaagacgcgggctgccgggcgttctgcatacggtgagttggtagtctggggcagcagccacgcccattcgacggcggccacttccgccgccgccgccggcttgctgccgagtagtttagccgctgccgcgtccgtgctgcaacagcagcagcagcaacagcagcagcagcaacaacaacagcagcagcagcaacagcaccaccagcagctgcaccacacacacccacagtcacccgcccacagccacgcccaccacccgcacacccactcgcatagccagctattgggctcgctgcgttacaccccctatccgctgcccgcccacctctcggcggcagccgtggttgtcgcccagcagcaacaccaccaccagcagcagcagcagcaacagcagcagcagcaacaacaacaggttgtggccgcccagcagcagcatcagcaacagcagagtttggcccaagtggtggccgctgcagctggtgccgcacctggtctgctgccgctcgccaatcccgctccgcctgccacgccctctctgctgcagtttgcagcgggccagagcaatgccgccctggccaattccctttacgccgatgccgctgccgtcgttggctataagcggctcttggcagcagcggcggtcagtagcggtctgcgtgcaccaaccaccgctttgggtgcccttcaagcggcggctgccaatgtgcccgctgctgccgccgccgcgcagctgcaacaggcccaattgcgtcagaatgccgctctggccgccgcccactatccgctcagcgaactgctggccatgcagggcggcatggagatgggagcgggcgccaattctgcggcggcagcggcggcctcactgtaccagctgcccggaatctgaccgcccaggccacagtgagacctctaaacattgaatgcaaaatttcaaaacaccttcaaagttctactgaatattacagttttgctgcctggatttcaaggctagagcagacactttaaatcggctaattatttcagagcttatccaaaattttcactatccgaagatagtctaaactggcaatcctaatcccgaaaactaacacacccacaagacacgctcagtacacactcgactacacctatatatatatgactctcattccgtctcaatgtccaaaaaatatgttaagctgctaggcctaggattacgtgtacttcttacaacttacaactagccatgtacttacttattccatatgtactatatatatcgtaacttatattttgtgactgtctaagctgcgtttaggccacgcggcgtatgcgttatttaactaaattaatcaaatagcggcgcattcgttttctttccttagactttaagcgaacttgacttacttaagatatacatatctaggctaagtgcaggtcctagagagctgcttagatgttgtcgagaccaactcgataaacttagaccttagacggcgatcgtaatatgtcttagacacctggcgacttttctagaacttaagaatgtaacaaaagcgaacaatgtttcaaattcaaaacagctaacaataaaaaaaaaagtcatcagctccataggaaacactcatttatgttttaaaacgaattctctcttgtatatcaaacattatttaacaacctatacgtaaactcatatcaatagctctttaaaggcatatttacctagagcggcttcggattcgaacctagcgaatgtatcgaactagcgattaagttggataacaaattaactaagccagccgaagcaggccggttgagtattagaaatgcgatgtgtgtaacgaagtttagttttgaaaaattgatgagagaccggactggacagatgcaatcgtagcggccggaca

SEQ ID NO: 14276 - DNA, 951 bp, DROSOPHILA
atgtcctttcaggtcgagtgcaagaaggcgcagccgaaggaagtgatgctgccggccaatctggccaagacgcgggctgccgggcgttctgcatacggtgagttggtagtctggggcagcagccacgcccattcgacggcggccacttccgccgccgccgccggcttgctgccgagtagtttagccgctgccgcgtccgtgctgcaacagcagcagcagcaacagcagcagcagcaacaacaacagcagcagcagcaacagcaccaccagcagctgcaccacacacacccacagtcacccgcccacagccacgcccaccacccgcacacccactcgcatagccagctattgggctcgctgcgttacaccccctatccgctgcccgcccacctctcggcggcagccgtggttgtcgcccagcagcaacaccaccaccagcagcagcagcagcaacagcagcagcagcaacaacaacaggttgtggccgcccagcagcagcatcagcaacagcagagtttggcccaagtggtggccgctgcagctggtgccgcacctggtctgctgccgctcgccaatcccgctccgcctgccacgccctctctgctgcagtttgcagcgggccagagcaatgccgccctggccaattccctttacgccgatgccgctgccgtcgttggctataagcggctcttggcagcagcggcggtcagtagcggtctgcgtgcaccaaccaccgctttgggtgcccttcaagcggcggctgccaatgtgcccgctgctgccgccgccgcgcagctgcaacaggcccaattgcgtcagaatgccgctctggccgccgcccactatccgctcagcgaactgctggccatgcagggcggcatggagatgggagcgggcgccaattctgcggcggcagcggcggcctcactgtaccagctgcccggaatctga

SEQ ID NO: 14277 - protein, 316 aa, DROSOPHILA
MSFQVECKKAQPKEVMLPANLAKTRAAGRSAYGELVVWGSSHAHSTAATSAAAAGLLPSSLAAAASVLQQQQQQQQQQQQQQQQQQQHHQQLHHTHPQSPAHSHAHHPHTHSHSQLLGSLRYTPYPLPAHLSAAAVVVAQQQHHHQQQQQQQQQQQQQQVVAAQQQHQQQQSLAQVVAAAAGAAPGLLPLANPAPPATPSLLQFAAGQSNAALANSLYADAAAVVGYKRLLAAAAVSSGLRAPTTALGALQAAAANVPAAAAAAQLQQAQLRQNAALAAAHYPLSELLAMQGGMEMGAGANSAAAAAASLYQLPGI

SEQ ID NO: 14278 - DNA, 8731 bp, DROSOPHILA
cgttgggaccactcctgcaggcatacgatgaatctctaagggataaggacgctcttttggctcaatataacacagagttcgagcacttcactggggaactaaagcgagccctggaggagaacacaaagctggtaagcggcgaataatcaaccgtccaaatttaaattcacaccacctaaatgtaatgcccaacagctgcagtcccaggagcaactgcgtcgtgacctcggcggctggcgagaggagcgagtgtgtctgcaggcccaactaggagtatgccgctccaaagcggaggcgcaaactcgcaagacggacttggccaaggagaagctggtggaagtgatgcactgctacgaacagcgcatgcagacgctgatcctggacatggatcacctgcaggcggcctacgcgcgaactaaatccgaactagccgcgcttaaaagtgcctcatcggcggcgcccgctgcggttgctcctccagttcccgccgaatccgaggcactgcatcagtgcaaagccctgcttgagcaattgcggcaggagcatgcgagagagcgaacttgcctccaggaacagctgcaagccaccaccgcacgggcagcttcactggtccgcagcacggaaaaagccaagcacagcagagatcggcttaaggctcgtctgagaatggcgctgcagtgggcccaaaagctggaggcagggcaggctgaggtgcgcgatacctacgaggcggtacgccgcctggaagtacttgtccagcacaaggagtcacaattgcgcggattgcatgcccggaatgcagaagaaatggacaagttgcgtcataagttacagcagaaggaggaaacgatatgtgcgctgcttagaggcaaaatggagcgcagaccggcggtggattaacgcgtagaacatagtttttaacaattaaaaatatataatttcaatacaaaatacattaataacttagcgtagaaagcttttaaagcacagcagtccggaatcagccggactccacctgttcggagagcgtcctgtccgcaggcgctcccgatccggagccggagcccgcgcacaccacacaggccttgggcacagtctgctctatgtacatggtaatcctttcccgtacctcgggaaccacggagcacattacctgctcatatcgctgggatcccagctgtgcctgcaacgactgcagctgccacttgagatactcggtaagggggatcttgtaaacgggatctttgagcaccaactgcctgtggcggtcgtcgtgataggtcttggccgggtagcccttggtgtgaaattcctcgctgacaccgccgccactgcccagctgctgctgcagatcgtccagctcgtgttcgtcatgaatgaccaatgaatcatagaagcgaggcgtggcctgtgacgcaccctcctcggtggcggcgtactgcttgtccatcacttcgcccaacgtttcgtccaccagctgcaggatatgtggcaggcgagcaagcagcagctcattgcttccaaagatcgaggcgaaggccaggcagaagagctttctcttctctgcgtgcgtgtcgggaaccattgggaacatctcgatccaaacgtccaggatgcgggccaaagcgtccgcttgtggcaattgctgtaccaccgacatgaaaacagactggtcaatgagcagggtgcgggccacgatggtcagataccatcccattgtcatgggatactcctgcttaaggcacacctgctggaagacaaagggcagtgctgggcgcaccagccgcagtcccaacgccgcgtccgttttcaggcatgtctcgatgatccgcagcatggcaattattccctccacacgtatgtcctcgaaagagcgcacgcagtaggccacgaaaccctcaccgtaacgactcagataggcctgagcgtccagcagtatataggcatgaatcagctgcagcacggtgcgcaggttctccgatgacatctcgataataggcagaaggtggtcgcacagaccaagtagttcgggtgtcagtgcagtcgagttcccaatcaccgccagccagagcatgataccatcttcgatgaggtagacgtgcgagggttgctgtgcgaaaaaaagttaggtattgttactcattgcggtttcataaaatgctatattttagcttagttacagataagattgttgtgaaagaatgaatgctaaaccattaaaaataatcagtacagccagtgttgacctcaagatgaaatcgctgtggattgctagtttcgcctttctggtttgtctaacaccaaaactaagagcccagtttattgatcccaattgcggaactaccatcaatcttccgcccacgaatagaatcgttggaggtagaactgcagatataggatctaatccgtggttggcctacttgcacaaaaactcgtctttagtttgtacaggcacattgatcacaaaaagtttgtaccttcggaaatttgtgatttacgaattgtatttttaacaatgattttcctagggtttgtactcaccgcagcgcactgcctgcacagcttccatttgttgttagtataaagtataagctcgtatttgatttttaaactaaattaattctaaaacacagaacggttcgccttggggaatacgacacatcgacacgcatcgattgtacatctgagttctgtattccgacgtatgaggagtacagcgtagagaacgcctacatccatacattcttcggtggaagacaagacagtcgcaacgacattggattgcttaaactaaatggaaccgtcgtttacaaatgttagatgccatcatatgtatcaatttagtttatccccaattttatattgctctacggatgaacggatctactaagcggtgtgcattacagttactttactattattctcatttgcagtgttcattcgaccaatttgtctgttccgggatccaggccaagtaccttatagttccacctacgaggccgctggatggggtaagattgatctaatcaacaccgccacagttctgcaaacagtgaacctgatcaggcttgaccaaagcgactgtgagcgatccctgcgcacttcgctttcatacggtcagttctgcgctggacaatggcgggcggacacctgtagcggtgactcaggcggtccgctgtcgaggaaaatgtcaaatggccgcataacccgcaccgttcagctaggtattgtcagctatggtcactacttgtgtcgagggccaggagtctacacatacgttccaagttttactaactggatactcagtattacccgctggactcaaaactgactcaactatgtaaaaattcttattgtaaataaataaaaaaaaatgtatagcatatggaattaaacataaaaaatcactcacctgaagatccgtgctcagctcgatcacgctgtagaggaagggcttcatgggctctgggacatcccgtatcgttcgaaccagctgctctagggtgccaatgatggcgcagcgcagaaggtcgtgttcctcgctctcgcgccacaggaggggtaaatacgcaatgaactgcaatgcctgcggctcgatgtactcgctcatcttctccacaagtagcgtcatcgtgcccagcaccacgatcttggtgtcgcactcgccggcctcatggagcagcaaaaagagggcctcgaagagggatggaaaatacgggtggaacgcttccggcataaactcaaaatcgtcgatcaacagattcaacgtcctggcagcggccaacctggtgggcatgtcctcctgcggccggagaagatgcaggcatgcttcgtaagccagcggtctcagttctctgggcaactggacgccaacccaatggcctaccagccagatgatgcgacgccgtaggatccgaaagttcagagcttccacgcgcagctccgcaagcaattgggatgtcagccatgcgccaaagtccagcttgttaaagaaatgaaaggctgcctggcctacggcattgtagatagcgtctttcagtagaatggccttcaggtcagattccggggtcagctgcaattgctgggcacgccttacgaaacggagcacctccggaatcatcacttgcgaatgctgagtaaaacatgtgaaataaagggtctccacgcttggccttaaggcgtacttccaagcatcaccaccgccgtcgtcctggtcatagccctctggatcctgctgccactcctccagctcctgttgagtgagcagaaaatagtgcgtcacgatcttctcacagatgtaggtcactcgctccgctgtgaagaacttggcttggctttgagcagcgctggctaacagctcatcctctatgtgagcaccaccttcgggcggagcactgatgctatcgttgccgctcagcatgatacctttcagcatgttcagcgcctgtatggcaaagtttttaaagttaatgcgatcgccggcgtcgaaaatgagggcggtgccctcgtggaacacatagtggaagctgaactccagggccacaggaacgaacctcgcaaaggacacagaatgccgctccatcagttcattgagggtcttcatcatcttaatcacaaagcgctccaattcggtgagtatcgtggcagtgcctggtgtggccgatcccactttcagttcatagcgcagttcgaggcactgtcgcaaccgctggaaaagctgctccacaaagttcatgtgatccgtggacttgtacggcttggcacagccgtagaccaccagcttgcgcagggttctcatcaccacatacgcccgttgaagggcattgagggccatggcctcgtcctttcgcacgagctgcaaaaagcgcgtcgtaagtggtgcccaaatgtcccacgccagatatccaaatatctgtaagcccagctcctggaaggcacgctgctcggccatcagacgccgtgaggccagggccttgaggacatagtgtaggacaataagaattcgctgctgcagggccgaatccccatccgtaccgcaggactgcagctgcttcatgagtgtcggcagcagatccggccaaaatcgcgggtaatccgtgcgtgccaggcgacccaggagcacggctacctgcagggctacctggggcacttcctctgcgtcgtagtgacgcagaagtacttcccggatctgctgcttttgctccgcgggcagttcctgccgcgaattgggccgccaatagcgctccacgccattctttaggtagacagccgccatccagcgcaccttcacctcggagtcctccgtactggacaccacgtcgccgccgccacctcgtcgcatgctcagacgggcaatcgtgggaaagaagcccggctgctgctcccactcgcgcagctgcgcctccgccttctggacaatctcatggctcggatttgtggccgcctgcagtgtctgggctaccagctgctccaccgacgctccagcacccgctgcggctgctccagatactgctcccgttgccatttccatcacacgacgcctcctcttgcgacgcttgcgaggacgaaaattattggcaaatttctgcggcgcgtgctgcttcttgcttgaatttcagtgtgaccgaccgcaaatgctggaaaatactaaaacagcaaattttaatataaataattttgcaaaaaatttcaaatttaaattattgtttgttaagtttttgttgaaatggaattttaaaagaaattacaatacatttaataacaactattactaaaatagtatttctgaatatataagtaattttgcaagcatttaaacttctcgttaagtgggcttacagtatatgaaatttttgatattattattactattaactttattaaatcaaatggttttcatatcgcagaacttaaaacttttcaaagaattctctacgccttaaccatttccccgatccagtccaagtattcgagaacattggtgtagacatttgaagcgaaaggctctaacctgccaaagctcgccagtccgaccaggctgaatgccctcctgtttccgtgggttagagggtttaccaagggactgccaatgcccacgcgcaggagatgaggagaagggctttccatgcacaactgttgctctccgatgtcttggtgatcctcccggtagcacttactggcatttgttcgccgcaccaccacgttagtcggcgtgccccagccaacggctatgagattcagggcgggatcagcagcacgcctttggaacttctgctgctccgctttgttgcttagcgagggcaggcagatcggtcgaatcgattctagccgcataaaatgaacacattatgattatgaagctaatccgtatggcctttggaagacactcacccgtgtactgcacttcctcgcccagtttaagcagagctatgtcgttttgggccaggctaacgaatttgggatgcttgtgaacagatgcgacagcgtaggtatgcacatcgccttgtcccagttgaacctttctagatgtatgtacatacaattgcactcagattactcaactttctcctcccaagggatcaaagtacttacaatgccgtactttcggaaatcaactgcgccgttgtcaccacgaaagctacaagaagaacacattagtaatcttttcgaatgaggaaagaaaagatgacaacttttcgaaataagtgcgccgtttgagattataaaggaatccttgtagacctcagccaaccactcgaaggacctgatcgcatcgggaccacttctatcccagctgttcaacgtgtcgttgcccagacacccagcatcgagtaggtctatatagggtagcaccacctcaatgtccgcatccagaacaatgcgctcgataaagtcgatatggcccattacatcggtgtacataccgaaacctctgcaatcttcggtgccagtgctgacgattcccaactgcgttgctcgcttgatgccatcgaacaacatatgtatgtacaagggtccaccggagtcccttttgcaggtatctctgcctaccgcggtgccggcacagaacattgggtaatcaaaagtgtaccaaaatgctgcctcgcacattttcctatctattctgtagatcttgaccatttgaagattgttactcatcttcccattgcccgttacgccccagccgattgctgtgaactcctggatgagatccgtttgcggcttgagttggtcgttcagtaaaatacataacggtttgatttgtggcttgtaaacgatacttttttgcaacctaagaagcgctatgtcattgcgatagttttgtatcgcgaaggaatcgtggatgtagaccctctccacgttgtatatctcgtggggatgattgtgttcacccgtcgccagtagatggtacacacccaaggtaactgtgctgcaaatcacatataattattcaattatattatattatttattaatttaaggtgcttacagctgagtgtactttacaatgcattcctcatcggtgcacatacaatgagcggccgtcaagacgaatttgttagtaattaccgatcctccgcagataaattcgtcattggtttttatgagggccatccacggattcttcagttcccccgcatccactccacctacaatcttcggtattaattgcatcggaactccacaatcctcgtccaaaaggcgggccgatcctcgtcccgccgtcagcatccaagcgaataaaacaacccaagctctgcacatttccagtgaaaaccttcaaacacactgaaagtgagctgctgtgcgtcgtgaatttgaagaaaagcttatcagctatgagaatgctgtttctattaatatttttactcttatcagaaagagcgggattttaccaaaatgtttttagcgctaaataacttgacctttttgaacaactgaaaaattaagaattttagatccaaattttcagaaaaatggatatttttcttaaaaccagaatataatttatggcaagctacttcttaattcctggaatttaaaacacatttaaaactaatacgctcgattagcaataaaaaaaacattaaagctcttaacagtattttcatttatttaaaaatcacaaataacactgtgccttacggtcacaccatcagaagataccgttacgctacggtactaaaatacctactaagaataccaatgcggtgctgttaggcgccttccagtgctgtagaccgcaactgtgtcatgtgatagagaccagctgacccgtacattttccagagttaggttttaatttcgctgtccacatcgctcgtaagaaaaaattagaaaaaaccaatcgaaatggctctgcactcggcaatcaagggaaaactgatcagcgttatcggcgacgaggacacctgtgtgggctttctgctcggcggagtgggcgagatcaacaagaatcgccatcccaactttatggtggtcgacaaaaatacggccgtcagcgaactggaggactgtttcaagcgtttccttaagcgggacgatatcgacatcattctaatcaaccagaactgcgccgagcttattcgtcatgtgatcgatgcccatacgtcgcccgtgcccgctgttttggagattccctccaaggaccatccgtacgacgccagcaaggactccattctgcgtcgcgcccgcggcatgttcaatccggaggatctggtgcgctaattcc

SEQ ID NO: 14279 - DNA, 4773 bp, DROSOPHILA
atgctgacggcgggacgaggatcggcccgccttttggacgaggattgtggagttccgatgcaattaataccgaagattgtaggtggagtggatgcgggggaactgaagaatccgtggatggccctcataaaaaccaatgacgaatttatctgcggaggatcggtaattactaacaaattcgtcttgacggccgctcattgtatgtgcaccgatgaggaatgcattgtaaagtacactcagctcacagttaccttgggtgtgtaccatctactggcgacgggtgaacacaatcatccccacgagatatacaacgtggagagggtctacatccacgattccttcgcgatacaaaactatcgcaatgacatagcgcttcttaggttgcaaaaaagtatcgtttacaagccacaaatcaaaccgttatgtattttactgaacgaccaactcaagccgcaaacggatctcatccaggagttcacagcaatcggctggggcgtaacgggcaatgggaagatgagtaacaatcttcaaatggtcaagatctacagaatagataggaaaatgtgcgaggcagcattttggtacacttttgattacccaatgttctgtgccggcaccgcggtaggcagagatacctgcaaaagggactccggtggacccttgtacatacatatgttgttcgatggcatcaagcgagcaacgcagttgggaatcgtcagcactggcaccgaagattgcagaggtttcggtatgtacaccgatgtaatgggccatatcgactttatcgagcgcattgttctggatgcggacattgaggtggtgctaccctatatagacctactcgatgctgggtgtctgggcaacgacacgttgaacagctgggatagaagtggtcccgatgcgatcaggtccttcgagtggttggctgaggtctacaaggattcctttataatctcaaacggcgcacttatttcgaaaactttcgtggtgacaacggcgcagttgatttccgaaagtacggcattaaaggttcaactgggacaaggcgatgtgcatacctacgctgtcgcatctgttcacaagcatcccaaattcgttagcctggcccaaaacgacatagctctgcttaaactgggcgaggaagtgcagtacacggaatcgattcgaccgatctgcctgccctcgctaagcaacaaagcggagcagcagaagttccaaaggcgtgctgctgatcccgccctgaatctcatagccgttggctggggcacgccgactaacgtggtggtgcggcgaacaaatgccagtaagtgctaccgggaggatcaccaagacatcggagagcaacagttgtgcatggaaagcccttctcctcatctcctgcgcgtgggcattggcagtcccttggtaaaccctctaacccacggaaacaggagggcattcagcctggtcggactggcgagctttggcagcaagaagcagcacgcgccgcagaaatttgccaataattttcgtcctcgcaagcgtcgcaagaggaggcgtcgtgtgatggaaatggcaacgggagcagtatctggagcagccgcagcgggtgctggagcgtcggtggagcagctggtagcccagacactgcaggcggccacaaatccgagccatgagattgtccagaaggcggaggcgcagctgcgcgagtgggagcagcagccgggcttctttcccacgattgcccgtctgagcatgcgacgaggtggcggcggcgacgtggtgtccagtacggaggactccgaggtgaaggtgcgctggatggcggctgtctacctaaagaatggcgtggagcgctattggcggcccaattcgcggcaggaactgcccgcggagcaaaagcagcagatccgggaagtacttctgcgtcactacgacgcagaggaagtgccccaggtagccctgcaggtagccgtgctcctgggtcgcctggcacgcacggattacccgcgattttggccggatctgctgccgacactcatgaagcagctgcagtcctgcggtacggatggggattcggccctgcagcagcgaattcttattgtcctacactatgtcctcaaggccctggcctcacggcgtctgatggccgagcagcgtgccttccaggagctgggcttacagatatttggatatctggcgtgggacatttgggcaccacttacgacgcgctttttgcagctcgtgcgaaaggacgaggccatggccctcaatgcccttcaacgggcgtatgtggtgatgagaaccctgcgcaagctggtggtctacggctgtgccaagccgtacaagtccacggatcacatgaactttgtggagcagcttttccagcggttgcgacagtgcctcgaactgcgctatgaactgaaagtgggatcggccacaccaggcactgccacgatactcaccgaattggagcgctttgtgattaagatgatgaagaccctcaatgaactgatggagcggcattctgtgtcctttgcgaggttcgttcctgtggccctggagttcagcttccactatgtgttccacgagggcaccgccctcattttcgacgccggcgatcgcattaactttaaaaactttgccatacaggcgctgaacatgctgaaaggtatcatgctgagcggcaacgatagcatcagtgctccgcccgaaggtggtgctcacatagaggatgagctgttagccagcgctgctcaaagccaagccaagttcttcacagcggagcgagtgacctacatctgtgagaagatcgtgacgcactattttctgctcactcaacaggagctggaggagtggcagcaggatccagagggctatgaccaggacgacggcggtggtgatgcttggaagtacgccttaaggccaagcgtggagaccctttatttcacatgttttactcagcattcgcaagtgatgattccggaggtgctccgtttcgtaaggcgtgcccagcaattgcagctgaccccggaatctgacctgaaggccattctactgaaagacgctatctacaatgccgtaggccaggcagcctttcatttctttaacaagctggactttggcgcatggctgacatcccaattgcttgcggagctgcgcgtggaagctctgaactttcggatcctacggcgtcgcatcatctggctggtaggccattgggttggcgtccagttgcccagagaactgagaccgctggcttacgaagcatgcctgcatcttctccggccgcaggaggacatgcccaccaggttggccgctgccaggacgttgaatctgttgatcgacgattttgagtttatgccggaagcgttccacccgtattttccatccctcttcgaggccctctttttgctgctccatgaggccggcgagtgcgacaccaagatcgtggtgctgggcacgatgacgctacttgtggagaagatgagcgagtacatcgagccgcaggcattgcagttcattgcgtatttacccctcctgtggcgcgagagcgaggaacacgaccttctgcgctgcgccatcattggcaccctagagcagctggttcgaacgatacgggatgtcccagagcccatgaagcccttcctctacagcgtgatcgagctgagcacggatcttcagcaaccctcgcacgtctacctcatcgaagatggtatcatgctctggctggcggtgattgggaactcgactgcactgacacccgaactacttggtctgtgcgaccaccttctgcctattatcgagatgtcatcggagaacctgcgcaccgtgctgcagctgattcatgcctatatactgctggacgctcaggcctatctgagtcgttacggtgagggtttcgtggcctactgcgtgcgctctttcgaggacatacgtgtggagggaataattgccatgctgcggatcatcgagacatgcctgaaaacggacgcggcgttgggactgcggctggtgcgcccagcactgccctttgtcttccagcaggtgtgccttaagcaggagtatcccatgacaatgggatggtatctgaccatcgtggcccgcaccctgctcattgaccagtctgttttcatgtcggtggtacagcaattgccacaagcggacgctttggcccgcatcctggacgtttggatcgagatgttcccaatggttcccgacacgcacgcagagaagagaaagctcttctgcctggccttcgcctcgatctttggaagcaatgagctgctgcttgctcgcctgccacatatcctgcagctggtggacgaaacgttgggcgaagtgatggacaagcagtacgccgccaccgaggagggtgcgtcacaggccacgcctcgcttctatgattcattggtcattcatgacgaacacgagctggacgatctgcagcagcagctgggcagtggcggcggtgtcagcgaggaatttcacaccaagggctacccggccaagacctatcacgacgaccgccacaggcagttggtgctcaaagatcccgtttacaagatcccccttaccgagtatctcaagtggcagctgcagtcgttgcaggcacagctgggatcccagcgatatgagcaggtaatgtgctccgtggttcccgaggtacgggaaaggattaccatgtacatagagcagactgtgcccaaggcctgtgtggtgtgcgcgggctccggctccggatcgggagcgcctgcggacaggacgctctccgaacaggtggagtccggctga

SEQ ID NO: 14280 - protein, 1590 aa, DROSOPHILA
MLTAGRGSARLLDEDCGVPMQLIPKIVGGVDAGELKNPWMALIKTNDEFICGGSVITNKFVLTAAHCMCTDEECIVKYTQLTVTLGVYHLLATGEHNHPHEIYNVERVYIHDSFAIQNYRNDIALLRLQKSIVYKPQIKPLCILLNDQLKPQTDLIQEFTAIGWGVTGNGKMSNNLQMVKIYRIDRKMCEAAFWYTFDYPMFCAGTAVGRDTCKRDSGGPLYIHMLFDGIKRATQLGIVSTGTEDCRGFGMYTDVMGHIDFIERIVLDADIEVVLPYIDLLDAGCLGNDTLNSWDRSGPDAIRSFEWLAEVYKDSFIISNGALISKTFVVTTAQLISESTALKVQLGQGDVHTYAVASVHKHPKFVSLAQNDIALLKLGEEVQYTESIRPICLPSLSNKAEQQKFQRRAADPALNLIAVGWGTPTNVVVRRTNASKCYREDHQDIGEQQLCMESPSPHLLRVGIGSPLVNPLTHGNRRAFSLVGLASFGSKKQHAPQKFANNFRPRKRRKRRRRVMEMATGAVSGAAAAGAGASVEQLVAQTLQAATNPSHEIVQKAEAQLREWEQQPGFFPTIARLSMRRGGGGDVVSSTEDSEVKVRWMAAVYLKNGVERYWRPNSRQELPAEQKQQIREVLLRHYDAEEVPQVALQVAVLLGRLARTDYPRFWPDLLPTLMKQLQSCGTDGDSALQQRILIVLHYVLKALASRRLMAEQRAFQELGLQIFGYLAWDIWAPLTTRFLQLVRKDEAMALNALQRAYVVMRTLRKLVVYGCAKPYKSTDHMNFVEQLFQRLRQCLELRYELKVGSATPGTATILTELERFVIKMMKTLNELMERHSVSFARFVPVALEFSFHYVFHEGTALIFDAGDRINFKNFAIQALNMLKGIMLSGNDSISAPPEGGAHIEDELLASAAQSQAKFFTAERVTYICEKIVTHYFLLTQQELEEWQQDPEGYDQDDGGGDAWKYALRPSVETLYFTCFTQHSQVMIPEVLRFVRRAQQLQLTPESDLKAILLKDAIYNAVGQAAFHFFNKLDFGAWLTSQLLAELRVEALNFRILRRRIIWLVGHWVGVQLPRELRPLAYEACLHLLRPQEDMPTRLAAARTLNLLIDDFEFMPEAFHPYFPSLFEALFLLLHEAGECDTKIVVLGTMTLLVEKMSEYIEPQALQFIAYLPLLWRESEEHDLLRCAIIGTLEQLVRTIRDVPEPMKPFLYSVIELSTDLQQPSHVYLIEDGIMLWLAVIGNSTALTPELLGLCDHLLPIIEMSSENLRTVLQLIHAYILLDAQAYLSRYGEGFVAYCVRSFEDIRVEGIIAMLRIIETCLKTDAALGLRLVRPALPFVFQQVCLKQEYPMTMGWYLTIVARTLLIDQSVFMSVVQQLPQADALARILDVWIEMFPMVPDTHAEKRKLFCLAFASIFGSNELLLARLPHILQLVDETLGEVMDKQYAATEEGASQATPRFYDSLVIHDEHELDDLQQQLGSGGGVSEEFHTKGYPAKTYHDDRHRQLVLKDPVYKIPLTEYLKWQLQSLQAQLGSQRYEQVMCSVVPEVRERITMYIEQTVPKACVVCAGSGSGSGAPADRTLSEQVESG

SEQ ID NO: 14281 - DNA, 7350 bp, DROSOPHILA
gtttatgattttttgttgactattttgaatttttcgtattcctgtcgctggcaatttgttctagccacgtctggccgccaattaggccgtttaatgccgcatgaagcccgactcgaccttgagttagggcccaaaacgcgctaacatatcagttagttagcgtttagctcagtatttgtgcgaggtaaatagcaacgagccagcagtccctagcataactaattgtatttacacggcctataattggcacacaaaaaacggattcactttccgtaattgttacatgtaaatatcgtaagtataagatgagcaactgcattattctgagctaggaatctctatttgcatgggatacatttaatagtgaggtgtggcattgtgtttgaggtactgcatgttggcatctcaaattgggtgttatgatgtcatcgatttaatttataaactacttggaattcatcatatgtttgcttgcaatgcaattcagtttgatggccaaccttgagtaaaaaaaaaaatacgaacttggagatatgatatttttcttaattttaaatttctaaaatttcacttcaattcatttgaacatcaaggaagtaaatgtaatttatgacgtcatctcagtagccagagatgttccctactcgcgccacctctcaaaactgctgcagttaaaagtgcaatagcggtgctaggaaacaatttttatggaaataaacatatattataagcatattgaatattatagcttcgatgtataatttttgaaatattttctagatcactttcaagtatgtttttctgtgcatttcaccctaatgttaatgatacccaaatgtaagagagcgtaaaaatgctgaagagagtcacgaaagagcgcagagtgaccgtttcggcgggccaaaagcgaaagtaaagcgttatcgatgcgggagcaactggtcacactgcgccatataagctatataacttgctgaatccctggtctctgcgcgattcagtctttgactctccaccaattcggtcgcttgcgtttgctccagctgcgttcttttcgctctctttggctcgcgtgaaagtcgtaaagttcagctagctctctacgatacagaaaaagaaacgcatacaacaaattcgccagcgatagaaaaccgatttaaactgcaattgcaatgcctaaaatgcgtacgtgagtttcgcgcagtgatcgctgtgaaagttcaagtgaaagcggaaagaagaaacaaagcgagaatacttcaaaagcaataaaccaaaaagtgcaaaaatacctaaagtttaaacaaagaaaacaagttatacaaaaccatagccatgttgtgtccgccaatggccctgggcccatttctcgccgcccccgtgccacgcccaccgcccagcgcatcggagaagaagagaatctgtcggaacctattcaataacgctcccggggactcgaatatcgatcagctgttggcccaggagcagcacacgcagagattatacgttaaggaacgctacggatatgacatccagctggaatctaatcgggatgcggatgcgaatacggatgcggatgctgatacggatgcccattgtcaggtcctgcgcggaatgcggtatccgacctcaaggacgatatccagcaccgatgccgatgagtgcaatccaaaggcagtcagccaagcgccgaggggcatggccctgactcccgcccagatctccgccagcgcaaagctgatccttcagaaatgcccggaaagcgatcgcaaaaaaagcaacggcagtgcggatttggccaactgcacgcgacatggccaaaagccatatgcgaggcagccacaaggcctcaaaggtaggttttttttttccatgatttgcatgtttttgtttcacctgaaacgctgggtgcttgctcaaaatatacgaataatgattactctttggttccaagttattaagtttaatatactttcaagttattgttaaattttcccaaagaatcagagcagaatcagaatatagtgaaatctctaaaattaaaaaagtctccttcgaattatctcatacatttcctcggtttttgtacgtatgttctatttactaagatcccatgtacttcttatatagatgatccaataagcagacacctgattttagttgcattttccgttgttccttcctcttgcagtctctgctttgtgctcgtcctttgccacagtcgtcacccttataaaattcctccccttagttgaaaaaaaaaaccacccttattttctgattttcctaatttcgtttttccccttctgcgtcgattcttattgtcacttctttcctaccagtttttattctctttattttggctagtttttccgattctttgttcgttcattcacgtgcgtagggatttatctctttggttactcgaaagtgaattgggatacatttacatatctgatgaataacagaaaactcaaaaaagtattattgtttggccccattgcttaatcgaattcgaataaatttctctaatttcaaataatttgaaataataaatgtattcaaaatcattgtattatgaaattttaaagattcagtacaagtttctacgactattgccttaagttttagcaacaagacaagggactattaatgcagtccattgttatctaataatagatttaagatgaacgctattaaaaaaaacttaccagtttgtttatattaagcatcacttatggacgttcgactgtacctttaatttttggcttattattattgctttactttacgctgatattccgccgatagcgtggcattcagtgagagagggagagctgggaagaaagagagctggtctccagtttgtctttggtttggcagtgtgtcaaagcgaaaaagctaaacaaaaaataaaaactgttgaataacaatcgcgcgccaaaaatctttccatattttgcgaaaagagattgcagctgaaaagtgaatatgagatgagtaaaatgcaaaggcaattaattgagaggcctcaattaaatttaaatcaacgccttctggttttcttgattgttgtttttattcctgctgcagtttcgacacagaaaaaaaaaataaataaaaaaacaaaaaatgagctacacagacctgcgactgtacatgagttcactgtagttgtgttagttagttgaaaaggccgcacccacaacgacaaacgcaatctcaaccagaggaaaaccacagctcttatacgacgacgtcatcccacttccacacaaacgcacgcacacttatgcattatcaaagaaagacgagagagtcagagtcgtcgctctctctctctctctctctctctgtttgtctgctggtttttggcgcgaacttattattttcgtgtttatttttagtcgtcttcgctgataagctttctgcgtgtgcgagtgtgtgtgcgttattatgcgtagtagtaactacgcacgcacgttgatgatgtttttcaaaaactcgtcgtgaaggtcacacacaccaacgaacgcaattcgcgtaagtacagcagcgccaaatgttgtgttttgttgtactgtgtggcaggtccaaaaacgggtcgaaaagcgaagcgaacaaaaacaaatcaattagacaaaagttctgttatctcggcctttattcctatcttgtttatattcttttttgctatgttttgatcaccactgtacttttaccacccagttggcgcgctataggaaatgcatacatattcctatgatatgataattcatattacggtattttgcatatttttactaacaatttacagcatcttcattatcatttgcatgtgtggattttttaccacgtaaattaagttttctaagcggtctatttgactttcgtgattatgttttgcttggccttcttcgccacgccccaaaaatgtgtgtgatattcccctaaatttatgttttctaattatgcattcagaaactctcttttgggctcccacataaatatttataatgtgagttctttgttttcatcgccgcctctctctctacacacatttcgtaaacaaaacgcgttttttttttgttgtgcaagatggagcgagacagagctagttggagcttcgtgcttataatgataacggtaaacgcactaccgccctcacactccccctttctctttctcaacacctgctttttacaatggacttgatcgctttgccgtttttccttcctttctgcttcttctcctctgtttcgcttgacgttctttgtcgctggcttataattttctataactgtacatttgattatatcgccagaagcagcgcgactctttggctgccagccatttccattctctttctcggggggcttcgagtttaaggaacacgtttgtatcgtccagaaagtaggcttatttcacttgttgcgcttttcgttccactttaatggatacatttggcatagaatcttaactgtatgtatttatcttgacttcgaaatgataagtttgcttcgtaatagcaagatactttcgttggaattcatagttctataattctaaatgaagcacctacatgattttttaattataatagacaaattactttgcgagtgtgtttaagtattcggttatgtaagctagacttggggccttcatgtttttgctgttgttcagctttccagcttttaggtcactgcgcagtgtctgcggtttggtgagcgtctttgtgcgatcgtgtaagctctagcggtttacgtgatgaggcaaccgcagctgccaagcgatagaggtttgatagaagtacagtcgcagctctctaactgaaactgacatttagctttcaaagaggaatttctgaaatttgaaatgacattctttgtgacattttttttagtactcaaataataaatatatatttgagtagtaaaaaatgatcattgcaggatttgtttatttttagatgcttagattgcttaaagatacacattttactttgacgtcatgaaacaatctcacatggattcataatgcaagtcgaagacgatcgactgaacttaatacactccagacgactgcattctgccattagcacttatcgctgtggccatgacatttagtatatcggccaacgatgatcaggtataggtttactttactgtacacttgcacaagtgtgcataattccagggcgataagaaagaagaaaaagcgaaacacccactgacacgtatgcagtagtaatgacgcttgcacttttaattttactttcccatttcccttttgcagcctgattagtcacagtattttatttagctattttacaatgccaaatactaaacgtttaccccctttttttcttatctcttcaggcatgtacaatgttcgcaagaccgtgaatggtatttcgaaacccaacgtcaagaatggttacaacaacaacaacaacagcagcagcagcaacaacaacagcaacatgaatattaataataagattgtggataatggtactagcgaattggcagatcagaagcagtaactttggatcagaatgacgatgacaaatagcccctggcggagcaataattgcaatatatgatattaattgtaaatgtaattttaatttctaaaataatttgtttatttttttgtacccccgccatacacagatacttttgtgtatggattgtacgtttgttttaaaccaagacttgacggtccaaaaatgttgttgcataacaaatgattaagtgaatggataaaagccaaccagaaacaacaacaaaagcaaccccagaaaagatcggcgcgcgtgcacggccaaaaacaggcaaaaaaaatatatgattaataattaataatagtaatatatccggatgcattgcgatatcggtcttataatggaaattattaagttaatggatatgtgctaatgttagacaagcgatcgacagcgccatgcatccactatatatagactaaaccccaacccaaaccaattcaagcgttctcagcgtgttttcgggtccagatgcacgcgtgtgccaaaagtatttacaatttactttgtgtcatgatctcaattattaaaaacaattttattattttgtttatctaaatgtaattataattgaaattatttaaaaattcttcttagcccacaaacaaacacacacacacaccctcgcccctctcattcacacaccacccacgcacacttttacacacacgcacacacacacactgtactcatatttattgtatgtacattatcgatgtgacattttaaattgtatgtactgtctatgtataaaaacttcgtatctatggcaaaattatttcccctttaagagacccccccattttcgaaattctattttgaacaaccaaactgtgtatattgtacggagtgtaaccaaactccaagcagctaaatgcgaaaaaccacaacaacaaatactgtgcatatttccttaaaaactttgtacgaaagcaagatgaaaaaaaaaaactattctactgtaactctcaagcggagagtagcagaaaaaaaccaaaacaaaaaaaaactcttaaaaatacaaatgtaaaacaaaaaaaaaaacatttaaaagctttttatttgcctacattggctttgttgtggagagggggtgccttttgggccgagatggcgtgataattctcaaccgtaaagaaaagcggagaaagatggaaagattcataaatggatggaatgagtcagcattcgagcctcgagctgcggatgcaacagtttctccattagacaagggccgctcccgcacagtgaaccctcgataataaaggaattttcgtagcagaagtggcgcctaacgttaccctagacggcatgatgactccgcatttatagaactggtaaatatcttcatcattttgaagtgcaaccatatgatggctatttatctaagctacgagtatgtatgataacgtttttttttttggccgagtccgcactgttctaattacattcgatgcagaggtttggtatgcgttcagaaagtgaagtggatcggaaaggaagtggaagacccattccaattagtgtgctttcccatgttcgctttcatcgctaatcatccgcagcaatttgagagacttcactgtgggcactcgtcggtctctcaatgggcgcacacatgtgcatatcgcccgcggcggacatttcggaaaatgctttctagtcgttatttgtgtgctattcgtcgtactagtgattgttgtatctacaatgtgtagctgtggagtggagtgggcacttaacattagattggctgcgacttccggcgagcgaaacgatcgttg

SEQ ID NO: 14282 - DNA, 1787 bp, DROSOPHILA
gtctttgactctccaccaattcggtcgcttgcgtttgctccagctgcgttcttttcgctctctttggctcgcgtgaaagtcgtaaagttcagctagctctctacgatacagaaaaagaaacgcatacaacaaattcgccagcgatagaaaaccgatttaaactgcaattgcaatgcctaaaatgcgtacgtgagtttcgcgcagtgatcgctgtgaaagttcaagtgaaagcggaaagaagaaacaaagcgagaatacttcaaaagcaataaaccaaaaagtgcaaaaatacctaaagtttaaacaaagaaaacaagttatacaaaaccatagccatgttgtgtccgccaatggccctgggcccatttctcgccgcccccgtgccacgcccaccgcccagcgcatcggagaagaagagaatctgtcggaacctattcaataacgctcccggggactcgaatatcgatcagctgttggcccaggagcagcacacgcagagattatacgttaaggaacgctacggatatgacatccagctggaatctaatcgggatgcggatgcgaatacggatgcggatgctgatacggatgcccattgtcaggtcctgcgcggaatgcggtatccgacctcaaggacgatatccagcaccgatgccgatgagtgcaatccaaaggcagtcagccaagcgccgaggggcatggccctgactcccgcccagatctccgccagcgcaaagctgatccttcagaaatgcccggaaagcgatcgcaaaaaaagcaacggcagtgcggatttggccaactgcacgcgacatggccaaaagccatatgcgaggcagccacaaggcctcaaaggcatgtacaatgttcgcaagaccgtgaatggtatttcgaaacccaacgtcaagaatggttacaacaacaacaacaacagcagcagcagcaacaacaacagcaacatgaatattaataataagattgtggataatggtactagcgaattggcagatcagaagcagtaactttggatcagaatgacgatgacaaatagcccctggcggagcaataattgcaatatatgatattaattgtaaatgtaattttaatttctaaaataatttgtttatttttttgtacccccgccatacacagatacttttgtgtatggattgtacgtttgttttaaaccaagacttgacggtccaaaaatgttgttgcataacaaatgattaagtgaatggataaaagccaaccagaaacaacaacaaaagcaaccccagaaaagatcggcgcgcgtgcacggccaaaaacaggcaaaaaaaatatatgattaatatcttataatggaaattattaagttaatggatatgtgctaatgttagacaagcgatcgacagcgccatgcatccactatatatagactaaaccccaacccaaaccaattcaagcgttctcagcgtgttttcgggtccagatgcacgcgtgtgccaaaagtatttacaatttactttgtgtcatgatctcaattattaaaaacaattttattattttgtttatctaaatgtaattataattgaaattatttaaaaattcttcttagcccacaaacaaacacacacacacaccctcgcccctctcattcacacaccacccacgcacacttttacacacacgcacacacacacactgtactcatatttattgtatgtacattatcgatgtgacattttaaattgtatgtactgtctatgtataaaaacttcgtatctatggcaaaattatttccc

SEQ ID NO: 14283 - protein, 228 aa, DROSOPHILA
MLCPPMALGPFLAAPVPRPPPSASEKKRICRNLFNNAPGDSNIDQLLAQEQHTQRLYVKERYGYDIQLESNRDADANTDADADTDAHCQVLRGMRYPTSRTISSTDADECNPKAVSQAPRGMALTPAQISASAKLILQKCPESDRKKSNGSADLANCTRHGQKPYARQPQGLKGMYNVRKTVNGISKPNVKNGYNNNNNSSSSNNNSNMNINNKIVDNGTSELADQKQ

SEQ ID NO: 14284 - DNA, 5079 bp, DROSOPHILA
tatccattttttacgcacgtcttttttattttatgtgccctgcaaaatgagttgccagcgccgccgacatattgcccgaactgcggaagaattccaaacgcatccgcgggttttggtccgccagcatactcgcacaattccactgacaagtgagtggtgaaaagaagtatcaaaacataaaattatttttagagccgaatgaaaaatactctgttaaaaaatattccaaattatttagatagttgtgtaaccctgttggtcattaagaatttacaatagactgacaaactttcaccttcaaggtaaaacgattttacctttgtgagcagatctttgggcggaaaattaaaaacacccaatatacatatagggtataacgtaaaattaaaagaggtccctgaaatggacagtggcatgggaaacctctgcgtagcaacaaatccgtcgagtattgggtatgcaaattaatttttttttacctatggaccagtcgttcagcccctccaccacccctcgctttttaaggacaccctggattccagcgccctcatgtgatgtgctgctgagccagcattttgtttcagatcagcggtagtcgccgtgtcatgttgggtaaaatttgtgaaaaaaaatggataaatcgaatagagggaatgtatttgaaaacataatatcaaccacaaaagttgagctggccatgccataaagaccatttgaaaagttataaggtgttgtaatataaattaacaattaagaaagaaatatatatatatattgggaaatacattttgtttgttagaaacaatgtacaatatatccaaaaaaaaaagttttaacgtcataaaacaaaatcagattttggctttttggcaaaatgggcttcaaaaatacggccacacaatgcgcagctgtcaaatcgaaaacttgtcaagtcaaggaaaatattcacttattgcactagggctgatttggattgttcaaatatttaagagcaataaagatggatttaccattgccaatactaataccatctagtgatgtgagtaagaatatgtatgcgctttctaacaactggttaaaataagtatccaaactcttcatgcgctcaatcaggaagtgtacgttatttccgattcggatgattccgattccgatgatatcagaaatgagcttatgaaactggaggataacaaggataaacccaaaaacaaggaacgccaaaagtctaagaatgaaaatagtcagataaaaatgaacaaatggtatttgaaagaattcgaagaccttatgggactcgaaattgcttgctccgatgatgaagacgatatagatgatcgtaatagcgaaatatggagcagctcggagtccgataaaattagcgattcagatgattccaactcagatggtaagtttccaaaaaggaaatgcatattaacaaagtaaggaacgttattttcaggatcgcccaccgaatggattaacagaataaagaatgtcaatctatttccattcaataaaaggttagcgatattaacaaatattttcggacttagtttacactagagtttttaattcctttcctttagtgctgaagatgaaaaaccaaaggcttgtgaagaacttccctcaataccagtttttactggtccgatgccatcgatgccgatttatgatgaagaaacctgtcaatttgaaatggtgccacccatcatacaaccagacttaattaaggaagtaacgtaagtcttaagttataattaagttacttccactaattctggcacacgaatcgcagtgacgcagaaatgccaattgagttggataaatccgattctgagttggaaaaagaaaagttaaaagccgatgaggatgacaacttttcggacagtaacaccagttccagttttagtttgagcagtttagatgattatgattatggtgaaactgatcttgatgaacagcataacgagaataaatgtacttactgggaggaaatgtcattgcgtcccgttgacaagggcgaagtttcacaagaagaactaatggctattttgaatgaagacgagagttccccagatcatcgaagtgaatgtgatatcgacgaagccattaggacccgtgatggctcagatttttacgaagatagtgctcagtttctggaaaacatggaaaatgttagcttgttggttatcaaagaggattcggtttttgcggattatgaattcgcggtaaagaaacttattaaactgatccaatcgacaccaagtcactacaaatacgagatatatattctgttatatcccttgttggtcctaacttatctccaaatgatggccagtgataagatacagaaagctaggatgcttcttgttcgctttcaagatcatctcgacgattcatatatatcaagaattataaagctaagagaaatttccaagccagcagaagttccgaataaagcacgcaaattattggctggccttgaaaaggtgaagattgaaatgtctgagggagcttttcgacagttacttctttgcacagaggaatggactagaggtcagcaagaaaaattgctgagccattttcaaatacagccttatagtgaagatgacaagccccagcaacgatttgccataggacagcctcttttggagccgatatggtatggtgctccagaacccttgcacaaaaaggactttgccgctcgtcctttttttcaaaaacgtcgcaagaaaaggagcgaaccacagttatcagataatttacatttgccaccggtaaatagggtttacaatccgattcccaacaaaatggatttgcttcacatgaagagtgatgaacagtatcgaatgaaattagatcggaataacctgccatcgacttacttgtacacaacttctccctccgatgaggtcgtgatttgtgccaccttctcggaaggcaatagcatgttggcactgggaactgtatcctctaaggtatatgttttctctctgaaaccctctaaattggttcaagtgaaagctgcacagtggctaaaaaatctggataccggaatggctggggttgataaggatatgatagatcccattaagaagttcaccagacgtactctgtacggacatcaaggacctgtctatggttgttcctttaatccagaggatcgctttctgatcacatgttccgaggatttcagcgttcgcttgtggtgccttctgtcctggagttgtgtggttattttttccggccatttggcaccggtttgctttgttgtttttgcaccaaggggttattatttcgccaccgcatcggatgattgtacggcgagagtttggatgcaggataatacgaaacccgcccgaattcttcaaggacatctggccgagctcggggtgtgcctatttcatccaaatcgtcactatatggccactggatctgctgattgcactgttaggatctgggatattgtcaaggctgttcaagtgcgcatttttcgtggtcataaaagcaggataaccgccttgatctactcaatttgcggtcgttatttggtttctggaggcgatgacaatctcatcatgatttgggacacagccaatgagattttgatgcagttctttgaccatcataaggcctcgattaataccatggaaatctctttggataataacatattggttgtgggtggacaggattgccagctgaccttgtgggactttgagcaggtgattaagaattacttgaacagggccaagataagtatgaaaaaccaggcgggaactcaagaatcgagtgccaataatttgctggtcagctcatttttcaccaagggagaaccattttatatgatccgctttacacgtcgcaatctcttacttggtttctgtgtgactcctcgagaatttgagaatgatgtcctcgacgtgaagcttaatcagaacaagcacaaggaggagaagaaaaaggaactcggcgaatggctggattttctagacaccatcaaattgaaggcttgttacgatctgaaggacgaaattaatttggatacttcgcaggtagagaaggagaacaaatcttaattattgtaagctctctcttaagtatttaaataaaaaactgtaaataaatgtatataaaccatcgaaagtttcaaatagaacgattgcgttttgtaattcacaaaaataatgcttacccgcaaaattatttttaaagcagggttgtttcatgttatttatggaataatattggagataaacatttcgtatgacaaatatacaagattttctgaagcagagacaaacccccagagcgaaggagaatgctgcagtaacaacaatttgacagtttcgaaaaaaaaaaaaacaggtcaggccacgtgtacagctgcccacgactcattcctccttgaaaaaaatccactcctcctgcaggagatttcttcgtggtcctcacatttacaaaaggcgtgcaaaatttatagaggcacgcattaaaaaatccgccaggcacgctcgactaactgcgtccaaacgcccatggggctggcagttgagcttcgaattggtcccggccgaccgcagtccgatgtccctcgtcctgcgtccttcgtccttcgtcctgtcccgcatccacgaaaaaaccccccttaagaataagcgacaggacaatatatttacgcaacttcttatgctgccgctttagccggtggttgttgtccttctctttcggcttcgaaaacagaactcaagtgttgtcgttgtccttgctgcccatgtacgctcccttggcaaccaaaatgccccagccccaccacctctacgccactgcagcatcttgcgtctcgtttgtagcagttatcttgtgggtcctgctgcgcgaaatgaaattgtttactccactgtcatatgcacgtgagccaagcgatgtggctggcatatccggaaatgcacagagaaaaatagctgaaatatactatttaaaaatatattacaacacttatgttctttgtcataaggaaaaaaactttttataaaatcaataaaacttaaaaactatttttaaaaggcttacatcgat

SEQ ID NO: 14285 - DNA, 2829 bp, DROSOPHILA
atggatttaccattgccaatactaataccatctagtgatgaagtgtacgttatttccgattcggatgattccgattccgatgatatcagaaatgagcttatgaaactggaggataacaaggataaacccaaaaacaaggaacgccaaaagtctaagaatgaaaatagtcagataaaaatgaacaaatggtatttgaaagaattcgaagaccttatgggactcgaaattgcttgctccgatgatgaagacgatatagatgatcgtaatagcgaaatatggagcagctcggagtccgataaaattagcgattcagatgattccaactcagatggatcgcccaccgaatggattaacagaataaagaatgtcaatctatttccattcaataaaagtgctgaagatgaaaaaccaaaggcttgtgaagaacttccctcaataccagtttttactggtccgatgccatcgatgccgatttatgatgaagaaacctgtcaatttgaaatggtgccacccatcatacaaccagacttaattaaggaagtaactgacgcagaaatgccaattgagttggataaatccgattctgagttggaaaaagaaaagttaaaagccgatgaggatgacaacttttcggacagtaacaccagttccagttttagtttgagcagtttagatgattatgattatggtgaaactgatcttgatgaacagcataacgagaataaatgtacttactgggaggaaatgtcattgcgtcccgttgacaagggcgaagtttcacaagaagaactaatggctattttgaatgaagacgagagttccccagatcatcgaagtgaatgtgatatcgacgaagccattaggacccgtgatggctcagatttttacgaagatagtgctcagtttctggaaaacatggaaaatgttagcttgttggttatcaaagaggattcggtttttgcggattatgaattcgcggtaaagaaacttattaaactgatccaatcgacaccaagtcactacaaatacgagatatatattctgttatatcccttgttggtcctaacttatctccaaatgatggccagtgataagatacagaaagctaggatgcttcttgttcgctttcaagatcatctcgacgattcatatatatcaagaattataaagctaagagaaatttccaagccagcagaagttccgaataaagcacgcaaattattggctggccttgaaaaggtgaagattgaaatgtctgagggagcttttcgacagttacttctttgcacagaggaatggactagaggtcagcaagaaaaattgctgagccattttcaaatacagccttatagtgaagatgacaagccccagcaacgatttgccataggacagcctcttttggagccgatatggtatggtgctccagaacccttgcacaaaaaggactttgccgctcgtcctttttttcaaaaacgtcgcaagaaaaggagcgaaccacagttatcagataatttacatttgccaccggtaaatagggtttacaatccgattcccaacaaaatggatttgcttcacatgaagagtgatgaacagtatcgaatgaaattagatcggaataacctgccatcgacttacttgtacacaacttctccctccgatgaggtcgtgatttgtgccaccttctcggaaggcaatagcatgttggcactgggaactgtatcctctaaggtatatgttttctctctgaaaccctctaaattggttcaagtgaaagctgcacagtggctaaaaaatctggataccggaatggctggggttgataaggatatgatagatcccattaagaagttcaccagacgtactctgtacggacatcaaggacctgtctatggttgttcctttaatccagaggatcgctttctgatcacatgttccgaggatttcagcgttcgcttgtggtgccttctgtcctggagttgtgtggttattttttccggccatttggcaccggtttgctttgttgtttttgcaccaaggggttattatttcgccaccgcatcggatgattgtacggcgagagtttggatgcaggataatacgaaacccgcccgaattcttcaaggacatctggccgagctcggggtgtgcctatttcatccaaatcgtcactatatggccactggatctgctgattgcactgttaggatctgggatattgtcaaggctgttcaagtgcgcatttttcgtggtcataaaagcaggataaccgccttgatctactcaatttgcggtcgttatttggtttctggaggcgatgacaatctcatcatgatttgggacacagccaatgagattttgatgcagttctttgaccatcataaggcctcgattaataccatggaaatctctttggataataacatattggttgtgggtggacaggattgccagctgaccttgtgggactttgagcaggtgattaagaattacttgaacagggccaagataagtatgaaaaaccaggcgggaactcaagaatcgagtgccaataatttgctggtcagctcatttttcaccaagggagaaccattttatatgatccgctttacacgtcgcaatctcttacttggtttctgtgtgactcctcgagaatttgagaatgatgtcctcgacgtgaagcttaatcagaacaagcacaaggaggagaagaaaaaggaactcggcgaatggctggattttctagacaccatcaaattgaaggcttgttacgatctgaaggacgaaattaatttggatacttcgcaggtagagaaggagaacaaatcttaa

SEQ ID NO: 14286 - protein, 942 aa, DROSOPHILA
MDLPLPILIPSSDEVYVISDSDDSDSDDIRNELMKLEDNKDKPKNKERQKSKNENSQIKMNKWYLKEFEDLMGLEIACSDDEDDIDDRNSEIWSSSESDKISDSDDSNSDGSPTEWINRIKNVNLFPFNKSAEDEKPKACEELPSIPVFTGPMPSMPIYDEETCQFEMVPPIIQPDLIKEVTDAEMPIELDKSDSELEKEKLKADEDDNFSDSNTSSSFSLSSLDDYDYGETDLDEQHNENKCTYWEEMSLRPVDKGEVSQEELMAILNEDESSPDHRSECDIDEAIRTRDGSDFYEDSAQFLENMENVSLLVIKEDSVFADYEFAVKKLIKLIQSTPSHYKYEIYILLYPLLVLTYLQMMASDKIQKARMLLVRFQDHLDDSYISRIIKLREISKPAEVPNKARKLLAGLEKVKIEMSEGAFRQLLLCTEEWTRGQQEKLLSHFQIQPYSEDDKPQQRFAIGQPLLEPIWYGAPEPLHKKDFAARPFFQKRRKKRSEPQLSDNLHLPPVNRVYNPIPNKMDLLHMKSDEQYRMKLDRNNLPSTYLYTTSPSDEVVICATFSEGNSMLALGTVSSKVYVFSLKPSKLVQVKAAQWLKNLDTGMAGVDKDMIDPIKKFTRRTLYGHQGPVYGCSFNPEDRFLITCSEDFSVRLWCLLSWSCVVIFSGHLAPVCFVVFAPRGYYFATASDDCTARVWMQDNTKPARILQGHLAELGVCLFHPNRHYMATGSADCTVRIWDIVKAVQVRIFRGHKSRITALIYSICGRYLVSGGDDNLIMIWDTANEILMQFFDHHKASINTMEISLDNNILVVGGQDCQLTLWDFEQVIKNYLNRAKISMKNQAGTQESSANNLLVSSFFTKGEPFYMIRFTRRNLLLGFCVTPREFENDVLDVKLNQNKHKEEKKKELGEWLDFLDTIKLKACYDLKDEINLDTSQVEKENKS

SEQ ID NO: 14287 - DNA, 3651 bp, DROSOPHILA
gtagagtccccgtggaaatcacagtgagcctaccgagcagcgaacttactttaatcttcgagaatattactctgcctctggtccaattaatgttgagaagaggagctcctgccacggaaagatggaagcactgaggcaatggagcagtggagcagtggagcagtgagtccctgggcgactcatttgcatgaaagggttggcgcctccaggtggtaagtcctttatgcgaaatggaaagtgtgcattagcaccttcacttgcgccgcactgaattatcgcagcactcgagaattcatcgagcgattcatttcctaggcaactgaccccgcttgacccatggaccaacacggacatgccagtccacccgctgctgaaaaaggtcaatttaaatgccgtaaattatgcacgagacgagcatttaagcgctcgttaaaggccgttatcccattgccaggattctccactggagcccgtcggacgcgtggcactcattttcacacatactcgcactccggtcgcctttctgtgtgacaataaatttgattaaatttttaactttttcgttccgtttaaggccatctcgtttgacataaccccgtcataaatttccaagccaaagagcatttatgtgtgttggctggatcgcaaatgtcccatcgccgaacaagctgaacattttcatggaaattgccatattattagcagcttcacatggcccccactattcgtgccaagaatccgcatgctatccatccccaaactgcgcgcttgatggcaatttaaattatgctcagctgaactactcgcccaaccgcaaacggcaataaaattgcgaggtatatggtctcattccgcacttaagtatccatttcccccttacatgtatcccaaatgattcccatcacatgctggtagctacaaatatagtatcctttccatgtaacatctacaatgtagcacaaattttgtgatatatggatataatcccttcattgcatcattaatatctacgtgtccttctcttgaaactcagccaaatgccattcctgctggcggtgaggaaggtgagcggagacacctccaccctgcactgatcctcatccgccagctggacgcagtggtcctgcagtagtgtggtcagtgcagccttcgtctggagcaggccaagtcgcattcccggacacattcgtggtccagctccgaagcccagaaaccgacagcccattggtggctgatttagaaagcgttctggacgaaactggttgggtgccggatacaatgcgggatctctgaaatcgaaaaagactgtagttcgtagacaatctgaagtctcactgaagtgtcactcacaaatgaatggcctgaaccggcaacaccagcacggtgcccaaatgcaccttaagttcgctgctcgctcctgatttctgatcaggaagggtgaatgtcttggtgcagcgcttctgcagagcctgcatggccggatgaagacgcagtgcctccaagagcgcagcttcgctatagcgaagttcacccagagccactggatcaatcagattgccagcgtggcgctgggccacttcatccaattcgatgtgtaaccgtcgctgtgcatcctcattgagggccaattcgtagagggcgaaggcgagtagcatcgccgaggtttcgtagccctccagtaggagagtggtggcatgtccagctagctcctcctttcccaagcctcttttgctttccgccagccattgcaagaggttgtcgccaccacttcgggcttccaccaattccctgaaccagtgctgcaggggcaggggtacgtatctgtataagtggatagtggatcaaaggttacacattggcgagttccacattaccaaccggtggccaatgagtctacccaatcgaggcgtgtgcaacagtgacatggtctccagcaaactccaaacgcttggctgaaagagcggagcgagccattccagccagcgacttggttcatgagccaccctcatgtgaatccccaggcaatgtgcatccagaccgaagatcgcggaggcaaccacttgtagcgtataacgcgtggccaagtccttggcctcgaagcgtccaaggggcacctgatcccggagcaactgacatgctctggccacatgcggcaaggtctgacgcactcggctgggtgtgaagagcggcaccaggtcggcccgcaagactcgccagcggtctccgttggcgatgaagggattgtggctagccaggacatcgcgctggtggtccacataaacggcgttgtccgcacagtcggcaaagttacggcccaccaggatctggcgcagcaactcctggtcacgcaccagaatggcgggttcgttaaacaggcgatagaaacccacatatttcaggcccggattccgactgtcaagaaaagttcattgcacgtggccttgaaggactcttaagattagtgtatcttacgtatagatttcctggtaaatctctccatatgagcggcggcccagggcaaagtccaacatattcccaaccaatggccagccaaaaggtgcctccagtcccaggcgacgccagtgattgccctgccatttccaaaacaggagcgtggcggccaataggataaatagcaccagtggcagcattatcgatgagcatctgaaaagcttgaaaggcacaatcccactcaacttgcattcccagttgagttgaatatctcaaagcagctgagagtgaaccacgttgcgtgattccatgattgcgcctcattagccacgtaattgctgtatatcaatcaactgacgggtatgtttcaatcacgcaagattcgagacagctagcattgggctttgaattaatttctataaccactatgactcaatatgttttcggataataatcttagtatttcaacttatatgcattgtacacatccattcagttttaatttatttagtgcatttcttctgttcaaaattttgttttttttttctgtgcttaacattcaatttgacaatcgtatccatttgcgagtcaaatcagatgtgttttgtggataccctgtaactttccatcttgcagattacggccactgtggcagcaagcggcgattgatcagcggaggaggaccctgcgaaggaaggaggcatctatactgcatgcggagcgcatccgtgaagtccctgcgccatcagcagatcaacggaggaggtggaaccctaagtggaactggagctggaaatggcgagtgctgcagccgggtgcacaggatgcgccaacagatgcagctgcagcagcaaggctacgtgagcgacaatgaatcccggcgcaagtcattgtcgcagcccagtctgcgtatcacggaagcgggactgcggaggtgagtgcttcagggtattctcatccacatatgaccgaccgattcgtgtgtcgattttcgctttcacggtaccttgcagatccaacgaaaccaagagtctggagagcaagaagcgtgtggtcaagatgctgttcgtcctagtgctggagttcttcatctgctggacgccgctgtatgtgatcaacacgatgaccatgctccttgggccgacggtgtacgagtacgtgggctatacctccatcagtttcctccagctgctggcctac

SEQ ID NO: 14288 - DNA, 1473 bp, DROSOPHILA
atgctgccactggtgctatttatcctattggccgccacgctcctgttttggaaatggcagggcaatcactggcgtcgcctgggactggaggcaccttttggctggccattggttgggaatatgttggactttgccctgggccgccgctcatatggagagatttaccaggaaatctatactcggaatccgggcctgaaatatgtgggtttctatcgcctgtttaacgaacccgccattctggtgcgtgaccaggagttgctgcgccagatcctggtgggccgtaactttgccgactgtgcggacaacgccgtttatgtggaccaccagcgcgatgtcctggctagccacaatcccttcatcgccaacggagaccgctggcgagtcttgcgggccgacctggtgccgctcttcacacccagccgagtgcgtcagaccttgccgcatgtggccagagcatgtcagttgctccgggatcaggtgccccttggacgcttcgaggccaaggacttggccacgcgttatacgctacaagtggttgcctccgcgatcttcggtctggatgcacattgcctggggattcacatgagggtggctcatgaaccaagtcgctggctggaatggctcgctccgctctttcagccaagcgtttggagtttgctggagaccatgtcactgttgcacacgcctcgattgggtagactcattggccaccgatacgtacccctgcccctgcagcactggttcagggaattggtggaagcccgaagtggtggcgacaacctcttgcaatggctggcggaaagcaaaagaggcttgggaaaggaggagctagctggacatgccaccactctcctactggagggctacgaaacctcggcgatgctactcgccttcgccctctacgaattggccctcaatgaggatgcacagcgacggttacacatcgaattggatgaagtggcccagcgccacgctggcaatctgattgatccagtggctctgggtgaacttcgctatagcgaagctgcgctcttggaggcactgcgtcttcatccggccatgcaggctctgcagaagcgctgcaccaagacattcacccttcctgatcagaaatcaggagcgagcagcgaacttaaggtgcatttgggcaccgtgctggtgttgccggttcaggccattcatttagatcccgcattgtatccggcacccaaccagtttcgtccagaacgctttctaaatcagccaccaatgggctgtcggtttctgggcttcggagctggaccacgaatgtgtccgggaatgcgacttggcctgctccagacgaaggctgcactgaccacactactgcaggaccactgcgtccagctggcggatgaggatcagtgcagggtggaggtgtctccgctcaccttcctcaccgccagcaggaatggcatttggctgagtttcaagagaaggacacgtagatattaa

SEQ ID NO: 14289 - protein, 490 aa, DROSOPHILA
MLPLVLFILLAATLLFWKWQGNHWRRLGLEAPFGWPLVGNMLDFALGRRSYGEIYQEIYTRNPGLKYVGFYRLFNEPAILVRDQELLRQILVGRNFADCADNAVYVDHQRDVLASHNPFIANGDRWRVLRADLVPLFTPSRVRQTLPHVARACQLLRDQVPLGRFEAKDLATRYTLQVVASAIFGLDAHCLGIHMRVAHEPSRWLEWLAPLFQPSVWSLLETMSLLHTPRLGRLIGHRYVPLPLQHWFRELVEARSGGDNLLQWLAESKRGLGKEELAGHATTLLLEGYETSAMLLAFALYELALNEDAQRRLHIELDEVAQRHAGNLIDPVALGELRYSEAALLEALRLHPAMQALQKRCTKTFTLPDQKSGASSELKVHLGTVLVLPVQAIHLDPALYPAPNQFRPERFLNQPPMGCRFLGFGAGPRMCPGMRLGLLQTKAALTTLLQDHCVQLADEDQCRVEVSPLTFLTASRNGIWLSFKRRTRRY

SEQ ID NO: 14290 - DNA, 3831 bp, DROSOPHILA
cggaggaggcaagcctcagagtgtcgttgctgttaagaaatttttctacgtgtactttctaactttccgcaaatgtggccaattttagctcgtagtcaagtcaatcgcccctctgtttgtgtaaatagctaatgttttggttcgaaatttgttcgttaatttatacaaacccaaataccgaatactctgtaaccccacacattcaacacagtactaattttaaagtgagcgcgctaaataaacgtgtgttttttacaataaaacggtgcttgcatgtgttgtgtttttgcagttgtcactattaatttgaacgtagttgttagtgccgaccaggtgagaacggaacagctgagccgcgttgccaactacgtcagttgccttcccttgtttgcgcaaaacagatgctgcgccgcagttgttgttgacgtgacgtaacgaccggcgacgcaacaacatgaaatcgaatttatttatggctcggaagtcaattgattttaattgcagtcgccgtataaggtgaatttaaatgtttattagcccgaagtgatgtgctggcgacaaatcgataacagcgaatgggccgagtatgcgatcgtttgattttgaagtgcgacacgtgtgtagggtgactggagaacttttaaactggaccacccacctgtgcgttccacatgcgattgtttgcttgtgactttcaaaccgcattgtaaattcgcaattatctaacagcgatttcagtgtaaatacaattcgggcacgtcgaagtgataatttcggattcgcgtcgcgaagagattagatttgagcacccggcgacgacgaccatggcctgatacaccagattgcccgtgaatctaggcaatatattgagcttcacctgtccagatgcagaaaggcccagctaacggcatcccacttcagtgtttcacgtaagagcttgcgccgctgaatctcgttgcgtagcgcacgttacgtcagtgaccgttacgaaatttcgaaaatgaaggagtggctgaagatctcctgcctcctctgtgtctttggctgcatccgcgagatccgtccgtcggagccctacgtcacggagtacctgctgggtccctggcggaatatcacggagcagcaggtgagtggcatctcccaccatctatccattccatagaatatcaaatttcttcccattccagctaacgcacgatgtttacccagtgggaacctattcctacctggtgcagttggtctttgtatttctcataacagattttctcaggtaactattcgctgaaaattatttatcttttaaattaaggataaaatgtattttcttaaattaaacgtgggactgagttgctatcagccaatttgatatttatattttataacaaaaattgttcgtaatcaaatacgaaaccagtcattttatttgtaaccagaaggtgacctactccaaagtcaaacttttgccttcgctagccaaaaatttattgtgattcagcaaattgaattcgatttgatagctttgcaattaaaagctgttcgaacggaaacaggcttcattttataataactatatgtattatgtttcagatacaagccgctgatcatcacaattggagctgcgggtgtgataatatggagcatgctcatctggaccaccagcttgctgtcgcttcagatcctggagttcttcttcggcacttacatggccgcagaggtggcctactatacgtacatctatgccaaagtggacaagaaatactatgccagagtgacctcccacacccgagcagccatgtttgcaggcaaactggtttccggcatcacttcccaacttatgctcaatctggagctgatgaactacaaggagcttaactatataacgctgggcagtacgtacaataaatgacctacaacttggggcattaatcatgcacatatattctacagctcagattatagccatgctttgggcctttggcctgccccgcgtggataggagtctttactttcatcgggagcagttgtccattacggagccgcagactcagctacccggggtgggaaacctggctgagatggatcagcagcaggagaatactcagaagcagccaggagcactgagccttctttggctacattttcggaatgcatacaccaatccgcgagtcgttcagtggagtctgtggtacgccattggactggctggttacctgcaggtcacttactacgttcaggttctgtggaaagtgatcgaaccggagcctgttattgcgtggaacggcgccgttgatgctgtcctgacagctctggctgctctaagtgctttggccgctggttatctgcacaccggaaggctcagaccgcgagcatctcttctgatcctgggcattctgtccgccgtggagggcggatgtgtgctgatctgttgctggacacaggacatctactggtcgtatgcgggctttgtgctcttcggcgccctctacggctttaccatcacggtggcgaggtaagtcttatgatattcataggcactccatatatagatgaattttaatttttttggcagtgctgaagtggccagaaatctggaggaggaaagcttcggccttgtctttggtgtgaacacctttgtggccctcattttccagtcactgttaaccataatctttgtcacggacactggttttgagctcgatcccgttggccagtacacggcgtatgcattctattttattggcgtcggcgtcttgtatctgatatccgtgctgattgagtacttaatgtgccgcaacaacgacgtcgaaaagctggaaaattcactggattgagttccgaggcatttagatagtacttaaggtgaaaacacaacacgttacttaaagaaagactggttcctgtgcgtgaactaccataatatggtattcgtgcgatggtcgattgtattcccagaatatttaggtcatctttttattaccaatctgttggcgattcttagtatttagtagaaatttccatttatagagcgcgtgtaatcagtctcaagtgtgcaggaataaagataccgagttttagtatagaataattgtgtgttttattaatattatcttacgattattacgtttaatttatagagcaaagtaatcgaagtaaaaagcaagcgtttaagtttaaatacatattattaatcatgtagtctagatccgaatatgacaacaatcgttatagatttcaattattttgttgatactattacccggaacaatttcttttgcacttttaaagcggctatcgctgattattaacttatcagtgttgatattttgcattaatagattacagaaacattaataaacaagtgtgtaaggctctctgagaaattcagtgcaagatagatccatttaagtgccctgctaatgggctaattagctgctaatggctggtatggccaacttggagtgggaaccgcatcaggcgagagcaagttaatcgcgatcgtgaccatgctgctcgctgtaagcggaaacttcccggatattccattacctcactgctccgctggcctgcaccaaatcggagaacacttggatcgtaaatcgcgaatgggccagcgctgattacaagcgtcgaaggtaaatctctatactcggcactagcctgctaaccccttggaagaatgtgcaattattataatagctggtcgaagctacacgctgccagacatatatctatatgtatgtacatatagtcggtgggatcgctggttggcgttaagatcgcgattagattcaagccgacagccgtaacgggatggagtcgtggctgaagata

SEQ ID NO: 14291 - DNA, 1335 bp, DROSOPHILA
atgaaggagtggctgaagatctcctgcctcctctgtgtctttggctgcatccgcgagatccgtccgtcggagccctacgtcacggagtacctgctgggtccctggcggaatatcacggagcagcagctaacgcacgatgtttacccagtgggaacctattcctacctggtgcagttggtctttgtatttctcataacagattttctcagatacaagccgctgatcatcacaattggagctgcgggtgtgataatatggagcatgctcatctggaccaccagcttgctgtcgcttcagatcctggagttcttcttcggcacttacatggccgcagaggtggcctactatacgtacatctatgccaaagtggacaagaaatactatgccagagtgacctcccacacccgagcagccatgtttgcaggcaaactggtttccggcatcacttcccaacttatgctcaatctggagctgatgaactacaaggagcttaactatataacgctgggcactcagattatagccatgctttgggcctttggcctgccccgcgtggataggagtctttactttcatcgggagcagttgtccattacggagccgcagactcagctacccggggtgggaaacctggctgagatggatcagcagcaggagaatactcagaagcagccaggagcactgagccttctttggctacattttcggaatgcatacaccaatccgcgagtcgttcagtggagtctgtggtacgccattggactggctggttacctgcaggtcacttactacgttcaggttctgtggaaagtgatcgaaccggagcctgttattgcgtggaacggcgccgttgatgctgtcctgacagctctggctgctctaagtgctttggccgctggttatctgcacaccggaaggctcagaccgcgagcatctcttctgatcctgggcattctgtccgccgtggagggcggatgtgtgctgatctgttgctggacacaggacatctactggtcgtatgcgggctttgtgctcttcggcgccctctacggctttaccatcacggtggcgagtgctgaagtggccagaaatctggaggaggaaagcttcggccttgtctttggtgtgaacacctttgtggccctcattttccagtcactgttaaccataatctttgtcacggacactggttttgagctcgatcccgttggccagtacacggcgtatgcattctattttattggcgtcggcgtcttgtatctgatatccgtgctgattgagtacttaatgtgccgcaacaacgacgtcgaaaagctggaaaattcactggattga

SEQ ID NO: 14292 - protein, 444 aa, DROSOPHILA
MKEWLKISCLLCVFGCIREIRPSEPYVTEYLLGPWRNITEQQLTHDVYPVGTYSYLVQLVFVFLITDFLRYKPLIITIGAAGVIIWSMLIWTTSLLSLQILEFFFGTYMAAEVAYYTYIYAKVDKKYYARVTSHTRAAMFAGKLVSGITSQLMLNLELMNYKELNYITLGTQIIAMLWAFGLPRVDRSLYFHREQLSITEPQTQLPGVGNLAEMDQQQENTQKQPGALSLLWLHFRNAYTNPRVVQWSLWYAIGLAGYLQVTYYVQVLWKVIEPEPVIAWNGAVDAVLTALAALSALAAGYLHTGRLRPRASLLILGILSAVEGGCVLICCWTQDIYWSYAGFVLFGALYGFTITVASAEVARNLEEESFGLVFGVNTFVALIFQSLLTIIFVTDTGFELDPVGQYTAYAFYFIGVGVLYLISVLIEYLMCRNNDVEKLENSLD

SEQ ID NO: 14293 - DNA, 2541 bp, DROSOPHILA
gctgcacttctgacagcattattatgcggtctcaattaggagattgcagaatctcggagtctgcagatcaggagcaggatgcgctataatgcgcctgtctgtcagtagccacagcccattaagaacgaccaggaaagccatccactcacaaagtatttagactgtgaccccagatgattcgaagtggcgactgaatattcgcttgccagacaaatgatttatttttaaatacgttttctattgtagtttgctctgacgaaagtgtcgaaaatgcgtttcgggaaactcaactatgtggagatcggcgcttaaaaggataatgaaatattcaaccccagaaagtcgttcaaacataaatttccaaacaaattaaattagttaatctgaaaattatagtgattataaccaatttatgagttataatcaattccgagcttattcattttcgatattttccgaatgtttattaatttttttcgatatttacatatatgtactaaatcgaaccttattttaaataactaaatcgcactttttttcgtaacaaataattattcccgtttttactcctcagccaattctatatttaaagccaaacaagttcttatacagaagggctaccaattcacgaagatcaacaattttaccaagtattcaaagatctaaccaactgccaaattgctattctatttgggactagtctttcttttttatccttggcgccgattccaaatgtgttatctatactgattatcatctcgatccgtttccggatcttcagtcaaatcagtagttggcggtggatccgtttccgtatctggatcggatttcgtaaactcatccggttcaagactgcccacaagtcccagatcttgggtctctggctcaaatggatcccaacacggagccttcggtggttcattgataatcgaatcacgcatggcacgcattcccatctcaagggcgcagtccatggaatttctgtcaggtggttcgcgggttagaggcccattgaaatgcacataaatgtctccctgggcagccaaatctagtccgtaggtggttagatcctcaccaaagaccagctgcgtggcgcccggatccgtttgcgtagtcctcatggcggccagcagcccaatgatcccaaattgatctgacagcatcgtggccggaatattagtgaatttcccatcgtctgtactacgtattcccgcggcatttgtgttcgttgaggaggaggtagatgccacctcgggctcctgcaacactgattcataagagggctgaccaaaaagatcagcaaacgtgggcatcgacggctggcgatcgtagagttccgggaagagtttgtaatccgattcgatttcagattctacgctcgaagtgctgacgacttccggtggctcttcgctgggcggatccggcaagggcggtggacgttgtggctctaccttttctgcactgggtgcagtctcctgtttcttctttctcagcgctatcgagggattcaccttacatcgtggacgtcgacgccgtgtcattttttatctttttatcaaaaaatgtccttgacttgtgtctgtgttcgagtgttgtggggggcttgggtggcagttgggtggacgggtgagtgtgcgtggataatctcggactcagatagcttgattcataaatccttatctcgaagcctatttgagaagcgcctatcaccgccttcctttgtgctacactacaacaaattttgatctgttttgatgaataattcaaatgaaaactgattgtgatcgcattgtgtgtgacgagtagagatatttctaatgaaatcaataatcgaaacaatgtttaatcattaccgctttcgctaatacattatgaatataaatttagttatatgataatatatacttattttttttgaatatgaagttaaaagctttagttatatttgcaactttattgtttctccattaccgttcccctactttctcccctcacaaacaaattgcatgagtattcacactttgttaattaattaggtggtgcgtgctctcaccggagaactttcaactttatgcttgtcataaatatttacaacttccttctggccataaaaatcctacacaaagtaccaactccaatgaggaaaaaagagactgcgtcaacgtgaacgaaacagaaatcattttgctttactcccaacatttttagaaacattctatatataattggagaaatgactcgggagaagatgaagtggtagatgtgcgtgggatggggtggaaacttgttgtttgccgcccataaattgatcagtttattagattctaagacccgaaaaatatttaattgatttatgctcaatgagtcaaaagtcaggctaaagtcataaactggatgcctgggaacaaaaggatataatgagttgaacataaaggggattagtagaaagcgatttggaagtttgggaatgacaaccgaaattaagtgtatttatattataggatagatatagaaataatgcactttttatataaaagttca

SEQ ID NO: 14294 - DNA, 541 bp, DROSOPHILA
atgacacggcgtcgacgtccacgatgtaaggtgaatccctcgatagcgctgagaaagaagaaacaggagactgcacccagtgcagaaaaggtagagccacaacgtccaccgcccttgccggatccgcccagcgaagagccaccggaagtcgtcagcacttcgagcgtagaatctgaaatcgaatcggattacaaactcttcccggaactctacgatcgccagccgtcgatgcccacgtttgctgatctttttggtcagccctcttatgaatcagtgttgcaggagcccgaggtggcatctacctcctcctcaacgaacacaaatgccgcgggaatacgtagtacagacgatgggaaattcactaatattccggccacgatgctgtcagatcaatttgggatcattgggctgctggccgccatgaggactacgcaaacggatccgggcgccacgcagctggtctttggtgaggatctaaccacctacggactagatttggctgcccagggagacatttatgtgcatttcaatgggcctctaa

SEQ ID NO: 14295 - protein, 180 aa, DROSOPHILA
MTRRRRPRCKVNPSIALRKKKQETAPSAEKVEPQRPPPLPDPPSEEPPEVVSTSSVESEIESDYKLFPELYDRQPSMPTFADLFGQPSYESVLQEPEVASTSSSTNTNAAGIRSTDDGKFTNIPATMLSDQFGIIGLLAAMRTTQTDPGATQLVFGEDLTTYGLDLAAQGDIYVHFNGPL

SEQ ID NO: 14296 - DNA, 5479 bp, DROSOPHILA
cgctgaagtgcaggacatccttgccggctggatcctcctcccagggcaaatcgccggagggatcacgcatgaaagtgatcatggagctgacgctcagctgccggtcgtagtccttgtggaagtcgccatccttgtagtgtttaatggcgtaggggtccggcgataccttcaacttcttgcacagtttcttgcgatcctgctgtccgcaatctagcagcaacattgtcccggttccccgtatcgcctccgccgcctcacggaatatctttagctcagcagcagcggacttcgcactggtcacgtagagcgcgaggacattgttcttggtgcgcagcagcttcttgaagtccttatactccgcgatgtcatcctgcaccgccgaggttttcgattttgcggcaacaagtgccaccagcagaagaaaaacaaactgaccggttatccacatcaggcggcttgaactttacacctacaggtaacaattgacctaactgatgctatactagttagtgcgctctaggtaattgcatgtttaacacaacattaaagcgtcattcttattttacaaaaagaaaaaccgcaagtagaagacgtggactagttgagaaacctatcgataggcaactttgaaggagatggcaataacagcttggatcaaagtgccggctattcgaaaaacacctgtaccatcaccaaccagtgctgacgcttagcaagcctagcggccaaataacttaaaattaatattaaaggattaatactaaatataaatatattggaaaacaattgcaaatacatgtgcactaaaatgtgcactgtactaaaatattaatgacgaacagcttttaagtcaggtacagctgttgatttattaaaagattaattgaaagctaatttttattaggttaaaaatagccatatccaaagagcttgcgactatcgatacgccgattagcagcgcctgtacgtggcaggcgacaaccctatgccagctctgacacattaacgaagcgaagaagaagagcagcggaggcagcaaaagagtttttttggtctcgccgcaattaattagtgttttcgcagacagccatagttggcccaaaccgtggaagatgcctctcaaactagacatcaagcgtcgcctgacgtcgcgctcggatcgggtcaagtgcgtcgatctccatccggcggagccgtggatgttgtgcgccctatacaatggccacgtacacatcatgaactatgagaaccagcaaatggttaaggacttcgaggtctgcgacgtgcctgtgcgctccgcccgtttcgtggcacgcaagaactggatcctcaccggctcagatgacatgcagatccgtgtgttcaactacaacaccctggagaaggtgcactcgttcgaggcgcactcggactatctgcgctgcatcgcggtgcatcccacacagccgctggtgctgaccagcagtggtaagtgaacggcggggtggtgtgactcccatttcgtcacccaatgtttacctagtgcaccagctgggaagtatgcttcggtttcgtgtcttattcctgtttcctctttattctatagatgacatgctcatcaagctttggaattgggagaagatgtgggcctgccagcgtgtcttcgagggccacacccactacgtcatgcagatcgtgtttaacccgaaggacaacaacacctttgcctccgcctcgctggatcgcactgtcaaggtgtggcagttgggctctaatttcgccaactttacgctggaaggacatgagaagggtgtaaattgtgtggattattaccatggtggcgataagccatacttgatttccggtgctgacgatcgtttggtcaaaatctgggattaccaaaacaaaacctgtgtgcagactttagaggggcatgctcagaatatctccgcagtctgcttccacccggaattgccgatcgtgttgactggctcagaagatggcaccgtccgcatttggcactctggcacttatcgcctcgagacctgcctcaactacggcttcgagcgggtgtggaccatctccagcatgcgcggcaccaacaacgtggctctgggctacgatgagggttccatcatcattaaggtgggccgcgaggagccagcaatgtctatggacgttgtgggaagcaagatcatttgggccaagcactccgaaatgcagcaggttagttagacaataacatatcctttcaactttatttcttacttcgttcttttcttctaaaggtcaatctaaagactattgctgatggcacagagatcaaggatggcgaacgcttgcccgttgccaccaaggatatgggcgcctgcgagatttacccgcagaccattgctcacaatcccaacggtcgtttcgtcgttgtatgcggcgatggcgagtacatcatctacacatcgatggccctgagaaataaggctttcggttccgcgcaagaatttgtgtgggccctcgagagcaacgagtacgccatcagggagaacaacggcaccgttcgactctttcgcaacttcaaggagcgcaagagttttactccagagtacggagccgagagcatatacggtggctactatttcggtgtaaaaacctcatccggattggccttctatgactgggagacgttgcaactggtgaggcgcatcgaggtgcagccaaagaatgtgttttggaacgaaagtggcagtctggtctgcttggccacagatgactcctactttgtcctgggggtggacactgcccaggttgccaatgccgtagagaccaaggagggactggaggatgatggtgtggagagcgctttcaatgtgctgggtaagttgataccaattatctaatatgtatcttatctttagaatacgtgtctcaaacacgatttctcaaatgagattccgctttcaatattcctatagagagcatacaacaatggtttactctgtatttcaccatgagagcaaactattttaaatttaaatttaaaaaaatatttccatttaccacataatagcaagaaagtataattgtattgtattatgcatttgtgttgcaggcgaggtttcggagtgcgtcaaaacaggactttgggtgggagactgcttcatctataccaactcggtgaaccgcatcaactactacgtgggcggcgagattgtgacagtatcccacttagaccgcacaatgtatctgctgggctacgtgcccaaggacaatcgtatttacctcggcgataaggagttgaacgtgatcagtttctgtctgcagctgtccgtgctggagtaccagacggcggttatgcgaagagactttgagcgcgcagacgttgtgctaccgaccattcccaaggagcaccgcactagggtggcacattttctggagaaacagggctttaagtcgcaggccctgcaagtctctaccgatgccgaccataagtttgacttggccttacagatcggagatttggaaatcgccttaaagctggcccgtgagtcggagaactcccagaagtggtcacagctggcagatgtggcgtctagcaagaacaacatgtctctggttaaagagtgcatgcagaaggcaaacgacttaagcggtctattgctgctctcaacagcttccggcgatgcccagctgctcgaggtggtgggtgcggctggctcggcccagggacatcacaatctagctttcctctcggcgttccttcgttcagacgtggaacgctgcttggagattctcattgagacaaatcggttgccagaggcagcgttctttgcccgcacctacctgcccagccagatgtcaaggatcgtagagctttggcgggagaagcttggaaaggtcaacgaaaaggcgggacagtcgctggccgatccggcacagtatacaaatctcttccctggcctgggcgatgcgctgcgggtggagcagcatttgcaggaggagcgagctcgtaaggcgccggcacgcctcgctgcgaatctaccactgaatagcgaacgtcatcctctgcaagaactatttgccgccgagcagggtgccgccggccagcatttggaggagaaggtgaagccagcttacgttcccgctcaagctgttgtttctagcagccaggtggccgagcctacatccgctgcggatgacgacgacgacctggacttggaaatagatggaattacgttggatgataacattgatacgacagatgtgaacctcgatgacgattttctaagcgacgattaggacggaagatcacagccagatctagaataccatttaaactatcgtttactgctacgggagtcccacatttcgtgcatttcgagccacagaattccgcgcatgcattcacatttgatttgattgaatgttgtttaaatatatatctattaataatatgtacaacagtaatggagcaaacactgcaataaatacttatacaacaatttcaaatatggcgctcacttcaactatttcgattacattctgatatcttatcgataaaacttttaaacaaacttacgatcatgccaggagaaattaaaaattatttttgttcttttttttttttgagttaaattagtattcatggtctattttattatatatttgtacaaaaaaatgttctgtacctgttacatacatttatttcaacatatttactctacgagtagggggtgtaataagtaggcaatccaaaaaaagtctggcaaccacaaatatcagtaaaatacatacaattcgtgtgtgcgtctggattttgctgtattttttatttaagaatgaattattaactaaccattaataaattattattaaataaaaaacagttaaaaccgcgattcaaacgtgagtactccccgaatttcggcgagagtgtcaactggacttttcgcccgctattcgtcggtgatgtatcgatttttcaaacaacaattaccccgaaattttaaacagatacacaccgaatcctcccgaaaaccgtgcaaaacaagaacaccatggaccaggagaatttccacggctccagcttgccgcagcagctacagaacctccacatccagccgcagcaggcgtcccccaatcctgtccagacgggatttgctccacggcggcactataataaccttgtcggcctgggcaatggaaatgccgtcagtggtagtccggtgaagggtgctccgctggggcagcgccatgtgaagctcaagaaggagaagatatccgcccaggttgcgcagctgtctcagccaggtcagctgcagctgtcagatgttggtgatcctgccttggcgggcggatcgggcttacaaggtggagtcggccttatgggcgtaatattgcccagcgacgaggccttaaagttcgtcagcgaaacggacgccaatggactggccatgaagacgcccgtcagcattctgcaagagctgctaagccgacgaggaattac

SEQ ID NO: 14297 - DNA, 2989 bp, DROSOPHILA
cattaacgaagcgaagaagaagagcagcggaggcagcaaaagagtttttttggtctcgccgcaattaattagtgttttcgcagacagccatagttggcccaaaccgtggaagatgcctctcaaactagacatcaagcgtcgcctgacgtcgcgctcggatcgggtcaagtgcgtcgatctccatccggcggagccgtggatgttgtgcgccctatacaatggccacgtacacatcatgaactatgagaaccagcaaatggttaaggacttcgaggtctgcgacgtgcctgtgcgctccgcccgtttcgtggcacgcaagaactggatcctcaccggctcagatgacatgcagatccgtgtgttcaactacaacaccctggagaaggtgcactcgttcgaggcgcactcggactatctgcgctgcatcgcggtgcatcccacacagccgctggtgctgaccagcagtgatgacatgctcatcaagctttggaattgggagaagatgtgggcctgccagcgtgtcttcgagggccacacccactacgtcatgcagatcgtgtttaacccgaaggacaacaacacctttgcctccgcctcgctggatcgcactgtcaaggtgtggcagttgggctctaatttcgccaactttacgctggaaggacatgagaagggtgtaaattgtgtggattattaccatggtggcgataagccatacttgatttccggtgctgacgatcgtttggtcaaaatctgggattaccaaaacaaaacctgtgtgcagactttagaggggcatgctcagaatatctccgcagtctgcttccacccggaattgccgatcgtgttgactggctcagaagatggcaccgtccgcatttggcactctggcacttatcgcctcgagacctgcctcaactacggcttcgagcgggtgtggaccatctccagcatgcgcggcaccaacaacgtggctctgggctacgatgagggttccatcatcattaaggtgggccgcgaggagccagcaatgtctatggacgttgtgggaagcaagatcatttgggccaagcactccgaaatgcagcaggtcaatctaaagactattgctgatggcacagagatcaaggatggcgaacgcttgcccgttgccaccaaggatatgggcgcctgcgagatttacccgcagaccattgctcacaatcccaacggtcgtttcgtcgttgtatgcggcgatggcgagtacatcatctacacatcgatggccctgagaaataaggctttcggttccgcgcaagaatttgagcgcaagagttttactccagagtacggagccgagagcatatacggtggctactatttcggtgtaaaaacctcatccggattggccttctatgactgggagacgttgcaactggtgaggcgcatcgaggtgcagccaaagaatgtgttttggaacgaaagtggcagtctggtctgcttggccacagatgactcctactttgtcctgggggtggacactgcccaggttgccaatgccgtagagaccaaggagggactggaggatgatggtgtggagagcgctttcaatgtgctgggcgaggtttcggagtgcgtcaaaacaggactttgggtgggagactgcttcatctataccaactcggtgaaccgcatcaactactacgtgggcggcgagattgtgacagtatcccacttagaccgcacaatgtatctgctgggctacgtgcccaaggacaatcgtatttacctcggcgataaggagttgaacgtgatcagtttctgtctgcagctgtccgtgctggagtaccagacggcggttatgcgaagagactttgagcgcgcagacgttgtgctaccgaccattcccaaggagcaccgcactagggtggcacattttctggagaaacagggctttaagtcgcaggccctgcaagtctctaccgatgccgaccataagtttgacttggccttacagatcggagatttggaaatcgccttaaagctggcccgtgagtcggagaactcccagaagtggtcacagctggcagatgtggcgtctagcaagaacaacatgtctctggttaaagagtgcatgcagaaggcaaacgacttaagcggtctattgctgctctcaacagcttccggcgatgcccagctgctcgaggtggtgggtgcggctggctcggcccagggacatcacaatctagctttcctctcggcgttccttcgttcagacgtggaacgctgcttggagattctcattgagacaaatcggttgccagaggcagcgttctttgcccgcacctacctgcccagccagatgtcaaggatcgtagagctttggcgggagaagcttggaaaggtcaacgaaaaggcgggacagtcgctggccgatccggcacagtatacaaatctcttccctggcctgggcgatgcgctgcgggtggagcagcatttgcaggaggagcgagctcgtaaggcgccggcacgcctcgctgcgaatctaccactgaatagcgaacgtcatcctctgcaagaactatttgccgccgagcagggtgccgccggccagcatttggaggagaaggtgaagccagcttacgttcccgctcaagctgttgtttctagcagccaggtggccgagcctacatccgctgcggatgacgacgacgacctggacttggaaatagatggaattacgttggatgataacattgatacgacagatgtgaacctcgatgacgattttctaagcgacgattaggacggaagatcacagccagatctagaataccatttaaactatcgtttactgctacgggagtcccacatttcgtgcatttcgagccacagaattccgcgcatgcattcacatttgatttgattgaatgttgtttaaatatatatctattaataatatgtacaacagtaatggagcaaacactgcaataaatacttatacaacaatttc

SEQ ID NO: 14298 - protein, 860 aa, DROSOPHILA
MLCALYNGHVHIMNYENQQMVKDFEVCDVPVRSARFVARKNWILTGSDDMQIRVFNYNTLEKVHSFEAHSDYLRCIAVHPTQPLVLTSSDDMLIKLWNWEKMWACQRVFEGHTHYVMQIVFNPKDNNTFASASLDRTVKVWQLGSNFANFTLEGHEKGVNCVDYYHGGDKPYLISGADDRLVKIWDYQNKTCVQTLEGHAQNISAVCFHPELPIVLTGSEDGTVRIWHSGTYRLETCLNYGFERVWTISSMRGTNNVALGYDEGSIIIKVGREEPAMSMDVVGSKIIWAKHSEMQQVNLKTIADGTEIKDGERLPVATKDMGACEIYPQTIAHNPNGRFVVVCGDGEYIIYTSMALRNKAFGSAQEFERKSFTPEYGAESIYGGYYFGVKTSSGLAFYDWETLQLVRRIEVQPKNVFWNESGSLVCLATDDSYFVLGVDTAQVANAVETKEGLEDDGVESAFNVLGEVSECVKTGLWVGDCFIYTNSVNRINYYVGGEIVTVSHLDRTMYLLGYVPKDNRIYLGDKELNVISFCLQLSVLEYQTAVMRRDFERADVVLPTIPKEHRTRVAHFLEKQGFKSQALQVSTDADHKFDLALQIGDLEIALKLARESENSQKWSQLADVASSKNNMSLVKECMQKANDLSGLLLLSTASGDAQLLEVVGAAGSAQGHHNLAFLSAFLRSDVERCLEILIETNRLPEAAFFARTYLPSQMSRIVELWREKLGKVNEKAGQSLADPAQYTNLFPGLGDALRVEQHLQEERARKAPARLAANLPLNSERHPLQELFAAEQGAAGQHLEEKVKPAYVPAQAVVSSSQVAEPTSAADDDDDLDLEIDGITLDDNIDTTDVNLDDDFLSDD

SEQ ID NO: 14299 - DNA, 7270 bp, DROSOPHILA
catggaattaattcgtttgtggcttatgaatcaaatactcactccaatcctggtagccggcgttgctcaggccgcagcagttaaactcctgctgggcaaagtcgatgaagttttgcaagtcggagtcgtcacggtacgagtggatgattttgtccgtgaactggtactcgaggaacgagttcatgtactgcgggaaaacgaagcagatgatggccagcgacatctccagtatgaagaagagaagcaggcacatggagtacagctttagcagccaggtgttctcgcgcagcgcacccaaacagccggcgaagctgaccgtgaagacgatgactccggcgatgatcatcaccagggagatgttgaagatcacatcgtagatggtgtccaagcgcagccagccattgccgtccatcagtttgtccatgaaggcgtacacgccgatggccaggagcaggccgccgaagagccagaagaggaagtttagcaggaagatcatgtacttgacgcaagaggaaacgtagctgaagtggtgcggataggtggagatccgcgggtgcatgtagttgcccccctgatggtatctgtgattgctcatggccacgcgaatgtgcaagtcgtgttttcagccgagtatttcgatgagtattacttttcctggtatttttgcccaggtttcctcccccacggttttttctttttgttgacgccctctttgcgtgtggtctcttcagcggcctgcacggctgttttgctatagtttcgcagtgcgtcagtggtggactgtctaactctggtgtttccccgcagcgaatatgatgaattaacgcactagcttaaattttatgactgataagcaaatttatggagccactaaaaataacaaagtgcccggcgttgccagacgtgctgtccaattaggcagcagttggcagcgcggccagtcagctgttcgcgtgaccgtactgcctttgttgcctatcatccagcattcgattggcaacgcgagccagccaggtgtttgattttcatcgcgtgcagctgttttcccaagcagctttttttgtattagtttttaattttccaccgctgcgtaacattgcgacgcacgcttgttttcgcccgcgtttggcgcattcataaacaaaaggccaaaaatagaatcagcaccatttagagcgctattcagcaggtgagtagttttccagcttagagaaaacccaaggacgcaccatttaagtgtgggaaaattaagtgttttttcttttcggttctccgctggtgacattgaagcacaattgcgagcgcattttccctaattgagttgcgactttctctgcactgcgctttctcctcgccaagcgttcaaaagcagaaaagcgcacgaaaatagaacggaaaatgtgggaaatgtggtagacggaagtggcaacgcgaattgcataaatattagttagtacgcgtgggcagtgcgcagtggacaaaacattgacttttcctccttgctctgctcattttccccctgttgctgtgctgattaaataaccaggcagtgccaagtgcagttgtcacctgaaattagccacataatgtttgcactttctgctcgccacgcactgcggcgcactcgaatattcgccattccacgctttttcgcaggtgagttgcactaaaaagtcgcaggtatagtttgtaatacctgtgggcgtgtcagcccatgctcatcgattggccatcggctaattttagacacaatttgagttgatttttttatacatttgcattctatatgaacgcaatttagccgctattttctgactttgctcgcaatgaattcattgtcttcaattgcccgcgacacacttggctggcttttctattgttgcactcggaaaaaccgaaaataaaaggtgactgctccacctacgctattcgattttcggtttttttttcggcttttccttcgccttcgtttgctttgggcgccactccgtttgattgacggcgggcaagcagcataaaaagccataaaactatttttggcccaatgcgtttctccactccatttgttggccgcacttaacaaatctgtttacaccttcattaattagcaggcaagtttgtatacaaaattggtgttactaattccctggatgcacaactttgattttgagttttcaagattgttaacaaattgtttaagaaaatgataagtattttctatattttgtacgctatatatagcttttgtttaatattggaataagaatatttatgtatatatttccttatcaaattgggttccaaaaatgccaaaaattttcttcatataattcattttcataaatggtatggtatcgtttgtatgagaaaacaagatgattatgagtttcgagaaagtattttcagcaactcatggctgatagtagtaagcttcttatcgtcagatggccgcattcaaataagcgagttgagattgcccaaggtttcgttgaaagtcccaccgataagtgggcagattatgagggaaatcttacagaagcttgacgaaatcccctactcagtttccattacccaactgctggcgaaccgaaaagcacactcaaaccgacccgaccgcaaatcaaataccaaagtattgtattgcattccagattcacgccaagacagcgacaatccggacaaaaggtattccggaccagcagcgactatggataacaagagcgagaaggttacggtgaacaaggaggagctgcgcaagcgcctgaccccggtgcagtatcaggttacccaggaggcgggcaccgagcgacccttcacaggtgagtctctcctaacaaaacatgcagccataagccattatcaagatggaacgccacccctcgaacaaagtgcattcaattctgattcccaaatgatggaatgcaatgtccacaggttgctacaacaaacactacgagaagggcgtgtaccagtgcatcgtgtgccaccaggatctgttcagctcggagaccaagtacgactcgggatgcggatggccggccttcaacgatgtcctagacaagggcaaggtcacgctgcaccgcgatgccagcataccaggtgcgtattggccaggcggcccacttttggccaagaccttgctcggcacttttagctgttgattattgcaaagcgttttgagttatgtttttatttgagttgctgttccgttgccgcacccaagagttgagaatttcatttgcgtttatccacctaggagacaatataacccagactagagtaattattcgcctagttgtcatgtgtgaataagagcaatcataagattaccaagtttataaagaagccttgataacgattaattgtagagttatataagcatataaacatatacatatgtatatttcatattttggtatgaccttcagcttgattgttttccatttctaaagaaaatggtgtgcataagtcattgtaaagaaataaaatcataaagtgagatgtttataagaagaggcttattagttaatggcttaattaaaccttataaacccattagctaatattattcatttaaagtctgtgctgtttgtgttgccttgtttgttgctttgtttcgtgtttaaaatctgatcttgaacccgaccccaaaactgttccactgcccagagttcactgtagttgtgccgttggccttgccattgttgtgttactgtgtttagtcttgtgccggtgatttgtgactagtgagtgttcctgctgccgttgcagcacctgaatgtgcaacaaagcgagaagaagcgactaaaattgattcctaaccgagtattgtgttctcttatcccactcttctatcccgcctgactttctcaacatttctttctttctaaaaaaaaaccacatgaaatacaactaatgccatatcgattccacccgaatatcacccacgagtatcacttgtaaaccgattaaaccaacagtagtcatttcgaaaacgctaggcatggtgcgcaccgaggtgcgctgctcccgatgctccgcccatatgggccacgtcttcgatgatggaccgccgcccaagcatcgacgcttctgcatcaattccgcgtccatcgatttcgtgaagagtgcgacgccatcgaaggcggatccatcgacggcctcgtccaagaaataatgaccgatctgcctgctaaccacaaggaataccattacacccggaggagtagccccatatagaccagcggtagatgctactccgggtctatagagggctgcaggtccagcaaagaaagatatttagctattttataggcgtttattatgcaaaactgtttaacgaacaaaaaaaaacatagcttatacacaagaacgatgtttgaaaatgtattgcggaacgaggagtgagagtttagtattgtagttcagcccagcagattccatttgctatatacttttcctacttttaccctatgtatgtttcggtttcaaatctctatctctatattataactttataaagtttacgaaagttttatgaacggaaatgcgagtctacagttcctggcctgggtttatgcactcttttcggtttacaatctcactcactgtgtagatgaactctacttctcaaaagtatctccccttgcattctcatcgtatctataggatatgtatattgtacgttaataaaaattaacccattttgtaggaacttacgtgcttagcaagaagttaagttttgcgcaaggttatcatttattttgggataagacgagggttcctttagttagtttatatgtttttcttttcggttaagtgcaattttcatacatatttcggttttgaatctacatagatcattgagctttttccacataccatatttcgatcattatacaaggtcgattggatttatttttgggccagggccattatgtgtatgtctgtgtgaatgtggtgcttttattttaaaatattattttccggtgctgtatttggttatttgtatgatttcgatttacgttttagtttgttgctttttactcacgctcaattttcttttgatttcaataacataacccgaatactttaaccaacattatatccataaactatatagagtgttttaaacaatccaaataatgtgtattttcgtatattttctatttctctttttttaactcgcttcaaaaacaaaaaaaaaactaaatgtacaacgcctgtaaacgttttttgggggtttgttttgctaaccaaaaacacgaaaacatttaactcatcgctgaaattataacacccgaaaaaacgacacatgaaatgcttaattaaccaaaataacatgtacgccaaatcgttcggaaaatcatctatattcctgattcgtcaattattttcaccggtttatgtgacttcatttcatattgtttcacctgccacccattgttaattatcgctctctctctctctctctctgctgcatctcctccttcgctctctgatttgcactcccatttatttgccgttatttcttcgctcttttctgtgattctttctctgcttcacatttatcacccatttcacaatcaattttctatttctgtttgatttgtttacaccgaaaaactttgaattaaccttgcaaaacgatcaaaaaaatgaatatattgtaaaaaatgtcaacaaaatgcgctacacaacaaaaaaaaaaaacaacaatcaaaacgtatccaattaatcccacgaaatggcaaaatacaaactaaatagggggcaatattttactactaatcgcacatccagaacgtatacgcactgaggtccgctgcgcccgctgcaacgcccacatgggtcacgtcttcgaggatggtccgaagccgacccgcaagcgctactgcatcaattccgcctccattgagttcgtgaacgcggatcccgccacctcgtccccgcccgtggccacgcccaccgcggcgcccattgcccagcagtgatgccgaggatcaaccgccaaacggaggaggcaagcctcagagtgtcgttgctgttaagaaatttttctacgtgtactttctaactttccgcaaatgtggccaattttagctcgtagtcaagtcaatcgcccctctgtttgtgtaaatagctaatgttttggttcgaaatttgttcgttaatttatacaaacccaaataccgaatactctgtaaccccacacattcaacacagtactaattttaaagtgagcgcgctaaataaacgtgtgttttttacaataaaacggtgcttgcatgtgttgtgtttttgcagttgtcactattaatttgaacgtagttgttagtgccgaccaggtgagaacggaacagctgagccgcgttgccaactacgtcagttgccttcccttgtttgcgcaaaacagatgctgcgccgcagttgttgttgacgtgacgtaacgaccggcgacgcaacaacatgaaatcgaatttatttatggctcggaagtcaattgattttaattgcagtcgccgtataaggtgaatttaaatgtttattagcccgaagtgatgtgctggcgacaaatcgataacagcgaatgggccgagtatgcgatcgtttgattttgaagtgcgacacgtgtgtagggtgactggagaacttttaaactggaccacccacctgtgcgttccacatgcgattgtttgcttgtgactttcaaaccgcattgtaaattcgcaattatctaacagcgatttcagtgtaaatacaattcgggcacgtcgaagtgataatttcggattcgcgtcgcgaagagattagatttgagcacccggcgacgacgaccatggcctgatacaccagattgcccgtgaatctaggcaatatattgagcttcacctgtccagatgcagaaaggcccagctaacggcatcccacttcagtgtttcacgtaagagcttgcgccgctgaatctcgttgcgtagcgcacgttacgtcagtgaccgttacgaaatttcgaaaatgaaggagtggctgaagatctcctgcctcctctgtgtctttggctgcatccgcgagatccgtccgtcggagccctacgtcacggagtacctgctgggtccctggcggaatatcacggagcagcaggtgagtggcatctcccaccatctatccattccatagaatatcaaatttcttcccattccagctaacgcacgatgtttacccagtgggaacctattcctacctggtgcagttggtctttgtatttctcata

SEQ ID NO: 14300 - DNA, 1023 bp, DROSOPHILA
cgcgagccagccaggtgtttgattttcatcgcgtgcagctgttttcccaagcagctttttttgtattagtttttaattttccaccgctgcgtaacattgcgacgcacgcttgttttcgcccgcgtttggcgcattcataaacaaaaggccaaaaatagaatcagcaccatttagagcgctattcagcagattcacgccaagacagcgacaatccggacaaaaggtattccggaccagcagcgactatggataacaagagcgagaaggttacggtgaacaaggaggagctgcgcaagcgcctgaccccggtgcagtatcaggttacccaggaggcgggcaccgagcgacccttcacaggttgctacaacaaacactacgagaagggcgtgtaccagtgcatcgtgtgccaccaggatctgttcagctcggagaccaagtacgactcgggatgcggatggccggccttcaacgatgtcctagacaagggcaaggtcacgctgcaccgcgatgccagcataccagggggcaatattttactactaatcgcacatccagaacgtatacgcactgaggtccgctgcgcccgctgcaacgcccacatgggtcacgtcttcgaggatggtccgaagccgacccgcaagcgctactgcatcaattccgcctccattgagttcgtgaacgcggatcccgccacctcgtccccgcccgtggccacgcccaccgcggcgcccattgcccagcagtgatgccgaggatcaaccgccaaacggaggaggcaagcctcagagtgtcgttgctgttaagaaatttttctacgtgtactttctaactttccgcaaatgtggccaattttagctcgtagtcaagtcaatcgcccctctgtttgtgtaaatagctaatgttttggttcgaaatttgttcgttaatttatacaaacccaaataccgaatactctgtaaccccacacattcaacacagtactaattttaaagtgagcgcgctaaataaacgtgtgttttttac

SEQ ID NO: 14301 - protein, 166 aa, DROSOPHILA
MDNKSEKVTVNKEELRKRLTPVQYQVTQEAGTERPFTGCYNKHYEKGVYQCIVCHQDLFSSETKYDSGCGWPAFNDVLDKGKVTLHRDASIPGGNILLLIAHPERIRTEVRCARCNAHMGHVFEDGPKPTRKRYCINSASIEFVNADPATSSPPVATPTAAPIAQQ

SEQ ID NO: 14302 - DNA, 20037 bp, DROSOPHILA
tttaagttaataaatatttattcattttacgtctcgaattcactagtttaaactactgttaagctttaccgattctggttatatgttaattctcatttaagttactctgttgtgccctacgcatttagcttggctacaaattccccatcgacagacacatataattttataatttccctatagttacgtaatacgcatagcctcgtttggcatgaattcattttaggtttcttctatgagagaaagatagctacgagaggcacaaaagcttagctcggctggcgctaatttggaaatcggtctaggctatatacgatgactatatatatatagttttacatgcttatagtagattgtcttttcccatagttaaacagtagttgctagttgctagattcctgcgaaggtactaaagtttccgactcaagagcaatctaacatagttttcccttgactaggagcaaacagttttagtttttagtttaggttttacagctttagtgttaagtatcatctaagcttaacttattgctatgcaatttgttagttatggtacattgagactctatgccagccatatatatagacaagctatatatacgtgtgtttgcaattttttcttttttaaataaaatgtaaaattaatttacacgcacattgatatattaatggaattaaaatgaactgaattttctattttaatatcttgggaatatcttgggaatgttgaatgttctcctcctcgatttttccctctttggcgaactcacctaaacgcgttttcgatttgatcataatgccggggctagcactacaatcgaatgacgtttgaatctggcccaaaactgctaagtctctcatttcctggctacatcgagaaatggatgggacctttccatggtatttactattaaaatcgattaattggctacaaaaaacacttagatgttggctaaatggaaaattcacatgctaaaagctcgttgaaatacttattatgaaaatcttacagaactgatcaaagttctatgcagagtgatagataggctaccaagtatttgacatgttgcttttattgctttttttgttggcttgaggtaaggacgtgcctttgaacagtattcgaatattccataactaaagctctgtttcacagtttctagatcttaaaattaactaaaaacttaacaattcaataaatatagatacatataatggttgaaaatcaaacagaaaacttaacaaagattaacaagatgtctttttagtaatcaatatcaaaatagacttaggggacacaacgcgaagaatggaaattagatcggatcagatcggatctatgggctgaaaacatattcgggattcatgtaggagaagccaacgaattccgactgatccagattcatcataaacaccttgtccgtgggcgtcaagtctgttttctctgatgtgaactgcttgtcaaagttggacacatccttgcggtgtttctgtacaataatcggattacattaggccaagtcaaaggtaattatgcatttggcttacaattttcggcttaaatggcggttgcacttcgcgattttcgattttctcccaatcgatgcgtctgaaaaagggatgcagacgcacatcctcctcgccagaggaaccacaacccaaacgcttatttggctgcttagttaggaactagataaacatttataattataaaagataaactattcgttatgtttgagcttgaaaacttacgcccttgcaggcctctttggcctctttgctcaggctctttggataggacacattatgatcagttatggcggcaaacagctcctcctcatcttcgccatcgaaaggtggctggcccactaacatctcataaagcagtactccataggcccaccagtccaccgatttgccatagggctgatacagtattatcttaatagaaagtaaggaaattatatatacactgattaaaaaatctatatttttctaaaaaaacatacctctggagcaatgtaatcaggtgtaccgcagaaagtctttgtggtcttatcacccactatgttctccttgcacatgccaaagtccgcaatcttcacatgtccatcggcgtctaggagcacattatccagctttagatctcgatacagtatgcccttggtatgaaggaagaaaagacctgctgctatttcagcggcataaaatctaaaagcaccacgataaataactgaaggtatgaagtattgctattgcacacttacacggccactggttccttaaacttgccaaactgttggatttggaacatcaaatcgccgccattcacatactccattacaaagaacaaacggtcctgtaataatatgtataaattttatattcaattcttattctttcaagatatactcaccatcgtctgaaagcaggagtgtaattggaccaggaaaggtggcttttcgcccagcgccaggacacgcttttcgatcatggtgcactcgacgtcgtcgtcctgaatgatcacatcctttttgagtatcttaatggcatacaactcctcgctgcctttgcgctcagccagcaaaacctaaggatatcaatcacatcaatcagtttaaataattaagctaaatcttagcttatatatagcttagttcatgtatcctacctttccaaatgagcccttgccgagaactttgatgaaattaaagtccgtggcccggatcatatcctttttggaagaagtatgcgtgttcgtatcgctgcgcattaccatcggcttcttttgcgatggtttctgcttgagcttcagtaggtcctgctcatcatccgcacatggcacattgtagtactcgccttcgtcctgggtgagcagtttgaaccagccattggttgggttcttgatgatctctgagattccgaaggacaaagcacccataaagtcattgcgtgaagtgcgatcccagtcccacacttcgatcaggatgcgtcgatccttgtcttcgggctttagatcactaaaaggacacagaacaacaaacaatcaacaaaaatcaataactaattagcaaatatttagatttaattggttttaagaacttactaagtgagtgtctcattccagacaggatttaggcaagccttaatggtgcgagtcttcttcttggattgatccttgtcatctggaattagcttcaccttcacatagggatcgctcagtccgtttgggtccatgggtatgagattgcgaccctccttgactgaaaagcaggacaatggaatgtgggcggtgcaaacagctgtggcataagcagtcaattaagacccatcccggttgagtgaaaactcctcgcacaaagcagctacggaaattacgtgaaacatgctcctgggcacggacaaagcattgtgtcctagaggacacctgcagagcagctcgttccactcttttgttctgcaactgcagtctagcttagtattcattatgtggcatttgcggctaacgaaggagaacgaatacggagaatttccttaagcgcgcataatgaattaatgcaaatcgtaagcaattttccccaggagcccagaggacttgcaactttcggccgtgaagcagctttctcccagcaggaaaggaaacgaaacgaaacggaacgcagagcaatggatgaattcaaaaggcgcaaagactgtggagaagatgtaacattttaagcgcgttgcttggaaaactttgcggcttctccgagcatacaattttttcacttgcccccgcatacatatacatatatatatattccgtaaacttttcgcccgcccactcgcctcaaatgcgggcacagggagaaacgaaataaaaaacttagactgtgcggccataattggtaacaatgcttaagcggcttaaatgtgtattcccctggcttgaggcccacttactctggacagttagcagattctccttgacattgatctccagataaatgcgaccccgccgctccgtgtgatcgcatccgcaaaggctgggcacgttctccttgcagcgggcatgcacgttcatgtcacatgctggggggcgtgggagaaaatgtttttaaatctcaactattggtcgttgtaaagtatagtggcgaaggagtgggggtgtgctcaaagagtttggttagtgggattgataggcatatgacttggatgttgaagtggaacatagcactcgcacacacacacacacacacacacacgtacagaggtacagtctcgcaaacgcagcaaattgaggtacagtcgcgcacacataactaatgtgtagtacttaccttgtctgtcgttggcaaccaaagtttacctgtcgcgtaatctgtcatgtagaggcactctggccgacccaatcagtaaaaaaaaaaccaaaaccaattttccacccatcggtcccattagagcttgtttttccccatttcactgccagcggaaattgacaaactgcaatggaagctactcttctgactctgacaagtggcggcaagcgttgaattggaaattattcgctttaatcgaattgctattcattttcatgaaatacgttttgttttcaattaaagcacttgccacatcatcggtcatcacagggcatcattctgtttttggccgattgcttcagtttcctctcacatatccgcttttctcgacttttccctttgctcttctttttctcttggcaacattccgctttggtgaagtgtaaaattacttttgctcaccgcccgatacccttgaaagggtcttaatttcattcgagcccccgctgcgtatgcgtgatatttaagaaacgtttcactggtcgtcccggcggcatgttggtcagcacagaatgtgcaaaaatgtgtacacaatcgcaaaaaaaagggttcctttggagtggtggagcgaaattcaccgaacagaacaaacacacagatatgaatgagtgtgtattcatatttgtggcctccattttgcatggtatacattaatattcgttttctccttgctttttgcacagtttgcactgtttgttttttgtgaatcagtaagctgtatttattaaacatttaaatgctgctccctcttttatgtttcttaaaatatattttacttgtattttatttatatatcagttgttgttacatcttcaattttcatttttgcattttatttacgtacttcatttcggtatgggacgtttatatttgcaaggaacgcatcttgtctgcctaaaacttccaaagtgtttatttacagtgtagcagcgacctgctggaccacaatcagctaaaatatttgtaaggcttgtgtgttaacgcaacttttgttgaaattggtaaaacacttacggtgagtgggagcagtggagtaatatatcatggacagcaaagaaagtataagaaaaaccatcgaaaccttatccatttttgtctaatgcaagaaataatttgaatgtatctgattgctttatgatagatgaattatagcatgataattgcaattgcccatatacagtatacaattacaccataaaattgatttttcttggctaacaaactcgcttctatccccttttttcggccaaaggggaaataaattagtttagcattttccaatcgataattgttatttatcgttatttatccatatcttgttcttgttttcttatgcatctattggatgcctgttggcaactatttgcaacagatacacacagtcctctcccacaagcttaaaaaataattcaactgaatatataaatcaattaaaaaatcaaaaaaataataattggcgtatcagaacgtcttatgtctcaagatttcaagtgataattaagttaactaattcagttaaaattcaaatatattttaattaacatattctggtaataaaacatagtgaaacctccgtcgaacctgttggctccttgcaacagtcgcaagctgaagcacaacaccccttgccacaatctggaaaaaattaagaccatgtacgtagagcccacattcagtaaccaaatttagtttaatagaggtggactctgagctcactgcttaataaaagcggatgaaactttgagaaactgtatttgctaatctgggaaggctaactaaacaccattctatattaaggtttccaattgacaatactaatttaatatatactgttcaggaataagtaatacccaagaaaaggattcaaatgagaaagtttgtgctttatatttcactaaaactcatctcagtttgaactaagatctttaactacctcttgcagcatttttcatttggaccgcattcagttggcggtgctatggccctacagcgattgcgaactgatgtacaatacccgaggtcattgccgcactctgaaatattcataagtccctattagccgatccaattaaacagataatatttaatcatactgactcctaaagcgcatctgagaccagccagatcggatgctaaggaaaaggatggctgccagcagaaagaccttcgaaaagcaattcattgtgcaaagtaaataactgagttgactttgagtttgcaagggcgttttataccaagtggtgtgaaaaattcggaatttggattagcttcactcattcgacagggtaattatataaattccttcagattcctgtggtagtagccaaccatttatttcaaataatgcattataatagttaaacatatgctagcgatgaagctcatataacatattaaatgtctattaattcaattgttgattaaaagacgattttaaagccagaattgaccacatttttaaaatcttaaataattcccaacatgttcttaccatttatttttaatgacacacaataggagaagcctagcaattcaattataaaccagcttgccactccactcacacatttacatttgcatcggttcaggtctttgtatgtatttgcttgggtcaatgggtcacaaatcaattatttgattacccagaagtcgaagtaaaacaatgtaagacataattagatacattacttttataaaattctacgctaaatggaacaagtattgcctaggcatggaatcttaaagttaaaagtccgcaaatattttgtggggcctttaaaattagtaaacatatattaagtggctttgcaaacttgacatgcacttgcaataacgtgaaaattaacaagtttttaagaatgtcaacgcaaaatgaaaagaaagccaagtgcaggcagctggcaaggcaaataaaatgggggaaatgcgggaaaagctggtggaaacttgtcagcgacactcactacagcaacagcaaacaattcgcccaagtgtgcaaaacactcacccacacaaacacactcacacacatacgcacacgcacactgcagtgcactgtggcaaagacaaacacaaatacaagtgcacacttgagcggaaacaaagcactgctaattgtaaattgcaacaatctaaaaactctgcggcaacgccaccgaaaaatgcaaatgagttgagacactttcggcgtcaaagctggttatactatatagtatagtatatatatgtatagtatatatgtggctatatatagggtaccatttggcggactttacctcgacacttgagacccttgtgcgtgatgccgtgcaaaagggacccacaatgatcgcagaacgtcggcgacaggaaggtgacattctgccatttgtggggcatttgatgcgcctgcccgatttcgagttcggtttggaattcgaattggaagagaaaactaatggaaaattaacgcagggcataggaacaggtgttcgatatagctatgtacataacacaggtgtaattgcaaatcaacacaaaaggagcacaaaacaaaatgggctatgggctacacaaaatgagcaacaagaagctgatacaactagatacgttaatagaggtgtttacataattacacttaaaattgaagatgaaaatacctatttaactgtcacatgtaaaaagtggataagatgagttcatgtacgttatgctagtttcgaagttttaaatcaatatttacgttgcacttttagtagtttataaaatggcttttaaaagacgattgattaaatttgaaaactcggcaatagatatttgagacccataattaacggctttcatatgcattctcaacagagtgtttgccccataaaactccgcccactttggatgtttattctgatgctttccactgctgcagttttgctttcgtgctaatgaaataaacgcgacgttaattgagttgcaagttggccgtcacatgtcgcaaacagcgaaatcaaatgaaaatggaagagggtttatggtggcagtgtgatgagtggatatatacacaaacatatacatatatgtacattgcacagtagaacataagtaacccggcgaaggttgcagagacaaatgctgcctaatcctttgcaaggacctcttacgctcacacaaaaaaaagtattctctcacacgtgacattggcggaaaactttaaggctatttccttttgtgggtggctagtatttcacccacacaaccgagtcgattgttgtgtcagttttgcggtgggtgcttcccccaggcaaggacatttgatagcattatgtgcctgcatgagcatccactgagtggttccccttatatactcggctttccatgcccgaactttttatttcggggcgccttagcaatttgttgtttgtctctgccaaggttcaacagctgctcagccattaatatcctttcgctaccaaaagacaaacacacacgctacacaaagacacacaaacgaacggccttggcagaggcgcagcgaaaaaagttgttgcatactttggcgggcatgctcaaggccgcgagggtgggccttgtgggcggtggtggtgggccagttgtttggacaaaatgcaatcgcactgaaggtaaacacgtgtgtgtgtatgcggcctccaattggaatcgcctttgagtggccctggatagccacaggtgttgacatccgcatcaagaaccggacactgcggaatttgggttaactaaagtggaaccccaatggaataggaaatacgtgccctgtggacagagactcctagctttactttggaaagacaaaacaaacaaggattttgttattttgtctgattacttaaaaatatacaagcagaaagtgaattttcagtgtacaaaaagtgtcttaaaagcaaatctcttcaactttgtaagccaattgatataaaatatgcgtatgcatgctgtgaacgaaacgaatttatttcggcgagcataaaagttcaagccaatgaagctcgactgtttgagatggtgttctttattcttatcattacgtcacagtatctgccacatgaaagcatcgtaaacaaacgccccgtcagacatttcccaataaatctcatggcccacgcacaaacacacacacacacacacacgcagctagaatttcatttggctaacacgcctccatttgatgcctacttatgtatttgccacgtgccagagcaaaaatttgtaaaaaatatttgcagcgcaaatttatcacaacattccttgcgtcgctctctgtcacctaacaaatttgtgcccatgccatcgggaaatcctgaagccccacttttccatatcgctatcatcatcatcatcctcctccagcggaatggcagcttccatcactctattgaacgtaattttttggtatataaaaggtcaacgtacatggccatgtatatactataactgccagcatattaacaactgatgcccgccgataacgaatggggtgatttggtcggggggtgttggcaaatataaattgccatgtcatttattccgacaggccagataagagaagttgggcggtaatatggactagtaagtgcggttatatcggcgagcatccagactgccatctgatagcatttaatgggcctaactgcatttgttttcaatttccgcttcaagtacgaaacacaatcacattgggcgaactctcaatctgaggaacaaatcttggcttggcgaaaattgatttgcctacacctgtcgcaataaatttaatccgatttgttgcagaaaggcgacaataaggagtcaaaaggcacaatcggaaatggcaatgtctaggttcattggaccgaattgtatttcacatacacatgacagtgggaaggaaaagccacattttgagttgtgagtgatgtgagttaagcattttccatgggaaaattcaattggaggttcccatggcaacagcatcacacttggcagcccagctgaatgtgacatttgagttgccaattcttattgtctctgcaattggtgtttacacttgactcgttctaattaagccagttgccatggctctcaattaagtgccagagccagtaacaagccacatggaagacaggtttacaggatactgaataaaagtggcaactctttgctaaagcaaggagtgagatattttggagttattgaaaaatatgattgatgatcaatttacttaaatgagttcactctagccactcattgtctttctgaaatcatatgcatgaacttttatctatcagctacaaattgaaagctttactttttctatagtgcgttaaatctctaagtttatctcgtttttagaatttattattcattttttcatatagaaatacattaagtttactaagttagcaaacatatttgcgcaagctgcgctagcaaatgcacaaagaatttcaaacatttatgctttccccaggccaggacctgaaaatcgttttatctgtggcatttccacaatttgttagtgggccaaaaaaaaaaaaaaaaaaacacattaaaattatatttatatcactgggcagctctgcacacaaaattctaagcaaatgacaagcattgtttggcaacaaagtttgcccctctcactttgtccattagaatcctccgagtatccctggcatgtgcataattatgcaaatgaattggttgcagggggcggggcaaaagtgggcgttaaggtggccggaaaagtgggttacacgtggaacacggaggaaactttcagtgcggttcggaaacggaaaagtgaagagcaagcaaacaaaatacggtaaaaaaaaaggaagtctttgctgggcgtaacgacatatttacaaaggtgcggcctgcttacatgtatgtatatctgtgtgtttgtaggtaaaacaatttaaataattaacttttagggcctgcaaaagtttctttctccgtgctgttgaccaggtcaaattgcgtttaaaatttaattcccacgcagacactcacacacacacacactcacgcacacattatcatcattatttacactgtcagtcgggtgtttttttttttttttttttttttttttggaaaaggattaaaagttaagtgaaagagagaagcgaaaacttttgtggttagagagatagaagttagaagccggaggggaaaaacacttatttgggttacaaaaaaggtttctagctttaaggggtcagaggttacctgagcatttgagaccctggtggtaaatgccatacagcagggacccacaatgatcgcagaacgtgggtcctgcgtatgtgaatggctcgaaattgtgttgagtttttggtgagtcctttgattgtcaattcgattacattttataatatatatatatatacacatatatatatatttcgtttgttggttgcaacaatttcaatttcgattgcggattcagtttgttttgttgtggtttttaaatatatatatttggtgcgtggtttcgtgacagcgtgagttggacagcgaattgagtttttggtttgattttggtggatgcacacatggaaaagaatacaaaacacaaattttgttcttggtaaatcaacagagcacaatgacaaattaacaagttcgctgcaaactttcgcattgaaatcataacaaatgacagactctacataagttcagtgtaagtttgcaacagattttttattaactaaatatatccctattctgcatttccatgtgggtggttcaaggaaggcgaatcgaaatttaagcttgggaaaaaaactactttatttcatagcaacccttcccaccctgaaagccaatccatctgagactcttttctctatatttttctgccatattttgccgtcgagctatcacaacatttttacttggacacacagctttacactttaagaaaattttaaagaaagataccagcattatctatctataagttctatctgtctgtaagtttatttatttgttttcttctgcggtaacccaagttttacttttataagcacaggaatctacgtttaaagatatattcgcatgctccttttgatttacattttcgtttaaaatcaaaagtctcccatttctttgcgtgttgcggtttgcctgaataaatacacagcgtagagagattgctgtatgcggaaaaatccaaatgacattttccataacccaggggcgaaggaaaaccccggtcggacaggggaaaacatttcgcatttttagcccgagtctgcttagccggcaaagcaaagttgacaggcgagtcggggaaaaaggacatgacagctgggactttttgggacagacggacggagcccggcataaccgaaaattcaaatgacagtttaatttgacagagcccacaaagactaaaagcaatgcaaataaggcaccctttccactccaccttacatggaaatgcagttgggtgtcgttatcctgtgtacatatatatacacgtatatggtcatcctatttagcatatgtattggtgcgcacttaccgaatcgatgcccttatccttgcccgggcagatgaaggtgacatattcgtggcaccgcttgtgcaccacataggagcaaactgcaaccggagaacgggttattcgaagctcaaagttcacgagatgaacccttaccttggcactgaaatccttgctttccgaagcccctgaaaaaaaaacatcgaaaccacagggtaaattcatattcgtcggcaaatcgttacgttacagccatcgcatcaattagcataaatatttaatttcccattaatcaatatgctactcgaaatcggcagccccatgggccgtttaaaataatcaatatgaaaatggttcggaaaatgagtggatacaactcaaaataaacctttcacccttagctctttaattatttacgtgaatggtatgtcatcaaattaagtttcagcggcgataatcaatataattaatctattttaaatagtttggtatgaaattttggttttacaatatggtcaactgtttaatttcggaatgaactatttttcatatatgtaactatttaaataaatattaatataaatttgctgatgggattacagttagttatagttatagttagttataatggataattatatagaataggctttgagtaaaagtaaaaaaggtatgccttaaaaactacatttcgaataatgatgattcttaatgtttaaggttaatggttaaagtttgtttcttgtcattagctgttttggtgcttaggccaaacattaaagactaaacatttaaatagttaggtttttattaggaacgtgacatgcctatttcgaatacttgccagcttaaactaaaaacttaaagccattcagaaagccatttcatttctgggctactggttaatgggcctaacccgttgcggggccaaaaggccaaaatggtcacgtgcgaggcttccaggctttcaggccaggcccagccctagaccataaatgacttgaccacaaaccgctttgccagtgtgcactgagtccagtgtgcaatttgggacaaggcaaattattcacatgcacggtgggaaaacgcacatttatatacgtacaagtataagtatatataaataatagaaggagcaagtttggccaacttttgcaactgcagttgaataagtttcggcacgaatggacctaaaacccggttaaagttcggtccgttaagctatggcaaagttgatccgattaggtcgtaaccacttggacaattcacacaaatcggtcaaatcggccgatttgttatcgctgctaacgagtgcgaaattgtggctcgtttcataattctatttgcagtgcgcattttttcatatttcaatttttaattttcacttatattttttatttaaatttaattcttctgtctgaccaggttgtctgtttctggcttttcgccgctctctgttttcccccctttgggtatttcccgttttttgtttgcccatcaaatgaagtgaaaaagcaattttcccgcgcctgcagttatactatgattctgtttttccccctttgtccactcacaattattttttttcacggcatctgttttttgtgcatttccatttttaattaagcgcatattttccgacaacgctgaaaaagcggcacaaaggcacgggtttaagaatgtttgctatttaagttaattaatcaagcgaagtgctcagtgtggcctgtatttgtctacttacttgcttattttattttattattcggaactacttaatttggtcaaacaaatgggtaatgaaataataattctttcaaccagttttctttgtaagcaaattgccatttgatggctcatttaaatttggcattcacatgaatatcttatcttatgccttagttcagttaaagttttcgatttgtgatgcagcacttttaaaagcgctaccaatttgaatttgaaaactgaatttccatttaaagttgttcccgatgtgattccaagtaagtgcacttatcacgaaatccctttgggtatcacctttatcatttgaaaaatgcaaattgatatgttcagggtatttggaggtgctatctggaatttccatcgtgacctttttggtttccgccttattatgcaaatgacgtgccgtaaacatggcaaatgtttcacctgctacccgcaaaagaaggcggctgacactttgccaccgcaggcgcaccaccacccatcgagctacacccacccgcccgctggtagcaccacccactttacgccccccagtggctcagctacgtgcttgcaacgcctttttgcaacaccgagcgctctgtgtgtgtatttgtgtgtttgcgtgcccccaaagtccccgcactattaattaaaagtcgaaaccaagtctaacagccactggagttgttaattagctgcagcaccccaaaaaagtgggcgtttgcggcgggggggcgtggcgttctacctgttcgctggtatggctgtcaaagcgcgttaattacgtgtaataatgatgcagtgcgcggagtttttttgttttttttttttttttgtttgttttccgctcgtatcgtttttttctctgtttttttttttttgggcggcttgtagctggttgccaaaatttcggtcttggccccaccccgattatgggcacagatcgatgatgctggcggctggtggagcattttaaacagcaattaatttaattattgccaaaatgtcttggccgacaattagctaaagagcccaaagcgattcgacgagagtcacaagacaagcgtaataaattggcttggttttatgccagcgacttgacttctatatccattcattagtctctggctttaaattgtcaacgaaaacgctctggcattatgacactttgcggcaagatagaatgtgtttgtttattaaatatgcattaatatcactggaattgctcgtcaaagtgtctgtggttggcgggcaattctggctgtgagagctgagtggcgaattaattaatttgtgtgggcgaaagacactagaactttcattaatggaatgattctacgcttctaacgagattctctagcattacaaaaatggttggcgaatatagaatataaatatcctttggaatacctacatccatgcatatcccgactgatagccgctgtaaaaaccaaatttcagttcaaaactcatgtcaacaaataggaattcagcgcagaagcacgaatctgatgtttcggaggtgaatttaatgctcatgaaattgatttataagccgtggcgaggctggcaggccaggaagtgactactgggacccagctgccaggacttccaggagtaaacaggctggctccacgcaatttcagttcatttctaccttgcccttctgtttgtgtttgccttgggaccaacaatggattaaaaccgatttcggcagcctcacctgcattaaatattacacaggttggcttttgtttttcttggccttctgtagattttggctgaaattttgggccaaaaagtatctcagcgtaataacttgacttgtgtgtttaaagctttttgcatatattaaggttagactctagttatttttatttaatttcctatttaaaacatttttatagacttttcatagaaatcgaaatgagtctgttcctctttgattttctagcaattagcttctatttgtttacatactttttgcaaatgattttctcggaggtatttttacattttgctaaaatgctcaaataagactttctgtatttcatttaattaaaaaacgtaaacattttaaatattttatgatgaatgttaaaccatacacacagtactatttttcttgcatttaagccagattgctttcatatttgtacgcctatgtgtgctaaacaactaaaatctcagattaaataagtctcagtacgttattcatttttgaaaattgagctttgtgagctgcctccttgtgtgtttttggtatttgctgctgtgtgttcctattatttgccttattcccccattgtttctacggctcgttcgccttgtcaatatacatttatcgattcccgccactgatgttatgtggacgcattgctggccatgcttggtagacccacaagtgccgtggagggaagtggggcgtattcgcatatggggatagctctctctctatatgtgcttgtacacccggagaaaatcattggttcattcgaatagtgaccttactatgacctacccaaacgaaatatatgtatatcttaagccagcttggtactttttctcaagtagattaggtcaggtcatgataggatcaatattccctttggtcatttaaaacttgcacgatcccgatatattggtaataaatccatttagttagtcaagaggtaagctagtttttccccgggtgtatgcagttggttctataagaacgatgcataaagatgccactttaaggatgcgaatcactcaccagataaagtccttgcagtgggagcagaacgtgggctgcttgaagaaccgggcgatgaagcagtgatccttgacattgaagacgttcttcttcttgagggctcctttgcggaggcgggacttcattttgttctcgcccaccgcctccccctccgccccctgctgctggggatccccgttgttatcgctgccctccgacattgttgctaaatgttcttttttttgctttttttttcttcttgttgcttttttgtttatttgttggtgttttttttttctgcacaacgggtatttcgcagcgtttacaaatcgcaaaggttctttaacttgctcacttgttgttgccgcatttgggtgttgttgttggtgttgttgttgctggttacgtactttttgctggctttgtgtttattgattttcagtttttgttgtcggcgtgtttttattagacattaaatgccatctaacgttaataatgggcgagaaagagagagagagcaataataataaaaccaaactggacttgagaatttcgctttaatttgcccaaaaggcgatttgcataattttattaatcactggccgcacgttcgccgtttgcttaattatttttcactcgcgtccggcgcatcgatttcaattgatttttctcataacaagtgcagcaattaaacaaaaactcaagcacatgtcatccgcgacaaacaagctcataattagcattaattttaatgcctcaacggttgaatatacaaaagaatttccgaaggggttttgggtggttaggtgaatggggcaccttttcggcggaacatgggccaaataataactggcaaataatataatttttcccagcttgttgaatgagaggcgcagaaaaaatgaaaaatcgaaaaaaatgtgacgaagattgagcgcgcgtgcaaataaaaaagcgatgtgcaaacgaaataatttttatttcaatgttttgcttttgtttttcagctttattgaaatatttgcaacgccaatttttgtgtgcttcgctaacagacacgttcttgctggccactgctctcacctgtgcaggtgggcccacttgggatacgatggtgccataccctgtaaacataagcagtcggctcggtggcttactaatgcaaacactcaaataatttgatttaattcagctataacatgataacactctgagaattttaaaataaataaatccttagtcaatttagtcccaatttaagctttaattatatcaagaaatgttggctaattgcaaaataattggttcaactcaatcaatgaactaattgaaacattttaaagcaagaacattttcatctatccaagatgtacatttaattatctaatcagcagtaagtacaactctattgctaccctgcatacaacatattcagcattgattgcaaccgcaaactaaaccacaaaaaggacaattcaggactcgactgaaactctgtgttagcaaaactatcatagtctttgtgagcgaaatgcaacagttactatcatttccgaacgacttgcgttagcgcgtttttttcttcttctccatttgtggaacacatttcccttcacgttttcatgtcacttttttgtgcttaatggccataatggctatgactgctttttcgttattatcccgaggggtattattagaattccttgtggttaatagtgctttgaatttggtagtaacttgtctagtttcaagcacttgttcataacgacatgtggcgtttattttgtttactttttgaccgatgacttagtgtgattggtcttatttagactacggctacactacacgcacgggctgcgaaaatgcgaggagcaactgcctttgctggcgaaccgaaacgtagtgagcgtgcgagcattttcacacgagcggaaaatccatgtccatggactgtggtgaatttcccatctgttgccgtctccctctttctcgctctccgggttacacaagatttcttctcgcacgcactaacactcacacacatctgttgttgttgttattgctggaaaatgtaggggcagtttatccccagcttttcacttcggcctcctggcactgcgaatttgtatcgctttcccggcacgtgcgcttcgctcgagacacaaacacgttctgaccaactggcactggccgtcttttctggagcgccatattcgtagcgagcttttgggcgcactgttagccaaaagcaacagcgctgttaacgctcatttgcattgcggccaactgattaacataagtaaacccatagcgatccgaaacgtcagaccctggagcaccgatgacgctcttggccgctaattgatccgactgaacgaaacttgttaaatggccacgatccagccggttttgggccgagtttgcaaaggctgctctagccattcgattgcgttgaacaagaagtgatttgatctataaatggaatccccctcgtggctgatcggattgtgagatagggaaattagtatatacttatcaatttgaatggctctcaactttctaacaactttagcgaataaaattgaatctcaagacttcaatgattaatataaaactcaagatgttaatgaaatgaaacaaaggcctttatgaaaatagcaatgtatattttgcataagcttatatgtctaaagcaaactctg

SEQ ID NO: 14303 - DNA, 3231 bp, DROSOPHILA
gaattctaataatacccctcgggataataacgaaaaagcagtcatagccattatggccattaagcacaaaaaagtgacatgaaaacgtgaagggaaatgtgttccacaaatggagaagaagaaaaaaacgcgctaacgcaagtcgttcggaaatgatagtaactgttgcatttcgctcacaaagactatgatagttttgctaacacagagtttcagtcgagtcctgaattgtcctttttgtggtttagtttgcggttgcaatcaatgctgaatatgttgtatgcagggtagcaatagagttgtacttactgctgattagataattaaatgtacatcttggatagatgaaaatgttcttgctttaaaatgtttcaattagttcattgattgagttgaaccaattattttgcaattagccaacatttcttgatataattaaagcttaaattgggactaaattgactaaggatttatttattttaaaattctcagagtgttatcatgttatagctgaattaaatcaaattatttgagtgtttgcattagtaagccaccgagccgactgcttatgtttacagggtatggcaccatcgtatcccaagtgggcccacctgcacagatggcatttaatgtctaataaaaacacgccgacaacaaaaactgaaaatcaataaacacaaagccagcaaaaagtacgtaaccagcaacaacaacaccaacaacaacacccaaatgcggcaacaacaagtgagcaagttaaagaacctttgcgatttgtaaacgctgcgaaatacccgttgtgcagaaaaaaaaaacaccaacaaataaacaaaaaagcaacaagaagaaaaaaaaagcaaaaaaaagaacatttagcaacaatgtcggagggcagcgataacaacggggatccccagcagcagggggcggagggggaggcggtgggcgagaacaaaatgaagtcccgcctccgcaaaggagccctcaagaagaagaacgtcttcaatgtcaaggatcactgcttcatcgcccggttcttcaagcagcccacgttctgctcccactgcaaggactttatctggggcttcggaaagcaaggatttcagtgccaagtttgctcctatgtggtgcacaagcggtgccacgaatatgtcaccttcatctgcccgggcaaggataagggcatcgattcggactcaccaaaaactcaacacaatttcgagccattcacatacgcaggacccacgttctgcgatcattgtgggtccctgctgtatggcatttaccaccagggtctcaaatgctcagcatgtgacatgaacgtgcatgcccgctgcaaggagaacgtgcccagcctttgcggatgcgatcacacggagcggcggggtcgcatttatctggagatcaatgtcaaggagaatctgctaactgtccagatcaaggagggtcgcaatctcatacccatggacccaaacggactgagcgatccctatgtgaaggtgaagctaattccagatgacaaggatcaatccaagaagaagactcgcaccattaaggcttgcctaaatcctgtctggaatgagacactcacttatgatctaaagcccgaagacaaggatcgacgcatcctgatcgaagtgtgggactgggatcgcacttcacgcaatgactttatgggtgctttgtccttcggaatctcagagatcatcaagaacccaaccaatggctggttcaaactgctcacccaggacgaaggcgagtactacaatgtgccatgtgcggatgatgagcaggacctactgaagctcaagcagaaaccatcgcaaaagaagccgatggtaatgcgcagcgatacgaacacgcatacttcttccaaaaaggatatgatccgggccacggactttaatttcatcaaagttctcggcaagggctcatttggaaaggttttgctggctgagcgcaaaggcagcgaggagttgtatgccattaagatactcaaaaaggatgtgatcattcaggacgacgacgtcgagtgcaccatgatcgaaaagcgtgtcctggcgctgggcgaaaagccacctttcctggtccaattacactcctgctttcagacgatggaccgtttgttctttgtaatggagtatgtgaatggcggcgatttgatgttccaaatccaacagtttggcaagtttaaggaaccagtggccgtattttatgccgctgaaatagcagcaggtcttttcttccttcataccaagggcatactgtatcgagatctaaagctggataatgtgctcctagacgccgatggacatgtgaagattgcggactttggcatgtgcaaggagaacatagtgggtgataagaccacaaagactttctgcggtacacctgattacattgctccagagataatactgtatcagccctatggcaaatcggtggactggtgggcctatggagtactgctttatgagatgttagtgggccagccacctttcgatggcgaagatgaggaggagctgtttgccgccataactgatcataatgtgtcctatccaaagagcctgagcaaagaggccaaagaggcctgcaagggcttcctaactaagcagccaaataagcgtttgggttgtggttcctctggcgaggaggatgtgcgtctgcatccctttttcagacgcatcgattgggagaaaatcgaaaatcgcgaagtgcaaccgccatttaagccgaaaattaaacaccgcaaggatgtgtccaactttgacaagcagttcacatcagagaaaacagacttgacgcccacggacaaggtgtttatgatgaatctggatcagtcggaattcgttggcttctcctacatgaatcccgaatatgttttcagcccatagatccgatctgatccgatctaatttccattcttcgcgttgtgtcccctaagtctattttgatattgattactaaaaagacatcttgttaatctttgttaagttttctgtttgattttcaaccattatatgtatctatatttattgaattgttaagtttttagttaattttaagatctagaaactgtgaaacagagctttagttatggaatattcgaatactgttcaaaggcacgtccttacctcaagccaacaaaaaaagcaataaaagcaacatgtcaaatacttggtagcctatctatcactctgcatagaactttgatcagttctgtaagatttt

SEQ ID NO: 14304 - protein, 670 aa, DROSOPHILA
MSEGSDNNGDPQQQGAEGEAVGENKMKSRLRKGALKKKNVFNVKDHCFIARFFKQPTFCSHCKDFIWGFGKQGFQCQVCSYVVHKRCHEYVTFICPGKDKGIDSDSPKTQHNFEPFTYAGPTFCDHCGSLLYGIYHQGLKCSACDMNVHARCKENVPSLCGCDHTERRGRIYLEINVKENLLTVQIKEGRNLIPMDPNGLSDPYVKVKLIPDDKDQSKKKTRTIKACLNPVWNETLTYDLKPEDKDRRILIEVWDWDRTSRNDFMGALSFGISEIIKNPTNGWFKLLTQDEGEYYNVPCADDEQDLLKLKQKPSQKKPMVMRSDTNTHTSSKKDMIRATDFNFIKVLGKGSFGKVLLAERKGSEELYAIKILKKDVIIQDDDVECTMIEKRVLALGEKPPFLVQLHSCFQTMDRLFFVMEYVNGGDLMFQIQQFGKFKEPVAVFYAAEIAAGLFFLHTKGILYRDLKLDNVLLDADGHVKIADFGMCKENIVGDKTTKTFCGTPDYIAPEIILYQPYGKSVDWWAYGVLLYEMLVGQPPFDGEDEEELFAAITDHNVSYPKSLSKEAKEACKGFLTKQPNKRLGCGSSGEEDVRLHPFFRRIDWEKIENREVQPPFKPKIKHRKDVSNFDKQFTSEKTDLTPTDKVFMMNLDQSEFVGFSYMNPEYVFSP

SEQ ID NO: 14305 - DNA, 8738 bp, DROSOPHILA
tttttgcgttttacttgcgtcggaaaccgccattttttatgcgcgccaactacgccgccctctctattcctctctctccctttctaccacgcagcccctctctgtcgcacccttgaggtgtaggggaggcacaccctctcaatgaaaatttgcgcattagaaaaaatgtggactgttctctgagccagttgtggcatacaaaatggatttattcagcattttttttttaactatacgatttttgtttctatttaatttggacagttgtatttttgatatagttatagtataagtaaagcaagaaaaaacgtatattacaaaatgtaaatttaagcaatttaaaaacataaattaataatcaaaggaaatgccttatttactaaatagcttctaaaacataaattttaattatgctgaaaacaataataataactagttgaataagtaactttatgcgaattcttattattttaataagcatatgttaaagttagggaaacgctttctttaagcatttagtatataaaacaatattattatttatttattttttaggaaatatataaataccgtttaaataaactaataatttcagagcgtagtagattagtttttaaatgtaactgattcacattcaaatttcaagaaaccaagttacaagctcgtaggtttgagtctttactgggcgtttcaattttggatggtgtctttgcttgctgtattctgctaataatagagcaatgctgttatgaaaacatttcatttatacatgacttttacattgtcaagtaaacattttgttaaaaagattgatggcgccatctattcaattttaaaatatatttaatatttgttaattttaattcatataactgaactttgtatttaaagttatgcattctaggaattatctaacttctttcaaaccagagaaattgtccgctaaaaacttggcatatttagcgtgtagctggtattttttcgctcttcagtcacggttacactccgaaacccacctgatttcgcgaactgcattactatcgaaactactactgtacttaacagaaagtgcgtgcaaaacaaatacaacattgttgcgatttcgttggggccgtggccgcaacaattcccctccagtgcaacaacaacgcagcacgcggagagcagaagaagagcaggaaaagaggaaaaatccggggaaatcccacgaaatgaagagtaacgtcaatcagggcggttacgccccacccggtttcggatccggattccagccaaatgctccgcccgccgaaggattcggctacccaccgcccactgggggccacaacgccccctatccccccgcacccggtcatccacagccgccgccgcccacgaattacgtgagttccaaaagtgtcccgctgtagccgatgaaaatgctagggaaagtgggtggtgtaaagggtgcttcttgtacaagcacaacacaaccatgacgtcatgccagttggtatttgcttatttataaatcaacagacacacagtcagtttgctgtggaatgaaagagattcattcgatttgcacgcgaatccgtggaatcggcggtttgataaacacaaacaactgagaactcaatgtacatccatatgtacatacatactgtaaaaccagtaatgcagactggataagcaagtcgaaagcttaattctcttgcatttacttatttacatttacgtatgaatgtttttatggctttactattttcactatgtttttcactcatgccaaaagagcgttttatttccattaagttttggataaacttaaaatattactcatcattcatgcacaaccgcgtgaagttttcattcttatagaatatttatttactccatacatttgcgtgccagagtgctgataagtacagctacaagaatacaagccagagcacaaaaaactaatcgaaacgcccctgaaataagtattcaactcattctttaatcaactcccgatcgttgcaggggtttatgccaggtcctcagccagccggatacgctccagttccccaaatgccgccatacggagaagctccgccctacggagccggacaaccaccttacatgggtggtccaggtggtcagccaccttatgcgggtggtccaggcggacagccaccttatgtaggtggtcctggtggacagccacactacggaggaggagcaccaccgccccaggccttcggcggatatcctcccggaccagcaggaccaggaggaccaccaaacgcattcggcggttatccaccgggacaaccacaacagcccattgtcacgcaaccgggaatgggaccgggaatgggtccagggatggccccacagggcggaccagcaggcaagtaatcaaaaactagtctgtaacataaaacaaatgttctacatgttggactcacatatttctacacaaatcagggtgttcaaatcatggcacgagacttttatcgctttctgcttccttgttaaaattattcattccatatctgagcttacttcttatataattttactacacaaaccgctgaatcaaaacaagatcgcatctttgtgatgtgtcggtgtgtcgttgccctgcgattgagataatgtccaatcagttgtcttaagatttcttcgggtgcaggcactgaacccatcgtcccagatagaggtagctcgtcaagatcggtgtagaacaaaggttcccccagaagcaaagtggggtgcaaacatttacgtagtcaatttggagagtgttagagactttaaggttcttagaccgcctcttatcaattgtatttttgtttacacgtgcatcggatccgtccgaaataagctgaatatctttgccagatctttggcgcttatcggagtgcctagcgtctgccttaattgaaccaataaaataatacaaagcgtcatttaaagcgcccgtcgtcgtggatggcgttgatttttcccaacgagcagttagttcatctctgtgctgcagagcaggcagtcgtgtcagtctgaaaaaatgtccaccgaaaacccagcaagttgtgtttccacgctggacctaagtggtggcgaaaatcggggaaatccggaggaatctcattccaggggcgtgaggagcggctccaaggtgctgcgcttaatctggcactcgctgtatagccagtataatcagatctgctcgagatcccagactctaaggcaactggtttgcagggaagccaacaaaccactgcccaagaaactcaggcacacaatgagactaaataagtcggccaagcgaaagggatacgagttctacatgagcgacgaggacaggaggtaaggaagtcatattgtggtcttgaccagaaactgtagggatgaagatgacgggttgaaatgatgaaccttttaagatttcgagtgtataaaaaatgaaatactcagcgaggtaatagataaattacactacctttttgattaaaaaaattgagtgaaaacgaacgtgagtgaaaggaatgattaggaatatataaaaatacgctaatacttaaaataagtagtttcgttaagatatgccttttgtagtttggtgcaaattatgtaaaattatcttttcaaggttttcttacattgtgaaattaaatatttattagtagatttatctttagagcccgttataaagactatctttctaccgccgattagatacaagagccgatgggtgaggtagcataatagcttgtggctgggggttatccatgggatgtgtcaggaggggcatgctccattgtgacgcttccaattagaaaggccgagtaattgtgtcgctgacattgaccaattgacacactggccactgaacgcactgaacaagttagccttttgtgtgcactaatttaatttgaccgccaagattataagaagtcggaaaaagagaacattctcataaagttcactttaagttttatttttaaattcccttcaatcaaattataccgtaaccgaaaaagtctttagtttgaatggtgcttctttgttttggttgtatgttttattgtatgcatgtatcatttaattttataacaatttaagccactcatttctattgagaatggatattgatgagtattatatttgcaggagactggatgagtatacctaccggaattccgaactgtccgcgcggattggagtaccttacgactatcgaccagcttttagttaagcaaaaggtcgagctgctcgaggccttcactggtttcgagaccaacaacaagttcacgatcaagaacgccctgggtcagaaggtctatttcgcggcggaggacaacgactgctgcacgcgcaattgctgtggtcctgcgcgtcccttcgacatgcgggtctttgataacttccagcaggaagtgatccacatgcaccgcccgctggcctgctcctcctgtctgtttccctgctgtctgcagagtatcgaggtctcggcaccacccggcaatgttatcggcaccattgagcaggagtggtccatctgttcgccatccttccgcatcctcaaccacgtgggtgacacggtgatgcgcatcgaaggacctttctgcaccttttcgctctgcggcgacgttgagttcaatgtatgtttataaaattcaaatgttctgtgtgattttactaatattttttgattctcaggttgtttcgctcactggtgagaagataggcaagatctcgaaacagtggtcgggcctggcacgtgaaattttcacggatgcggacttcttcggcatcaatttcccactggacttggatgtgcgcatgaaggccgttttgctgggtgccacattcctcatagtaagtgttttcttttcagcaaagatttattgtagttatttatcattggcctctgccaatcagttgtatagtgttcatttttatcggttcaagctgttaagacgtctgcaacgcagacttcgttggtgctgaggtaatgttgaccctccagcccattaaatcctccagcttagtttgagtaggctagtccagcactaagtccttcactcgtcaatgttttctgtctgttttctaaacgaatgctttctgtttgccccacaggatgccatgttctttgagaaagccggaaaccaagagaccgataggcccggaatgctttaggaatcgggtgctggcttgtgcgtgaattgtttatgcgttgcaaccgattgttgtggcgtttgtggcaattgcgaatgcgattgcgacgattaaatgttgtgcattatcttgagttgcaactttatccaaatatcttcccggtgaactgtcgcgtactagtcttctgtaccaaatgcttattgatgaaaatggatcgcactaatgaaactccttgttaattttgatgaacatactgaactcaggcttccttcgagaggacattgccagaatataaaactaactttaagttagcattttttgctattttgccacagcaattacttgtgtaaagtattcaacgacaaatcagctttatttatgaattttgtattgatgctctgaagcgacaactaactaacgaatgattcgttattgaaacatgtactttaaactgtatgttaagtgtcttatggaaagaaaaatatatttaacattgtatattgttaagcatcaggaaatttatatatatccctactgatattatggaacagaaggttttctttttatgtattacaacaaaagttaaataaattataaacttatatactggttaacgataaattgctggaacccctagataaattcatagtccgtaatactcgaatgtttctaaattattttgtttcacaacgaaaatgtatgtttttaaaaaactatataggtgttttccggagcaagtttcgtgttgaaaacaatttcctttcgttggaactgaggccatcactaaatcatcagctgatttcggtaaatggaatcggaaaccggcttttagctgaactaaagaactgaaacgagtttgctctgataaaaataaactcaaattaacgcattgcacttggctcaagcagaagttcgttttagtagtaaaaatgcaggcgttgcaagttttggcattgctgcttctgtccggagtgttcggtaaggatcttcaggagtgcgaggatcttggaaatggtagctatctctgtcgggaaatcgagagctttgagcaactgaatcgatatgtcggtaaaaactggaaaagtgtgaaggttgtcaatgaacacacaggaatcgaaagagcagaagatggggaactgcctggtctctccactcttttgcaattggatctatctgaatccggtggtgtgactctgggcgaaaagggattgcaagattttaaggcgctgcagaagttaaatcttacccacgctcagttggatgagctaaaatcagagcaatttcccaacccatccgaaatgatcaatttcgatgtgagctacaacgacatattggctattactaccaaactgatgagtggattcggcaatttggtgtatgccaacttttccgaaaacctgatagcagtcatagaacccaatgcgtttagacatatgaaaaacctacgatttcttgatctaaccaccaactatcaggaaaacataactcttggcgaaaatgcaaacttgcgttttttgtctataagtaacaataatttgagagacgtaagtgattatgaatttagttaaaagccatgatatatccgatttaaatcccctagtttcaatggtgtcaccttcgagtactgcccaaattggaggaactgcatcttcacagcaattggctggagcatctggatatgggaatattttacgcgttgcccaatcttcgagttttaaatgtatccaacaataatctgtttgagattaaacgaacacttttcatggccccgggagaaattgcgccattggaactgctcgactatagctcgaatattgttaaagtcctggatgactcagtgttttgcagactcaagaagctaagaactctcaatttgtggctaaaccagataaacagaatccatccgagggcctttttgggactaagttcactgcaaactctgcacttgcagggcaataagatctcaattcttcccgatgacgtctttgccaatctaacagctttggagaaactcgatctcagcaagaataacattcaaaagctgggattgcgtgtatttggtgaacggattctccgcaagctgatctacctggatttaagcaacaactacattgcggatctgcatcctctggctctttcctctatgccctttatcaaggaactcaggctcagaaggaataggctggtcagtctggatcttcgtatgtttgcaccgctgcggcaattacaattgcttacaattaacgagaatcgtctggaggagattgatggtgaaattttggacactttggatcgtctcaatcatctggagctcaacaacaatcgtctcactttcttgccggatctgaagtcatcacaaaaccttttgcaattacgaaacatcactttggaggggaatccttggcagtgtctgtgtctggacgagattacctcctggttaaatggtcgtcacgtgtcttacgctcgacccagtagtgcctacttcagtggacggaaacccctctgcgttgtcacgcccatggataaatgtttgcgcgaccttcaagaaactaaagctcaaggaatcgtcgaaagctatgagaagatataatctgcctagacttgaccatcatcatattcataggaccaagaagtttccgaattccaatttaatttgggcataaatcttgtttacgagctatacattggtaataatactgccctcagtagaggttcaatatacttataactaccaatttaaatcatatttttttcatcatctattatcacagtagtagtcacattcatattcctgattgtaaaacgcatttgtgccaccagttgagatgcaataaatcaatatccaccgaatgctggactgcagtttctgttgtgggtaccgcttcgctccgctgactgactggacatccgccccaggatccttggagaagcctccgtaaatcacagacaattggatgaccatgagggcaaaacttttagctagccaaagtatttggccaactgttgtaaaacaataaaacggaaggcatgcgatgggcaaaatgggagtggcagtgagggcgactggggcggaaaaccgatgccgagattttcaaatacttaacaccacttaagcgaacagttggacaatgacaatgacgggggattcggattgcgattgggaattccaaagagtccaaggtggggatttgattgttaagcgtaatttagcgcaagaatttttattaaaatttccaatttgtttgcagataaacttttatgctggccgcaatgagttgactgggtgatcgatggactgtgctgctaaatggtataatggttgggcacgcagttgaatgaaacctaagactatatgaagatgacaagggagttatgaatgtctgagctttcccttttagaacagagcaagtttccgtggtctcgaactccctaactgcgttcatttgactatgagcccaactatatgagaaggctgcagggtcagaggtttgagcaagtggcgcacaagtattccaggtattcaaacgggcaacaaaagaacaatggacccgagaagttggcaaccaggacatgtgcagccaatgcgcaat

SEQ ID NO: 14306 - DNA, 3349 bp, DROSOPHILA
acactccgaaacccacctgatttcgcgaactgcattactatcgaaactactactgtacttaacagaaagtgcgtgcaaaacaaatacaacattgttgcgatttcgttggggccgtggccgcaacaattcccctccagtgcaacaacaacgcagcacgcggagagcagaagaagagcaggaaaagaggaaaaatccggggaaatcccacgaaatgaagagtaacgtcaatcagggcggttacgccccacccggtttcggatccggattccagccaaatgctccgcccgccgaaggattcggctacccaccgcccactgggggccacaacgccccctatccccccgcacccggtcatccacagccgccgccgcccacgaattacgggtttatgccaggtcctcagccagccggatacgctccagttccccaaatgccgccatacggagaagctccgccctacggagccggacaaccaccttacatgggtggtccaggtggtcagccaccttatgcgggtggtccaggcggacagccaccttatgtaggtggtcctggtggacagccacactacggaggaggagcaccaccgccccaggccttcggcggatatcctcccggaccagcaggaccaggaggaccaccaaacgcattcggcggttatccaccgggacaaccacaacagcccattgtcacgcaaccgggaatgggaccgggaatgggtccagggatggccccacagggcggaccagcaggcaaatttcttcgggtgcaggcactgaacccatcgtcccagatagaggtagctcgtcaagatcggtgtagaacaaaggttcccccagaagcaaagtggggtgcaaacatttacgtagtcaatttggagagtgttagagactttaagagcaggcagtcgtgtcagtctgaaaaaatgtccaccgaaaacccagcaagttgtgtttccacgctggacctaagtggtggcgaaaatcggggaaatccggaggaatctcattccaggggcgtgaggagcggctccaaggtgctgcgcttaatctggcactcgctgtatagccagtataatcagatctgctcgagatcccagactctaaggcaactggtttgcagggaagccaacaaaccactgcccaagaaactcaggcacacaatgagactaaataagtcggccaagcgaaagggatacgagttctacatgagcgacgaggacaggagtattatatttgcaggagactggatgagtatacctaccggaattccgaactgtccgcgcggattggagtaccttacgactatcgaccagcttttagttaagcaaaaggtcgagctgctcgaggccttcactggtttcgagaccaacaacaagttcacgatcaagaacgccctgggtcagaaggtctatttcgcggcggaggacaacgactgctgcacgcgcaattgctgtggtcctgcgcgtcccttcgacatgcgggtctttgataacttccagcaggaagtgatccacatgcaccgcccgctggcctgctcctcctgtctgtttccctgctgtctgcagagtatcgaggtctcggcaccacccggcaatgttatcggcaccattgagcaggagtggtccatctgttcgccatccttccgcatcctcaaccacgtgggtgacacggtgatgcgcatcgaaggacctttctgcaccttttcgctctgcggcgacgttgagttcaatgttgtttcgctcactggtgagaagataggcaagatctcgaaacagtggtcgggcctggcacgtgaaattttcacggatgcggacttcttcggcatcaatttcccactggacttggatgtgcgcatgaaggccgttttgctgggtgccacattcctcatacagaagttcgttttagtagtaaaaatgcaggcgttgcaagttttggcattgctgcttctgtccggagtgttcggtaaggatcttcaggagtgcgaggatcttggaaatggtagctatctctgtcgggaaatcgagagctttgagcaactgaatcgatatgtcggtaaaaactggaaaagtgtgaaggttgtcaatgaacacacaggaatcgaaagagcagaagatggggaactgcctggtctctccactcttttgcaattggatctatctgaatccggtggtgtgactctgggcgaaaagggattgcaagattttaaggcgctgcagaagttaaatcttacccacgctcagttggatgagctaaaatcagagcaatttcccaacccatccgaaatgatcaatttcgatgtgagctacaacgacatattggctattactaccaaactgatgagtggattcggcaatttgtttcaatggtgtcaccttcgagtactgcccaaattggaggaactgcatcttcacagcaattggctggagcatctggatatgggaatattttacgcgttgcccaatcttcgagttttaaatgtatccaacaataatctgtttgagattaaacgaacacttttcatggccccgggagaaattgcgccattggaactgctcgactatagctcgaatattgttaaagtcctggatgactcagtgttttgcagactcaagaagctaagaactctcaatttgtggctaaaccagataaacagaatccatccgagggcctttttgggactaagttcactgcaaactctgcacttgcagggcaataagatctcaattcttcccgatgacgtctttgccaatctaacagctttggagaaactcgatctcagcaagaataacattcaaaagctgggattgcgtgtatttggtgaacggattctccgcaagctgatctacctggatttaagcaacaactacattgcggatctgcatcctctggctctttcctctatgccctttatcaaggaactcaggctcagaaggaataggctggtcagtctggatcttcgtatgtttgcaccgctgcggcaattacaattgcttacaattaacgagaatcgtctggaggagattgatggtgaaattttggacactttggatcgtctcaatcatctggagctcaacaacaatcgtctcactttcttgccggatctgaagtcatcacaaaaccttttgcaattacgaaacatcactttggaggggaatccttggcagtgtctgtgtctggacgagattacctcctggttaaatggtcgtcacgtgtcttacgctcgacccagtagtgcctacttcagtggacggaaacccctctgcgttgtcacgcccatggataaatgtttgcgcgaccttcaagaaactaaagctcaaggaatcgtcgaaagctatgagaagatataa

SEQ ID NO: 14307 - protein, 1045 aa, DROSOPHILA
MKSNVNQGGYAPPGFGSGFQPNAPPAEGFGYPPPTGGHNAPYPPAPGHPQPPPPTNYGFMPGPQPAGYAPVPQMPPYGEAPPYGAGQPPYMGGPGGQPPYAGGPGGQPPYVGGPGGQPHYGGGAPPPQAFGGYPPGPAGPGGPPNAFGGYPPGQPQQPIVTQPGMGPGMGPGMAPQGGPAGKFLRVQALNPSSQIEVARQDRCRTKVPPEAKWGANIYVVNLESVRDFKSRQSCQSEKMSTENPASCVSTLDLSGGENRGNPEESHSRGVRSGSKVLRLIWHSLYSQYNQICSRSQTLRQLVCREANKPLPKKLRHTMRLNKSAKRKGYEFYMSDEDRSIIFAGDWMSIPTGIPNCPRGLEYLTTIDQLLVKQKVELLEAFTGFETNNKFTIKNALGQKVYFAAEDNDCCTRNCCGPARPFDMRVFDNFQQEVIHMHRPLACSSCLFPCCLQSIEVSAPPGNVIGTIEQEWSICSPSFRILNHVGDTVMRIEGPFCTFSLCGDVEFNVVSLTGEKIGKISKQWSGLAREIFTDADFFGINFPLDLDVRMKAVLLGATFLIQKFVLVVKMQALQVLALLLLSGVFGKDLQECEDLGNGSYLCREIESFEQLNRYVGKNWKSVKVVNEHTGIERAEDGELPGLSTLLQLDLSESGGVTLGEKGLQDFKALQKLNLTHAQLDELKSEQFPNPSEMINFDVSYNDILAITTKLMSGFGNLFQWCHLRVLPKLEELHLHSNWLEHLDMGIFYALPNLRVLNVSNNNLFEIKRTLFMAPGEIAPLELLDYSSNIVKVLDDSVFCRLKKLRTLNLWLNQINRIHPRAFLGLSSLQTLHLQGNKISILPDDVFANLTALEKLDLSKNNIQKLGLRVFGERILRKLIYLDLSNNYIADLHPLALSSMPFIKELRLRRNRLVSLDLRMFAPLRQLQLLTINENRLEEIDGEILDTLDRLNHLELNNNRLTFLPDLKSSQNLLQLRNITLEGNPWQCLCLDEITSWLNGRHVSYARPSSAYFSGRKPLCVVTPMDKCLRDLQETKAQGIVESYEKI

SEQ ID NO: 14308 - DNA, 2800 bp, DROSOPHILA
tcgcgtagcgctggccatatgcgagaatctcgggagaccaaaagatcgggagatatgtcgaagcactctagaagatctggccaagttccgccagggatcgtcgattaggattaaggagaatgtgcataagttcctgatgttctatctaaaagttctgagatggtcgtacaagaatcagccaacggatctatatcgcaaatgggttaattacatttttcagttaagtagcgatcatttagtaaatgtttcaatttttcagtatggacaaaactttggcaaggacccaaagtctgccccatcggccggcaattccgaggatgaacagcgtgtttggttggaggagggcaagtccttttacgccatgaaaacatttgaagatggctccacagttgtttactcagcggtggttaaggatgcgagagctggttggtcggaaaatggtctgaaaactctgatggaaacgcaagtgggctgcgctttgaatcgaaatgaaaattgaattgtttaatactcttaatatagtatatattttcatattctgtgtgtacaatttactggtttttcgatatggtagtggttattcggatatggcaggtaaatactagtaataaatatgtcaaacgtaagcattttcggaatggtcattttttaaaaatcaaatgtagtaaaatcattttgaaaacatgttcattaagttaactatataaaaagtacaagcgacataggaaatttacaattgtttaacgttacttttcatttaaatattttagctagttttggtctgtaaatttacctgcctcttgtttggatattgtagataactaatgtacctatacgattaaaatgttttcaacttttcgacttaattataggcaggaaaaaggtggacggaatgtgtttttgatatcaaaagtcaatcctagcttagatatcatgtggagtggcgaaaaggcacttattgcgtgtttcgtttgtggtgaggataagcctggttttcctattaacttctaaatattctggaggcaacgccaatcaacaggagtcccaacagaagctgcagggatccgtgcatttgaactaagctggaaccattgcagctgtcgctggagcagtagcactcctcccagtacactccgttttcgtagactccccagttacagacgccaaccactccggtatcggaaacggatgcacatcgtcggatcacctggcgccaacgaccgtcccctggaaaatataatgtaattattaatttgtacacacatatttgccaagagagataatccattggacacctattgctgcaataggcaataatcacagtcaaggtaaaatggtaaccacacaaatggactgatcacaagatccttgggaaaatacgatacttgtggagttagggcgtacgctactcctacttacagatgaatcctctcggtccctgctgcaccaccttcatgcagaaggatcctggcatgtggctctcgtcgctgttgcactcaatggaaatgtgctcggtgcggttgaatctcttgtaggcgccacagctgtcgtgtcccttgcgatcctggtcggaggagcactggtagcatcgaatggcccagctgcctgtatgaagtcaacaattagttaaaattcctcaaaaacaattgccaaagccacacccaaaagccgagattaaaaggtggcttattgggattcgtacgacttgggattcctgtgacctaccacatatggccagggtgagcagcaggaacgtacaacggagcaggacattcattttttacttaaaactgttttgtgcgctttgtttaacttaaataaaatagaattaaaacaagaaaataaataacgcgagttactgtgtgaccatatggtagatcgctataaaataccaaactatgaaaataccaatattatgtttgccatctagatattttatttcaaatattatttcttaaaaaatataaaaatataagcacgaatgttccaaaaagaaacgtatttaatacatttgttattctctaattaagcctatggctctcgttaccgaatttgtattatgttctctatgcccaatagttgtatctatttaagtgtatggcctataaaatttaagcgaggaactactgagctagaaataaaattcttgttctgcaacatttatttttctgagaggttatttttaaaatttgcaacggtgttttcaagcatgaacaatattgccacatggttttggtttttatcctggtttgtgtctaggataatgcatattttggagattactcgaacgctgctcacacggtcacactgctatttacacgcccaaaaaaattgaatccaattgaaacgcgaagaaaaacataaatataacgatgaaaacactggagaaatatatcctattcgccatcgtgctctgctgcctgctgcaattgggtaagttcgtgatgccaaaactgcgcctgcgcaaccgacagcaaaaagcaaacaaacccgcataactactttttccaggccaggcgatcaaatgttgggactgtcgcagcgataacgatcccaaatgcggggatccttttgacaacagcacgctggccatcaccgattgccaacaggcgccggagctggagcatctgaagggcgtgcgaccgacaatgtgtcgcaagatccggcagaaggtgcacggtgaatggcgctactttcgcagctgcgcctacatgggcgagccgggcatcgagggcgacgaacgcttctgcctgatgcgcactggcagctacaacatcttcatggagttctgcacgtgcaa

SEQ ID NO: 14309 - DNA, 488 bp, DROSOPHILA
cacaaaacagttttaagtaaaaaatgaatgtcctgctccgttgtacgttcctgctgctcaccctggccatatgtggcagctgggccattcgatgctaccagtgctcctccgaccaggatcgcaagggacacgacagctgtggcgcctacaagagattcaaccgcaccgagcacatttccattgagtgcaacagcgacgagagccacatgccaggatccttctgcatgaaggtggtgcagcagggaccgagaggattcatctgggacggtcgttggcgccaggtgatccgacgatgtgcatccgtttccgataccggagtggttggcgtctgtaactggggagtctacgaaaacggagtgtactgggaggagtgctactgctccagcgacagctgcaatggttccagcttagttcaaatgcacggatccctgcagcttctgttgggactcctgttgattggcgttgcctccagaatatttagaagttaa

SEQ ID NO: 14310 - protein, 154 aa, DROSOPHILA
MNVLLRCTFLLLTLAICGSWAIRCYQCSSDQDRKGHDSCGAYKRFNRTEHISIECNSDESHMPGSFCMKVVQQGPRGFIWDGRWRQVIRRCASVSDTGVVGVCNWGVYENGVYWEECYCSSDSCNGSSLVQMHGSLQLLLGLLLIGVASRIFRS

SEQ ID NO: 14311 - DNA, 3333 bp, DROSOPHILA
gcctccaccgttcttgctgaagcccaaaccgacaatgtagggcaccttgccttcgtaggcaggatatcccatggtgatcctaccttcgatcgaggccttgcccacgggcacatccttccagaaaaccggcttctcgaacgccgtggcggaggcaatcacccccaaaagtaggaccgctagcaccttcatgttccttaagttcagcacacttaataaacgcaaacaaacacagtcgccacatttatagcttcattttcaaccggaaacgaaataatccgctgggaaagtaatttacaactctcagataaccacggttcttttgtttttgtgtgcggagttagccaacttgacgaaatcttttgaatggaaattggcactttcgataagatttaaatgtggacattatcaaaggaggcttgtcaaatttgaatttattataacaataaaatatatttgctttattatactaaacgagaatatactttgttttatgttacaaaacaaatgaacacatttacgttccacttttgaactctttgataaataaaccaatagcagcctttctttttatcaaaaagaaaacatttacactacttgaatgcaacggctgcttacaagcagtgctaccactctggcagtaagcgaatgcaccaacccattagtccgtgtcacatttccttttcgcacagttgttttttttttagtgaaaaaaaagtttcggacataatcattaggcagcatacatttcatctgccaaagcccattagattcggtttcatgctattgaatacgctttattaaatgtgccacttattttgaatattccgcaaaaataggtaatcgatagctgttcatttatccgaaactatcggttttggctgaacccaagtacactacctatcgatacaattgtgactggttgaaccagctctaatccaagctgtttattttacaaaaagaacacaaaagttataattctgtcatttaattgtctgcaaaataggactttccagcatcattgcatgtagttaaatccagatttctgaaaaaccttatttggcagcgatatgtttagccaaaaaataggaatttgcggataaattaccccccggagtgacaaagatctgtattgtcatacagacgcctgcagaaaaaagggttttacaagaagaaaatgcgctattttgcaaaggttagtaaactttaggtaatctttgacttccaagatctctaactcgagttactgagcagttccgacggctttaactgatatctttgagctaagatacaaggaataaacctttcaaaaagataactaatatgtatgctttccgtttgttttctgttaggaatgatttctagaattcaacgtcaaatataatggataacatagtctacgactttgccaagatcacgtttcaagcaaaagacaacaggtaggcctttagaataatttatatctgaaactagcccaaaattcatacttcaggtcacccactactaactcgaatctgtcgtggcaactaaatcagatggccttgtcggacatggaggagatgcaggacacatccgagcccatagctccacccgaatccgatgacaatgtcagcagtgaatcgcatgactccgacgatgtagactcgcaattgagtcgctgcgaggacaacgatgacgacagcgattgcatcagtggatcctccagacgcagttccacttttggagctcgagcgggcgtggctcgtcgcagaatgcccgccagggtgtccaaggacaactttaaccggatctgcagcgccatcatgaaacccatcaaaaagaagcaacgcaaagaactgaacacaaatgcccaaacacttaaaagcatcgaaaagatctacaccagcaggcgcatgaaaaagttcacgcccaccaatctggagacaatcttcgaggaacccagcgatgagaatgccgccgatgcagaggacgacagcgaagagtgctccatcagcagccaagtgaaagtagttaaggtgtggggtcgcaaactccgccgggcaatatccttcagcgatggcctgaacaagaacaaaatcctgtcgaagagacgccgccagaaggtgaagaagacctttggcaagcgtttcgcactcaagaaaatctccatgaccgagttccacgatcgtctgaataagagcttcgacagtgccatgctggagggggatgatgcagaggcgggaggatcggcggaggccgtcaacatccccaagacatccatgaccatggaagacatacagctgccgacaatgagcagccagcaccagttcctcatgcaaccggcgggctttgagtagagagactgaatgatccatcaaatacgccccacattgatttgcattgcattaaaactagctaatagtgcccaaaaataaatgtactgattaccaattatgaagttaggatttacgttcgtttggttaacttctcaccttagtcttaagccccataaaagttataaatgagtgtaaatagcatgtagaagaaaagaaaataagagctatacctagagctaaacttatccagccatagaatacgattctgtgcttagccattaagataataaataaaagttgaaaatacatatccatccactgtcgttcggaaaatcttgtgaaatccctggatagatatatttcattaacgctttttaaacactgtggaactcatgaatgaatttccttttaagtaatgaaaatgttttatgtgttagattttataatttattggacaacaaataaaatagttttttgagatttctttataatttaattctagacgtttccgtggtattaattgaatgaccagttatcagttccccaaattccagccgaaaccgtggtgccaatttcgtgatataataagctataaagaccgatttggggcggtaaagagtgcgctaacgaggaacactaaaatgaactaataaataaacccaattcgaatgcgaaacggaagcgaaacgcaccgaggtgcccaaaatcctggacgaattgtgcgagccgggtggcgttcaagctcaattatttaacggccgccgcgtgattagcaagtgcaataaaatgcagtaacaaaaacgcgcccattattaatgagtgcaacatgcaacgggagcgattatgcagcaaatatatacgtatagatatagacatagatatagacgcaccaccgcacgatatcgaactgcaccgccgcctaacaaggggtggtgctgtggtgcagtggcgttgtgtgttgtggtgcatttgctgttgcatttgcataatcatgctgttgtgcctcactgttgttgcagcc

SEQ ID NO: 14312 - DNA, 1123 bp, DROSOPHILA
taggactttccagcatcattgcatgtagttaaatccagatttctgaaaaaccttatttggcagcgatatgtttagccaaaaaataggaatttgcggataaattaccccccggagtgacaaagatctgtattgtcatacagacgcctgcagaaaaaagggttttacaagaagaaaatgcgctattttgcaaaggaatgatttctagaattcaacgtcaaatataatggataacatagtctacgactttgccaagatcacgtttcaagcaaaagacaacaggtcacccactactaactcgaatctgtcgtggcaactaaatcagatggccttgtcggacatggaggagatgcaggacacatccgagcccatagctccacccgaatccgatgacaatgtcagcagtgaatcgcatgactccgacgatgtagactcgcaattgagtcgctgcgaggacaacgatgacgacagcgattgcatcagtggatcctccagacgcagttccacttttggagctcgagcgggcgtggctcgtcgcagaatgcccgccagggtgtccaaggacaactttaaccggatctgcagcgccatcatgaaacccatcaaaaagaagcaacgcaaagaactgaacacaaatgcccaaacacttaaaagcatcgaaaagatctacaccagcaggcgcatgaaaaagttcacgcccaccaatctggagacaatcttcgaggaacccagcgatgagaatgccgccgatgcagaggacgacagcgaagagtgctccatcagcagccaagtgaaagtagttaaggtgtggggtcgcaaactccgccgggcaatatccttcagcgatggcctgaacaagaacaaaatcctgtcgaagagacgccgccagaaggtgaagaagacctttggcaagcgtttcgcactcaagaaaatctccatgaccgagttccacgatcgtctgaataagagcttcgacagtgccatgctggagggggatgatgcagaggcgggaggatcggcggaggccgtcaacatccccaagacatccatgaccatggaagacatacagctgccgacaatgagcagccagcaccagttcctcatgcaaccggcgggctttgagtag

SEQ ID NO: 14313 - protein, 266 aa, DROSOPHILA
MALSDMEEMQDTSEPIAPPESDDNVSSESHDSDDVDSQLSRCEDNDDDSDCISGSSRRSSTFGARAGVARRRMPARVSKDNFNRICSAIMKPIKKKQRKELNTNAQTLKSIEKIYTSRRMKKFTPTNLETIFEEPSDENAADAEDDSEECSISSQVKVVKVWGRKLRRAISFSDGLNKNKILSKRRRQKVKKTFGKRFALKKISMTEFHDRLNKSFDSAMLEGDDAEAGGSAEAVNIPKTSMTMEDIQLPTMSSQHQFLMQPAGFE

SEQ ID NO: 14314 - DNA, 4602 bp, DROSOPHILA
gagaccagtttgcattttgaatgctgaaccagttggttcacaactacaagagcggcgcatcttctgtaaaaacaacaacgtttttattgcaaaaatattgaaaaatgcgttgacaacaacaagcatatacataaagtcgcctttgttggtcaccgtgaccttaacacaaattttgattttagtattatatcaactgactacgtgcatgggttttttttctggttccttcaacaagtcgggatggtctttcattaataaaattccttggcggccgaaagatctgcatgagtcatttggccgcagaatatatggcggttcattgaaacaaaacccgaaaatacccaaaacacaataacaagacagtgacaagctggggataggaaagatccaagcgagatcaattaatattctgtctcgttgacggtttcgctgtgactttttgctagcctgcgtggggtttttttttcctcataatcgagcattcacacataagccgagatttgcgatttgatctgagaagaaagtcaagaataaccagaacgggtttcagtggcttaatgcgctgaagtttcaaagatctgacctttttgcttgccttggcgcgcacttttgcagattttaatggacacggtttgtttggctggcggacttaaaaatttaatttattttgaatttaaatgaaatcggttaagaaccgtttcaaaatgacgtcagacttgaccagtgtacgctccagggtgaccatgcagcttgaggttttcaaaaagtattgtctatcgataacttgtgaagaacgcgggcttctttaaattattacatacaatttaattttactactttaaatttataacattaaactagaataaaactatatacgttttgtgaaacatgttctatgcaaacatttacaatcgcattttcctaactgcactaaattattactagtatatttttctttgttgttttggggctggcatacggtcacactttggggatgatttcttcaatgttaatttctttagaccctcggaaaaccacaacaaaaggtgcggatcgacatccaaatgagctccctgttccgcagcctgaaccatttttcttcgaaacgggagaatgtcgtgaaggaggcgctcataaatacactgaacgaaaatgcgcgtgagatagagttcgaggtgaaacagaagagtttgggtgagttctgggtactcccccggaaatggccatccatttatatacattcacgtattgcagaggtcctgggagtatgtgagcagaccagtgccctgtgcaccaccctggaggccctgttcctgcacgggctgaaggactccttcctgtccgccaccttcaatgtcatcgctggcgatgtggaacgcaggcccgagcccagcttctgggcgccctgcatggtctttatgcacaagcaggtgatcgagcaggtgcagggtctcagccagatcacctcagagacggggcagtgccgcgcctgggtgcgccagtcgcttaacgagtctgtgttctcctcctatctgaacaacatgcgcaagaacggatcggccctgtcgcagtactacaagcgaaacgcccttatgcgggactccgagggtctggagacggccgccaagattatggagagcttggaggcctatgtgcaattcgatctgccagtgaactccagcctgttgaaccactggcccgactactccctgcagctatctgatctctggacacctgctctcaagtcctgcccggtatgatcttttatcctgccaagaatgttcggcttagacttatcgtatagttcaacaatccaaaattcctatgataagagggcctttcctggtctttatcgctacaagtggactaatttgtgtataccattgcagattagcagcggagttgatgtggccagctcgcttggatccgatatcattgccataccgacgccacagcccctgcagaccaatgaactgttctcggagtccatttcgaatagcccctttggaaggaatagcaactttggtgttcccgaactcagccagcgagagaacctggacctgctgatacaaaagtttgatgaaatggatgtgattaacgaggagcaaacaggtggcgataaagcggaaacgaatgaaacagcagagcaggaagctccatctggcagtaagacgaggtcgaggaaaaaatccaatcgtcaaatggacagcagctccttcgccgatctggatcttgaagcaccttctcttctgccccagggcagtaattctttgtccaatctaatgcaaacctcatggtctggtgacttggaagcaacgcctacatcacccacagaggaactgacaggatctaggtttttccagcgatctgtgagcgtcagtagttcagtcagtctgcgttctccaactacggacagatgcagctacaatgctctgttgcggaaacacgaaagcaaccgggaaagtggagccggatggtcggagatctgggagaagtttcgggccagtgcctccaacctcaatgtggctcagcctcagcgagataccgatccgcccatttcagaagacttgagtgatctgcagtcactggacgtaagttggttgagaactaagattattataaattaaatgctatcttattatagaccaactcggagtttgagctgcttacctcagagtttgacatggtggagctgcagcaaatggtggcccagctgtgtcaactagctcgagagccgggtctggatgcccagggattcctgtgcaagagctgtcagcatccgctgggcattggctactccaactttcagtgagatcatccgtttgtccattattaatcccacttacatttgtatctacccttagagtttgcgcctttagtggcagctactactgcaatagctgcatggatgttgagatgcaattgatacccgctcgcatcatttacaattgggatttccgaaagtacagcgtcagcaagcgggcagcaactttccttgccgaattccgatcgcatccattcctggacatgcagttgcttaacccgagaatatattttgcttccgatgccatggctgaattgcaatccctgcggatccgactaaacttcattagggcctatttgtatacctgtgctccgagcagcatagagcttctccagaatcagtttgctggcagggagtacctttacgagcacattcatctgtactccatagcagatttggctcttattcagcgaggtgtgctgtgtcagcagctgcagaaagccttcaaattgggggaagcgcatgtcttgaagtgcagactgtgccacctaaaaggattcatctgcgagatatgccagagtccaagggtgctgtatccctttcacatcagcaccacattcagagtgagtcgaactatcaagaaattgcaagatgacagatattttcatactggcgctcacacatctttttacagtgtctggcctgtggagctgtgttccacgctgagtgtttgaatgagaagcagccatgtcccaaatgtgaacgaatacgtaagcgcgaggatcagggcctccaggaggcggtgcaatgtcttaaacagaagaatgaggttgcctaaaatcggccatatttagattttaggttgaacaagtgcgatttgttattacacgtaaccaagaaaaggctttactttacatttaagctagggttaagataaaaattgttatggcttaaaagcatttacacttactcaaatatatagcatacataacatggctttgcaaaaatggttaccaattttgttgactcaatgaaaccactcagttgctcagtttttgaatgacttcgtaattttatttataactgcaatgattttgattcggaataaaatgttatgcaattgctgaataatacttctaatgacaccaagtccaacaacaatgattgagttaataataaggataataatataaatatgcattatgttcacttccaataattatcgcccaataaggagtttaacaaacgtttaccgaaaaccacagatgatagataatacctaaatactttcgagattatcacaccaactctcgtattgcacattgaactaaagaattttgaaatggaatgtggcgagtttcgttgaaatgccctcggttgtgcttcagtatttcattgttaacatatttctcttgtttgtgtgtgtgtattgctctaggggattaagtcgtacaatagtcgattctaaatatcgtatgtatataattacattaattatttgttgctgttgggttttaacatgttcagtctagtaagatatttatgcaaagaggcgcgctcctaaatgtacatacaatcatttacacccgcctataaaaggtatagatggagctgggtaattaatttcactaacttggtgctaattctatatacaaattttatgtgcggcttattttgttctctgctttagccatttattaagtgcagcctgggaagacgcgaacgaattatcggtgattttttagcatgggcctgccctttcttcaggttctctattgggtcttttcagtgtgccatggtatttggtttattgcacttttcattgacttttgaacttt

SEQ ID NO: 14315 - DNA, 2227 bp, DROSOPHILA
tcttcaatgttaatttctttagaccctcggaaaaccacaacaaaaggtgcggatcgacatccaaatgagctccctgttccgcagcctgaaccatttttcttcgaaacgggagaatgtcgtgaaggaggcgctcataaatacactgaacgaaaatgcgcgtgagatagagttcgaggtgaaacagaagagtttggaggtcctgggagtatgtgagcagaccagtgccctgtgcaccaccctggaggccctgttcctgcacgggctgaaggactccttcctgtccgccaccttcaatgtcatcgctggcgatgtggaacgcaggcccgagcccagcttctgggcgccctgcatggtctttatgcacaagcaggtgatcgagcaggtgcagggtctcagccagatcacctcagagacggggcagtgccgcgcctgggtgcgccagtcgcttaacgagtctgtgttctcctcctatctgaacaacatgcgcaagaacggatcggccctgtcgcagtactacaagcgaaacgcccttatgcgggactccgagggtctggagacggccgccaagattatggagagcttggaggcctatgtgcaattcgatctgccagtgaactccagcctgttgaaccactggcccgactactccctgcagctatctgatctctggacacctgctctcaagtcctgcccgattagcagcggagttgatgtggccagctcgcttggatccgatatcattgccataccgacgccacagcccctgcagaccaatgaactgttctcggagtccatttcgaatagcccctttggaaggaatagcaactttggtgttcccgaactcagccagcgagagaacctggacctgctgatacaaaagtttgatgaaatggatgtgattaacgaggagcaaacaggtggcgataaagcggaaacgaatgaaacagcagagcaggaagctccatctggcagtaagacgaggtcgaggaaaaaatccaatcgtcaaatggacagcagctccttcgccgatctggatcttgaagcaccttctcttctgccccagggcagtaattctttgtccaatctaatgcaaacctcatggtctggtgacttggaagcaacgcctacatcacccacagaggaactgacaggatctaggtttttccagcgatctgtgagcgtcagtagttcagtcagtctgcgttctccaactacggacagatgcagctacaatgctctgttgcggaaacacgaaagcaaccgggaaagtggagccggatggtcggagatctgggagaagtttcgggccagtgcctccaacctcaatgtggctcagcctcagcgagataccgatccgcccatttcagaagacttgagtgatctgcagtcactggacaccaactcggagtttgagctgcttacctcagagtttgacatggtggagctgcagcaaatggtggcccagctgtgtcaactagctcgagagccgggtctggatgcccagggattcctgtgcaagagctgtcagcatccgctgggcattggctactccaactttcaagtttgcgcctttagtggcagctactactgcaatagctgcatggatgttgagatgcaattgatacccgctcgcatcatttacaattgggatttccgaaagtacagcgtcagcaagcgggcagcaactttccttgccgaattccgatcgcatccattcctggacatgcagttgcttaacccgagaatatattttgcttccgatgccatggctgaattgcaatccctgcggatccgactaaacttcattagggcctatttgtatacctgtgctccgagcagcatagagcttctccagaatcagtttgctggcagggagtacctttacgagcacattcatctgtactccatagcagatttggctcttattcagcgaggtgtgctgtgtcagcagctgcagaaagccttcaaattgggggaagcgcatgtcttgaagtgcagactgtgccacctaaaaggattcatctgcgagatatgccagagtccaagggtgctgtatccctttcacatcagcaccacattcagatgtctggcctgtggagctgtgttccacgctgagtgtttgaatgagaagcagccatgtcccaaatgtgaacgaatacgtaagcgcgaggatcagggcctccaggaggcggtgcaatgtcttaaacagaagaatgaggttgcctaa

SEQ ID NO: 14316 - protein, 720 aa, DROSOPHILA
MSSLFRSLNHFSSKRENVVKEALINTLNENAREIEFEVKQKSLEVLGVCEQTSALCTTLEALFLHGLKDSFLSATFNVIAGDVERRPEPSFWAPCMVFMHKQVIEQVQGLSQITSETGQCRAWVRQSLNESVFSSYLNNMRKNGSALSQYYKRNALMRDSEGLETAAKIMESLEAYVQFDLPVNSSLLNHWPDYSLQLSDLWTPALKSCPISSGVDVASSLGSDIIAIPTPQPLQTNELFSESISNSPFGRNSNFGVPELSQRENLDLLIQKFDEMDVINEEQTGGDKAETNETAEQEAPSGSKTRSRKKSNRQMDSSSFADLDLEAPSLLPQGSNSLSNLMQTSWSGDLEATPTSPTEELTGSRFFQRSVSVSSSVSLRSPTTDRCSYNALLRKHESNRESGAGWSEIWEKFRASASNLNVAQPQRDTDPPISEDLSDLQSLDTNSEFELLTSEFDMVELQQMVAQLCQLAREPGLDAQGFLCKSCQHPLGIGYSNFQVCAFSGSYYCNSCMDVEMQLIPARIIYNWDFRKYSVSKRAATFLAEFRSHPFLDMQLLNPRIYFASDAMAELQSLRIRLNFIRAYLYTCAPSSIELLQNQFAGREYLYEHIHLYSIADLALIQRGVLCQQLQKAFKLGEAHVLKCRLCHLKGFICEICQSPRVLYPFHISTTFRCLACGAVFHAECLNEKQPCPKCERIRKREDQGLQEAVQCLKQKNEVA

SEQ ID NO: 14317 - DNA, 3000 bp, DROSOPHILA
ttatacgtaatttcaaaatgattgcgatttttaatggctttatttttttcgtgcagaagaattatatttttgaaccgaacttatattttttatccgaatgattagaaattccacatcactcttaagatagagaaacaacggatataaatttttgcgcaaacaaaatcaggcacatctaacacacatccaccgacattcacatttagacaatcagacttttgtgctcatgtccttcgtgactgtgtgtgtgcacagaacacacaaaattgcaaattacgaaaacgaattccgagaaagtcacaaatggaatcgcattaaatcaaatcaaacgaaacgtacgaaatcaaacgaaacaattctgggcagatggttccctggctggaatggctaccaaaatccctatcgaacgccgtgtaaatctcagatgacatctgagcatattgtcgcctaattacataaacgcatgtgcaaaggggcgctgggggcgtggtcctcacgcatggtacctccaacaatcgctaattagtctcggggcactgacaatgtgacacggcgcagatcaaacggctggccgctcagatcccatgttactgtgcattctcttttttatttgggatactcaactcgtccctgggcggctttttttttttgtgccatgcttacccctcagcattcaggccgagcgaaattaaatgaaaacacagcattcgcggaagatcaaagcggatgcgacaagtcattggggatctgagaaatttccaaaactccgtgctgggaaatttaaattagttgcaccgtttagcagggaatcattttgcaaactgaacgctaaaaatagcaaagttaacttttccgtgtactttattatggactagtttatggtataactttcaatgtttacgtaatcgtatatccaaatttgtgccatacttatgtatttgcttgtggcacaatgattcgctctaaaacgaataataaatatataaaaaaattaagcaattcacagtcttccatatacttcaacgctgaaaaaataagagctgtttaaaaccatccaaagtaacgagtttagaaaaacacttaccgataaatacaagtggaattcgcaccgtgattcgaattgaacgaaaagtccagatttcgaaaaaaggtgtcgctgcgcacactgtagctctgagtacgcttgttggccgcgttatcgtaactccactgtcccaacagctccctcttggaattttcgcttcgcaatccctggaaaaagaagagccattgaagacttcgcgatccattaaaactcagtgcatacatatacatcgaagtttttgggcgcactcttcacgcacaaatcgggcgtcatttcgcgggccacgtgggtcagggttatggcctccacgatgatggtcctggccagatgaagagtcacagtggcccggcttccattaaatccgaagcatgaacccggagaaagcccagttcgaatcatattcaccggcggattagtgctgaagtccagacccagaagacttctgataatattggtaccatcaatagagtgtgccttcacattaatgatcctggcacccagctcctccgaagcatagttaatgcgaggcttggccagcgccacggattcgggtttcggagtcgattgggcacttttggaggagcaatcggcactcatcacttgcttcttcagattgtaaacgtcgtccatcaaatgtccaatcttgcgcttgaacagagtatccacataggcacttacatcccggttattgcacattccagatcctactcccttcggttcccctccaaggcaattgaacttgcacgagccctgagccactttgctgtctatctgctgctgacgcaggatgtgctgggggaaagctattgggctggggtgtctgctagaagggattagacaacagccttaccgatatatcatcgacatcctcacgaagtcgcattatacccaaattattcctgctgttgtgggccatgaggtagtaaaaaaaggttgagagcagcacaaatgagatcacatatgttacatagactcgctttctagctcgtcgacaaccatccattttggatgctgagttgttaatgttaactctaacagatttctgcgaaaagtcaagaaaagtctactagatgtttgtaaatgtcacaatttctgagaacgaatatcttatataattactgttttattttaaacctattcacaacgacactcgaccacaaaaagaagtgttcgataattgggtcgtaggaatgcgatgaatcaaatataattccccgagaaaatcgctggaaaatgaacaattgttgagaataatgaggcgaaatcgcattaggtgcggcagcatctgcgaaagtctctaattgtcaatggctaaataattgagagccgagagcaaaggaagcgaaaggaacagcgaaggggaaaagcggacaaaacgtaatagcattaaggaaaaatccaaatgaaaatcactttaaatgctaaacagctggttgccgaccgaggcgaaataaaaacacataaagcgccttcgggcctttaagcatccattaaaaatttaataactttggtccggacccaatgcaattttgtaaaattctctagcaaaattaattagtcaaacaatccatcaggacgcaaaccggacctccttaacgtggccagtgctggcaaattatgctggcccaaagaccctgagtccagagtccacaaaaaggtacgcaatcccgctgagaaggacatggcggcattgtgaacgtgatcatccccacattttggtcaggggattttccatccaagagtcctttttggtccggctcacgtgcgttgcctaagctggcaaaatattgacccaaaccggacgagaaaatttaggttacagacgtccgttggcgaatcccaacacttcaaaggccgcaatgaatgtaattttaatcaaaaattgttcagccccaagaaatcccaatgcaggaaat

SEQ ID NO: 14318 - DNA, 822 bp, DROSOPHILA
atggcccacaacagcaggaataatttgggtataatgcgacttcgtgaggatgtcgatgatatatcgcacatcctgcgtcagcagcagatagacagcaaagtggctcagggctcgtgcaagttcaattgccttggaggggaaccgaagggagtaggatctggaatgtgcaataaccgggatgtaagtgcctatgtggatactctgttcaagcgcaagattggacatttgatggacgacgtttacaatctgaagaagcaagtgatgagtgccgattgctcctccaaaagtgcccaatcgactccgaaacccgaatccgtggcgctggccaagcctcgcattaactatgcttcggaggagctgggtgccaggatcattaatgtgaaggcacactctattgatggtaccaatattatcagaagtcttctgggtctggacttcagcactaatccgccggtgaatatgattcgaactgggctttctccgggttcatgcttcggatttaatggaagccgggccactgtgactcttcatctggccaggaccatcatcgtggaggccataaccctgacccacgtggcccgcgaaatgacgcccgatttgtgcgtgaagagtgcgcccaaaaacttcgatggattgcgaagcgaaaattccaagagggagctgttgggacagtggagttacgataacgcggccaacaagcgtactcagagctacagtgtgcgcagcgacaccttttttcgaaatctggacttttcgttcaattcgaatcacggtgcgaattccacttgtatttatcgcgttgaagtatatggaagactgtga

SEQ ID NO: 14319 - protein, 273 aa, DROSOPHILA
MAHNSRNNLGIMRLREDVDDISHILRQQQIDSKVAQGSCKFNCLGGEPKGVGSGMCNNRDVSAYVDTLFKRKIGHLMDDVYNLKKQVMSADCSSKSAQSTPKPESVALAKPRINYASEELGARIINVKAHSIDGTNIIRSLLGLDFSTNPPVNMIRTGLSPGSCFGFNGSRATVTLHLARTIIVEAITLTHVAREMTPDLCVKSAPKNFDGLRSENSKRELLGQWSYDNAANKRTQSYSVRSDTFFRNLDFSFNSNHGANSTCIYRVEVYGRL
